United States Patent Application Publication US 2011/0183924 A1 - sequence listing, part 96

SEQ ID NO: 305652 - DNA, 738 bp, Homo sapiens
gacagggcctggctcaggtgtccagaggctgccgctggcctccctatgggatcagactgcagggagggagggcagcagggatgtggagggagtgatgatggggctgacctgggggtggctccaggcattgtccccacctgggcccttacccagcctccctcacaggctcctggccctcagtctctcccctccactccattctccacctacccacagtgggtcattctgatcaccgaactgaccatgccagccctgccgatggtcctccatggctccctagtgccctggagaggaggtgtctagtcagagagtagtcctggaaggtggcctctgtgaggagccacggggacagcatcctgcagatggtcctggcccttgtcccaccgacctgtctacaaggactgtcctcgtggaccctcccctctgcacaggagctggaccctgaagtcccttccccaccggccaggactggagcccctacccctctgttggaatccctgcccaccttcttctggaagtcggctctggagacatttctctcttcttccaaagctgggaactgctatctgttatctgcctgtccaggtctgaaagataggattgcccaggcagaaactgggactgacctatctcactctctccctgcttttacccttagggtgattctgggggcccacttgtctgtaatggtgtgcttcaaggtatcacgtcatggggcagtgaaccatgtgccctgcc

SEQ ID NO: 305653 - DNA, 1514 bp, Homo sapiens
atcggccaccgccatcccatccagcgagcatctgccgccgcgccgccgccaccctcccagagagcactggccaccgctccaccatcacttgcccagagtttgggccaccgcccgccgccaccagcccagagagcatcggcccctgtctgctgctcgcgcctggagatgtcagaggtccccgttgctcgcgtctggctggtactgctcctgctgactgtccaggtcggcgtgacagccggcgctccgtggcagtgcgcgccctgctccgccgagaagctcgcgctctgcccgccggtgtccgcctcgtgctcggaggtcacccggtccgccggctgcggctgttgcccgatgtgcgccctgcctctgggcgccgcgtgcggcgtggcgactgcacgctgcgcccggggactcagttgccgcgcgctgccgggggagcagcaacctctgcacgccctcacccgcggccaaggcgcctgcgtgcaggagtctgacgcctccgctccccatgctgcagaggcagggagccctgaaagcccagagagcacggagataactgaggaggagctcctggataatttccatctgatggccccttctgaagaggatcattccatcctttgggacgccatcagtacctatgatggctcgaaggctctccatgtcaccaacatcaaaaaatggaaggagccctgccgaatagaactctacagagtcgtagagagtttagccaaggcacaggagacatcaggagaagaaatttccaaattttacctgccaaactgcaacaagaatggattttatcacagcagacagtgtgagacatccatggatggagaggcgggactctgctggtgcgtctacccttggaatgggaagaggatccctgggtctccagagatcaggggagaccccaactgccagatgtattttaatgtacaaaactgaaaccagatgaaataatgttctgtcacgtgaaatatttaagtatatagtatatttatactctagaacatgcacatttatatatatatgtatatgtatatatatatagtaactactttttatactccatacataacttgatatagaaagctgtttatttattcactgtaagtttattttttctacacagtaaaaacttgtactatgttaataacttgtcctatgtcaatttgtatatcatgaaacacttctcatcatattgtatgtaagtaattgcatttctgctcttccaaagctcctgcgtctgtttttaaagagcatggaaaaatactgcctagaaaatgcaaaatgaaataagagagagtagtttttcagctagtttgaaggaggacggttaacttgtatattccaccattcacatttgatgtacatgtgtagggaaagttaaaagtgttgattacataatcaaagctacctgtggtgatgttgccacctgttaaaatgtacactggatatgttgttaaacacgtgtctataatggaaacatttacaataaatattctgcatggaaa

SEQ ID NO: 305654 - DNA, 1696 bp, Homo sapiens
atcggccaccgccatcccatccagcgagcatctgccgccgcgccgccgccaccctcccagagagcactggccaccgctccaccatcacttgcccagagtttgggccaccgcccgccgccaccagcccagagagcatcggcccctgtctgctgctcgcgcctggagatgtcagaggtccccgttgctcgcgtctggctggtactgctcctgctgactgtccaggtcggcgtgacagccggcgctccgtggcagtgcgcgccctgctccgccgagaagctcgcgctctgcccgccggtgtccgcctcgtgctcggaggtcacccggtccgccggctgcggctgttgcccgatgtgcgccctgcctctgggcgccgcgtgcggcgtggcgactgcacgctgcgcccggggactcagttgccgcgcgctgccgggggagcagcaacctctgcacgccctcacccgcggccaaggcgcctgcgtgcaggagtctgacgcctccgctccccatgctgcagaggcagggagccctgaaagcccagagagcacggagataactgaggaggagctcctggataatttccatctgatggccccttctgaagaggatcattccatcctttgggacgccatcagtacctatgatggctcgaaggctctccatgtcaccaacatcaaaaaatggaaggagccctgccgaatagaactctacagagtcgtagagagtttagccaaggcacaggagacatcaggagaagaaatttccaaattttacctgccaaactgcaacaagaatggattttatcacagcagacagtgtgagacatccatggatggagaggcgggactctgctggtgcgtctacccttggaatgggaagaggatccctgggtctccagagatcaggggagaccccaactgccagatgtattttaatgtacaaaactgaaaccagatgaaataatgttctgtcacgtgaaatatttaagtatatagtatatttatactctagaacatgcacatttatatatatatgtatatgtatatatatatagtaactactttttatactccatacataacttgatatagaaagctgtttatttattcactgtaagtttattttttctacacagtaaaaacttgtactatgttaataacttgtcctatgtcaatttgtatatcatgaaacacttctcatcatattgtatgtaagtaattgcatttctgctcttccaaagctcctgcgtctgtttttaaagagcatggaaaaatactgcctagaaaatgcaaaatgaaataagagagagtagtttttcagctagtttgaaggaggacggttaacttgtatattccaccattcacatttgatgtacatgtgtagggaaagttaaaagtgttgattacataatcaaagctacctgtggtgatgttgccacctgttaaaatgtacactggatatgttgttaaacacgtgtctataatggaaacatttacaataaatattctgcatggaaaaaaaaattggtgagtattaagaggggggcagcacattggaagccctcatgagtgcagggcccgccacttgtccagagggccaccactggggatgtacttgaccccacaccatctgggatgagccgcttttagccaccatgtcttcaaatcatcaacattgcttggtgcccactctttgaggg

SEQ ID NO: 305655 - DNA, 1854 bp, Homo sapiens
atcggccaccgccatcccatccagcgagcatctgccgccgcgccgccgccaccctcccagagagcactggccaccgctccaccatcacttgcccagagtttgggccaccgcccgccgccaccagcccagagagcatcggcccctgtctgctgctcgcgcctggagatgtcagaggtccccgttgctcgcgtctggctggtactgctcctgctgactgtccaggtcggcgtgacagccggcgctccgtggcagtgcgcgccctgctccgccgagaagctcgcgctctgcccgccggtgtccgcctcgtgctcggaggtcacccggtccgccggctgcggctgttgcccgatgtgcgccctgcctctgggcgccgcgtgcggcgtggcgactgcacgctgcgcccggggactcagttgccgcgcgctgccgggggagcagcaacctctgcacgccctcacccgcggccaaggcgcctgcgtgcaggagtctgacgcctccgctccccatgctgcagaggcagggagccctgaaagcccagagagcacggagataactgaggaggagctcctggataatttccatctgatggccccttctgaagaggatcattccatcctttgggacgccatcagtacctatgatggctcgaaggctctccatgtcaccaacatcaaaaaatggaaggagccctgccgaatagaactctacagagtcgtagagagtttagccaaggcacaggagacatcaggagaagaaatttccaaattttacctgccaaactgcaacaagaatggattttatcacagcagacagtgtgagacatccatggatggagaggcgggactctgctggtgcgtctacccttggaatgggaagaggatccctgggtctccagagatcaggggagaccccaactgccagatgtattttaatgtacaaaactgaaaccagatgaaataatgttctgtcacgtgaaatatttaagtatatagtatatttatactctagaacatgcacatttatatatatatgtatatgtatatatatatagtaactactttttatactccatacataacttgatatagaaagctgtttatttattcactgtaagtttattttttctacacagtaaaaacttgtactatgttaataacttgtcctatgtcaatttgtatatcatgaaacacttctcatcatattgtatgtaagtaattgcatttctgctcttccaaagctcctgcgtctgtttttaaagagcatggaaaaatactgcctagaaaatgcaaaatgaaataagagagagtagtttttcagctagtttgaaggaggacggttaacttgtatattccaccattcacatttgatgtacatgtgtagggaaagttaaaagtgttgattacataatcaaagctacctgtggtgatgttgccacctgttaaaatgtacactggatatgttgttaaacacgtgtctataatggaaacatttacaataaatattctgcatggaaaaaaaaaaaaaaaaaaaaaaaaaaaaaaaaaaaaaaaaaaaaaaaaaaaaaaaaaaaaaaaaaaaaaaaaaaaaaaaaaaaaaaaaaaaaaaaaaaaaccaaaaaaaaaaaaaaaaaaaaaaaaaaaaaaattggggccccctttgcccaattcatttttaaattcgaaaaatttttaactgggccccaaaattgacccaattttggcaaatgccccttaaagggggggatttaaaaataaaggggcccggttttaaaaacgcttaattggaaaaaccctgggggtccccaacttaaaagcctttgaaaaaaaacccctttttccaaggggggaaaaaagg

SEQ ID NO: 305656 - DNA, 1988 bp, Homo sapiens
ctaaaagcttcacttccattcattgccatagaaaaacaatgtttgatgtgtatgttgccccctaagaacatgacaatcaggttctttcctggatttaagcaggcatttgtttgtagcgggaagtggaggaaatgcctctttctctactccagcccctatctcctcatctggactgcttgcacgtcctgtcctgtgccattcttggaggaattaggacttccataccctgatagggtgttagagtgagtgtgtgagagtcagtgacccttccaaggagggaacagggatttcctgcggattctctgcccttcagaggaaatgaaagggagtcgtctcactgatcctcaaggagatggatttccacagggggtcccttataggccagtgtgctgattctgttcatgtacctttggactctatctgcaagatcctcttgccatgggggtggagggggtgttgcagagaagtccattaggacgtgggaaggcaggggccccaaaatagaagagggtagtagtttgggtcaggagagctgcattctagactccacttctagatgaactgtaccatccattcagggatattagttccccattttaaggatggagaagctgaggtttcgaggctccctactaatgcggttaggaactgaactctaatcctggcttctttagggttgttctcaacctcagcaaatgcatttgttgctctgctcccctgctgctttaaaagcagaaacgtggggcacccttgccaggccctgaaacttactattgtcaggaacagagctggcatgctgttgggacataactcttcctggaaaccattacaaggtcctttacagtgagagtcagtgaaaatcaggttagggaatgtggccatcctcatggcccagcctggttttgagggaaggaagtgatctcctgggggcccgaaaggggcagatgctttgggagggctcatggggtctgcaatgtttcctttccagaggcagggagccctgaaagcccagagagcacggagataactgaggaggagctcctggataatttccatctgatggccccttctgaagaggatcattccatcctttgggacgccatcagtacctatgatggctcgaaggctctccatgtcaccaacatcaaaaaatggaaggagccctgccgaatagaactctacagagtcgtagagagtttagccaaggcacaggagacatcaggagaagaaatttccaaattttacctgccaaactgcaacaagaatggattttatcacagcagacagtgtgagacatccatggatggagaggcgggactctgctggtgcgtctacccttggaatgggaagaggatccctgggtctccagagatcaggggagaccccaactgccagatgtattttaatgtacaaaactgaaaccagatgaaataatgttctgtcacgtgaaatatttaagtatatagtatatttatactctagaacatgcacatttatatatatatgtatatgtatatatatatagtaactactttttatactccatacataacttgatatagaaagctgtttatttattcactgtaagtttattttttctacacagtaaaaacttgtactatgttaataacttgtcctatgtcaatttgtatatcatgaaacacttctcatcatattgtatgtaagtaattgcatttctgctcttccaaagctcctgcgtctgtttttaaagagcatggaaaaatactgcctagaaaatgcaaaatgaaataagagagagtagtttttcagctagtttgaaggaggacggttaacttgtatattccaccattcacatttgatgtacatgtgtagggaaagttaaaagtgttgattacataatcaaagctacctgtggtgatgttgccacctgttaaaatgtacactggatatgttgttaaacacgtgtctataatggaaacatttacaataaatattctgcatggaaa

SEQ ID NO: 305657 - DNA, 1934 bp, Homo sapiens
ctaaaagcttcacttccattcattgccatagaaaaacaatgtttgatgtgtatgttgccccctaagaacatgacaatcaggttctttcctggatttaagcaggcatttgtttgtagcgggaagtggaggaaatgcctctttctctactccagcccctatctcctcatctggactgcttgcacgtcctgtcctgtgccattcttggaggaattaggacttccataccctgatagggtgttagagtgagtgtgtgagagtcagtgacccttccaaggagggaacagggatttcctgcggattctctgcccttcagaggaaatgaaagggagtcgtctcactgatcctcaaggagatggatttccacagggggtcccttataggccagtgtgctgattctgttcatgtacctttggactctatctgcaagatcctcttgccatgggggtggagggggtgttgcagagaagtccattaggacgtgggaaggcaggggccccaaaatagaagagggtagtagtttgggtcaggagagctgcattctagactccacttctagatgaactgtaccatccattcagggatattagttccccattttaaggatggagaagctgaggtttcgaggctccctactaatgcggttaggaactgaactctaatcctggcttctttagggttgttctcaacctcagcaaatgcatttgttgctctgctcccctgctgctttaaaagcagaaacgtggggcacccttgccaggccctgaaacttactattgtcaggaacagagctggcatgctgttgggacataactcttcctggaaaccattacaaggtcctttacagtgagagtcaggaaggaagtgatctcctgggggcccgaaaggggcagatgctttgggagggctcatggggtctgcaatgtttcctttccagaggcagggagccctgaaagcccagagagcacggagataactgaggaggagctcctggataatttccatctgatggccccttctgaagaggatcattccatcctttgggacgccatcagtacctatgatggctcgaaggctctccatgtcaccaacatcaaaaaatggaaggagccctgccgaatagaactctacagagtcgtagagagtttagccaaggcacaggagacatcaggagaagaaatttccaaattttacctgccaaactgcaacaagaatggattttatcacagcagacagtgtgagacatccatggatggagaggcgggactctgctggtgcgtctacccttggaatgggaagaggatccctgggtctccagagatcaggggagaccccaactgccagatgtattttaatgtacaaaactgaaaccagatgaaataatgttctgtcacgtgaaatatttaagtatatagtatatttatactctagaacatgcacatttatatatatatgtatatgtatatatatatagtaactactttttatactccatacataacttgatatagaaagctgtttatttattcactgtaagtttattttttctacacagtaaaaacttgtactatgttaataacttgtcctatgtcaatttgtatatcatgaaacacttctcatcatattgtatgtaagtaattgcatttctgctcttccaaagctcctgcgtctgtttttaaagagcatggaaaaatactgcctagaaaatgcaaaatgaaataagagagagtagtttttcagctagtttgaaggaggacggttaacttgtatattccaccattcacatttgatgtacatgtgtagggaaagttaaaagtgttgattacataatcaaagctacctgtggtgatgttgccacctgttaaaatgtacactggatatgttgttaaacacgtgtctataatggaaacatttacaataaatattctgcatggaaa

SEQ ID NO: 305658 - DNA, 1938 bp, Homo sapiens
ctaaaagcttcacttccattcattgccatagaaaaacaatgtttgatgtgtatgttgccccctaagaacatgacaatcaggttctttcctggatttaagcaggcatttgtttgtagcgggaagtggaggaaatgcctctttctctactccagcccctatctcctcatctggactgcttgcacgtcctgtcctgtgccattcttggaggaattaggacttccataccctgatagggtgttagagtgagtgtgtgagagtcagtgacccttccaaggagggaacagggatttcctgcggattctctgcccttcagaggaaatgaaagggagtcgtctcactgatcctcaaggagatggatttccacagggggtcccttataggccagtgtgctgattctgttcatgtacctttggactctatctgcaagatcctcttgccatgggggtggagggggtgttgcagagaagtccattaggacgtgggaaggcaggggccccaaaatagaagagggtagtagtttgggtcaggagagctgcattctagactccacttctagatgaactgtaccatccattcagggatattaggcggttaggaactgaactctaatcctggcttctttagggttgttctcaacctcagcaaatgcatttgttgctctgctcccctgctgctttaaaagcagaaacgtggggcacccttgccaggccctgaaacttactattgtcaggaacagagctggcatgctgttgggacataactcttcctggaaaccattacaaggtcctttacagtgagagtcagtgaaaatcaggttagggaatgtggccatcctcatggcccagcctggttttgagggaaggaagtgatctcctgggggcccgaaaggggcagatgctttgggagggctcatggggtctgcaatgtttcctttccagaggcagggagccctgaaagcccagagagcacggagataactgaggaggagctcctggataatttccatctgatggccccttctgaagaggatcattccatcctttgggacgccatcagtacctatgatggctcgaaggctctccatgtcaccaacatcaaaaaatggaaggagccctgccgaatagaactctacagagtcgtagagagtttagccaaggcacaggagacatcaggagaagaaatttccaaattttacctgccaaactgcaacaagaatggattttatcacagcagacagtgtgagacatccatggatggagaggcgggactctgctggtgcgtctacccttggaatgggaagaggatccctgggtctccagagatcaggggagaccccaactgccagatgtattttaatgtacaaaactgaaaccagatgaaataatgttctgtcacgtgaaatatttaagtatatagtatatttatactctagaacatgcacatttatatatatatgtatatgtatatatatatagtaactactttttatactccatacataacttgatatagaaagctgtttatttattcactgtaagtttattttttctacacagtaaaaacttgtactatgttaataacttgtcctatgtcaatttgtatatcatgaaacacttctcatcatattgtatgtaagtaattgcatttctgctcttccaaagctcctgcgtctgtttttaaagagcatggaaaaatactgcctagaaaatgcaaaatgaaataagagagagtagtttttcagctagtttgaaggaggacggttaacttgtatattccaccattcacatttgatgtacatgtgtagggaaagttaaaagtgttgattacataatcaaagctacctgtggtgatgttgccacctgttaaaatgtacactggatatgttgttaaacacgtgtctataatggaaacatttacaataaatattctgcatggaaa

SEQ ID NO: 305659 - DNA, 1460 bp, Homo sapiens
atcggccaccgccatcccatccagcgagcatctgccgccgcgccgccgccaccctcccagagagcactggccaccgctccaccatcacttgcccagagtttgggccaccgcccgccgccaccagcccagagagcatcggcccctgtctgctgctcgcgcctggagatgtcagaggtccccgttgctcgcgtctggctggtactgctcctgctgactgtccaggtcggcgtgacagccggcgctccgtggcagtgcgcgccctgctccgccgagaagctcgcgctctgcccgccggtgtccgcctcgtgctcggaggtcacccggtccgccggctgcggctgttgcccgatgtgcgccctgcctctgggcgccgcgtgcggcgtggcgactgcacgctgcgcccggggactcagttgccgcgcgctgccgggggagcagcaacctctgcacgccctcacccgcggccaaggcgcctgcgtgcaggagtctgacgcctccgctccccatgctgcagaggcagggagccctgaaagcccagagagcacggagataactgaggaggagctcctggataatttccatctgatggccccttctgaagaggatcattccatcctttgggacgccatcagtacctatgatggctcgaaggctctccatgtcaccaacatcaaaaaatggaaggagccctgccgaatagaactctacagagtcgtagagagtttagccaaggcacaggagacatcaggagaagaaatttccaaattttacctgccaaactgcaacaagaatggattttatcacagcagacagtgtgagacatccatggatggagaggcgggactctgctggtgcgtctacccttggaatgggaagaggatccctgggtctccagagatcaggggagaccccaactgccagatgtattttaatgtacaaaactgaaaccagatgaaataatgttctgtcacgtgaaatatttaagtatatagtatatttatactctagaacatgcacatttatatatatatgtatatgtatatatatatagtaactactttttatactccatacataacttgatatagaaagctgtttatttattcactgtaagtttattttttctacacagtaacttctcatcatattgtatgtaagtaattgcatttctgctcttccaaagctcctgcgtctgtttttaaagagcatggaaaaatactgcctagaaaatgcaaaatgaaataagagagagtagtttttcagctagtttgaaggaggacggttaacttgtatattccaccattcacatttgatgtacatgtgtagggaaagttaaaagtgttgattacataatcaaagctacctgtggtgatgttgccacctgttaaaatgtacactggatatgttgttaaacacgtgtctataatggaaacatttacaataaatattctgcatggaaa

SEQ ID NO: 305660 - DNA, 2677 bp, Homo sapiens
atcggccaccgccatcccatccagcgagcatctgccgccgcgccgccgccaccctcccagagagcactggccaccgctccaccatcacttgcccagagtttgggccaccgcccgccgccaccagcccagagagcatcggcccctgtctgctgctcgcgcctggagatgtcagaggtccccgttgctcgcgtctggctggtactgctcctgctgactgtccaggtcggcgtgacagccggcgctccgtggcagtgcgcgccctgctccgccgagaagctcgcgctctgcccgccggtgtccgcctcgtgctcggaggtcacccggtccgccggctgcggctgttgcccgatgtgcgccctgcctctgggcgccgcgtgcggcgtggcgactgcacgctgcgcccggggactcagttgccgcgcgctgccgggggagcagcaacctctgcacgccctcacccgcggccaaggcgcctgcgtgcaggagtctgacgcctccgctccccatgctgcagaggcagggagccctgaaagcccagagagcacggagataactgaggaggagctcctggataatttccatctgatggccccttctgaagaggatcattccatcctttgggacgccatcagtacctatgatggctcgaaggctctccatgtcaccaacatcaaaaaatggaagaaggtgaggcccagcaggtgggtggtgggaactctcctgtcagaggatgtagcttgagtcggctgtgacaagcagacctggcccactccttcctggtcctgatgccctggaaagaaatgcttttcccccaaaacctagtggccatttctcagttaaactttgtcaaactgtgaacacatggactttcaggagaggagcccactggatgcaaagaaaatgtagttccggacgataggttacttcatgtctctgagctcctctctaaagggtgtgagaacattgagttacattgttccaaaacttagtacaagggcctaactgctttcacccccattgtatgatttgcctccctttaaaaaagttgtcataaaatagacataataagtaatgcatgttattctgcaaccactaccaatatctaccttcagaattttcatcttcccaaactgaagctcggaactcattaaacatcaactctccattatcttaattatgtctgttttgaattctaccacttgagggcgacagagaatcaaagtcggagtgatttgatttgagaaaataaattacttccacaaacatgcctacccagaaaaagggaggattaaaccattttctcaacattttggaatttcatctgagaataacgataaatggaggaaagttaattcttaaattatccaaatgaatgccttaatcctcacttgatttagtttatgtaaaagaaccttgtagattgcagaggaaagttattcaaaatctagaaatgtcttctgctaaattcttaattaagagttatgcccactcttctaaccagatggcgggtgccaaaagtattcagtaggtggcaggaagagttgggaagagttttgtggtgttggtgaggctcttgccaggggatgtctctgtgcaggtgttgagagagtgattggtgagggagagaatggtgttcttgttctttatctgaacaacttaagacagactaactgcaggtgggaaaaagaggcccagagggagcacatcacatgacacctagtcccaggtccccgtggccagatcgtagggccactcctgcttctacaaaacctcttccatcagtcattgtctaggctgataattcactgtgtcttgttagatatgctaatgtcaagttattctcttaggagccctgccgaatagaactctacagagtcgtagagagtttagccaaggcacaggagacatcaggagaagaaatttccaaattttacctgccaaactgcaacaagaatggattttatcacagcagacagtgtgagacatccatggatggagaggcgggactctgctggtgcgtctacccttggaatgggaagaggatccctgggtctccagagatcaggggagaccccaactgccagatgtattttaatgtacaaaactgaaaccagatgaaataatgttctgtcacgtgaaatatttaagtatatagtatatttatactctagaacatgcacatttatatatatatgtatatgtatatatatatagtaactactttttatactccatacataacttgatatagaaagctgtttatttattcactgtaagtttattttttctacacagtaaaaacttgtactatgttaataacttgtcctatgtcaatttgtatatcatgaaacacttctcatcatattgtatgtaagtaattgcatttctgctcttccaaagctcctgcgtctgtttttaaagagcatggaaaaatactgcctagaaaatgcaaaatgaaataagagagagtagtttttcagctagtttgaaggaggacggttaacttgtatattccaccattcacatttgatgtacatgtgtagggaaagttaaaagtgttgattacataatcaaagctacctgtggtgatgttgccacctgttaaaatgtacactggatatgttgttaaacacgtgtctataatggaaacatttacaataaatattctgcatggaaa

SEQ ID NO: 305661 - DNA, 2731 bp, Homo sapiens
atcggccaccgccatcccatccagcgagcatctgccgccgcgccgccgccaccctcccagagagcactggccaccgctccaccatcacttgcccagagtttgggccaccgcccgccgccaccagcccagagagcatcggcccctgtctgctgctcgcgcctggagatgtcagaggtccccgttgctcgcgtctggctggtactgctcctgctgactgtccaggtcggcgtgacagccggcgctccgtggcagtgcgcgccctgctccgccgagaagctcgcgctctgcccgccggtgtccgcctcgtgctcggaggtcacccggtccgccggctgcggctgttgcccgatgtgcgccctgcctctgggcgccgcgtgcggcgtggcgactgcacgctgcgcccggggactcagttgccgcgcgctgccgggggagcagcaacctctgcacgccctcacccgcggccaaggcgcctgcgtgcaggagtctgacgcctccgctccccatgctgcagaggcagggagccctgaaagcccagagagcacggagataactgaggaggagctcctggataatttccatctgatggccccttctgaagaggatcattccatcctttgggacgccatcagtacctatgatggctcgaaggctctccatgtcaccaacatcaaaaaatggaagaaggtgaggcccagcaggtgggtggtgggaactctcctgtcagaggatgtagcttgagtcggctgtgacaagcagacctggcccactccttcctggtcctgatgccctggaaagaaatgcttttcccccaaaacctagtggccatttctcagttaaactttgtcaaactgtgaacacatggactttcaggagaggagcccactggatgcaaagaaaatgtagttccggacgataggttacttcatgtctctgagctcctctctaaagggtgtgagaacattgagttacattgttccaaaacttagtacaagggcctaactgctttcacccccattgtatgatttgcctccctttaaaaaagttgtcataaaatagacataaaatgtactgttttaactattttgaagcataggtttctgtggcattaagtaacaataagtaatgcatgttattctgcaaccactaccaatatctaccttcagaattttcatcttcccaaactgaagctcggaactcattaaacatcaactctccattatcttaattatgtctgttttgaattctaccacttgagggcgacagagaatcaaagtcggagtgatttgatttgagaaaataaattacttccacaaacatgcctacccagaaaaagggaggattaaaccattttctcaacattttggaatttcatctgagaataacgataaatggaggaaagttaattcttaaattatccaaatgaatgccttaatcctcacttgatttagtttatgtaaaagaaccttgtagattgcagaggaaagttattcaaaatctagaaatgtcttctgctaaattcttaattaagagttatgcccactcttctaaccagatggcgggtgccaaaagtattcagtaggtggcaggaagagttgggaagagttttgtggtgttggtgaggctcttgccaggggatgtctctgtgcaggtgttgagagagtgattggtgagggagagaatggtgttcttgttctttatctgaacaacttaagacagactaactgcaggtgggaaaaagaggcccagagggagcacatcacatgacacctagtcccaggtccccgtggccagatcgtagggccactcctgcttctacaaaacctcttccatcagtcattgtctaggctgataattcactgtgtcttgttagatatgctaatgtcaagttattctcttaggagccctgccgaatagaactctacagagtcgtagagagtttagccaaggcacaggagacatcaggagaagaaatttccaaattttacctgccaaactgcaacaagaatggattttatcacagcagacagtgtgagacatccatggatggagaggcgggactctgctggtgcgtctacccttggaatgggaagaggatccctgggtctccagagatcaggggagaccccaactgccagatgtattttaatgtacaaaactgaaaccagatgaaataatgttctgtcacgtgaaatatttaagtatatagtatatttatactctagaacatgcacatttatatatatatgtatatgtatatatatatagtaactactttttatactccatacataacttgatatagaaagctgtttatttattcactgtaagtttattttttctacacagtaaaaacttgtactatgttaataacttgtcctatgtcaatttgtatatcatgaaacacttctcatcatattgtatgtaagtaattgcatttctgctcttccaaagctcctgcgtctgtttttaaagagcatggaaaaatactgcctagaaaatgcaaaatgaaataagagagagtagtttttcagctagtttgaaggaggacggttaacttgtatattccaccattcacatttgatgtacatgtgtagggaaagttaaaagtgttgattacataatcaaagctacctgtggtgatgttgccacctgttaaaatgtacactggatatgttgttaaacacgtgtctataatggaaacatttacaataaatattctgcatggaaa

SEQ ID NO: 305662 - DNA, 3151 bp, Homo sapiens
ctaaaagcttcacttccattcattgccatagaaaaacaatgtttgatgtgtatgttgccccctaagaacatgacaatcaggttctttcctggatttaagcaggcatttgtttgtagcgggaagtggaggaaatgcctctttctctactccagcccctatctcctcatctggactgcttgcacgtcctgtcctgtgccattcttggaggaattaggacttccataccctgatagggtgttagagtgagtgtgtgagagtcagtgacccttccaaggagggaacagggatttcctgcggattctctgcccttcagaggaaatgaaagggagtcgtctcactgatcctcaaggagatggatttccacagggggtcccttataggccagtgtgctgattctgttcatgtacctttggactctatctgcaagatcctcttgccatgggggtggagggggtgttgcagagaagtccattaggacgtgggaaggcaggggccccaaaatagaagagggtagtagtttgggtcaggagagctgcattctagactccacttctagatgaactgtaccatccattcagggatattagttccccattttaaggatggagaagctgaggtttcgaggctccctactaatgcggttaggaactgaactctaatcctggcttctttagggttgttctcaacctcagcaaatgcatttgttgctctgctcccctgctgctttaaaagcagaaacgtggggcacccttgccaggccctgaaacttactattgtcaggaacagagctggcatgctgttgggacataactcttcctggaaaccattacaaggtcctttacagtgagagtcagtgaaaatcaggttagggaatgtggccatcctcatggcccagcctggttttgagggaaggaagtgatctcctgggggcccgaaaggggcagatgctttgggagggctcatggggtctgcaatgtttcctttccagaggcagggagccctgaaagcccagagagcacggagataactgaggaggagctcctggataatttccatctgatggccccttctgaagaggatcattccatcctttgggacgccatcagtacctatgatggctcgaaggctctccatgtcaccaacatcaaaaaatggaagaaggtgaggcccagcaggtgggtggtgggaactctcctgtcagaggatgtagcttgagtcggctgtgacaagcagacctggcccactccttcctggtcctgatgccctggaaagaaatgcttttcccccaaaacctagtggccatttctcagttaaactttgtcaaactgtgaacacatggactttcaggagaggagcccactggatgcaaagaaaatgtagttccggacgataggttacttcatgtctctgagctcctctctaaagggtgtgagaacattgagttacattgttccaaaacttagtacaagggcctaactgctttcacccccattgtatgatttgcctccctttaaaaaagttgtcataaaatagacataataagtaatgcatgttattctgcaaccactaccaatatctaccttcagaattttcatcttcccaaactgaagctcggaactcattaaacatcaactctccattatcttaattatgtctgttttgaattctaccacttgagggcgacagagaatcaaagtcggagtgatttgatttgagaaaataaattacttccacaaacatgcctacccagaaaaagggaggattaaaccattttctcaacattttggaatttcatctgagaataacgataaatggaggaaagttaattcttaaattatccaaatgaatgccttaatcctcacttgatttagtttatgtaaaagaaccttgtagattgcagaggaaagttattcaaaatctagaaatgtcttctgctaaattcttaattaagagttatgcccactcttctaaccagatggcgggtgccaaaagtattcagtaggtggcaggaagagttgggaagagttttgtggtgttggtgaggctcttgccaggggatgtctctgtgcaggtgttgagagagtgattggtgagggagagaatggtgttcttgttctttatctgaacaacttaagacagactaactgcaggtgggaaaaagaggcccagagggagcacatcacatgacacctagtcccaggtccccgtggccagatcgtagggccactcctgcttctacaaaacctcttccatcagtcattgtctaggctgataattcactgtgtcttgttagatatgctaatgtcaagttattctcttaggagccctgccgaatagaactctacagagtcgtagagagtttagccaaggcacaggagacatcaggagaagaaatttccaaattttacctgccaaactgcaacaagaatggattttatcacagcagacagtgtgagacatccatggatggagaggcgggactctgctggtgcgtctacccttggaatgggaagaggatccctgggtctccagagatcaggggagaccccaactgccagatgtattttaatgtacaaaactgaaaccagatgaaataatgttctgtcacgtgaaatatttaagtatatagtatatttatactctagaacatgcacatttatatatatatgtatatgtatatatatatagtaactactttttatactccatacataacttgatatagaaagctgtttatttattcactgtaagtttattttttctacacagtaaaaacttgtactatgttaataacttgtcctatgtcaatttgtatatcatgaaacacttctcatcatattgtatgtaagtaattgcatttctgctcttccaaagctcctgcgtctgtttttaaagagcatggaaaaatactgcctagaaaatgcaaaatgaaataagagagagtagtttttcagctagtttgaaggaggacggttaacttgtatattccaccattcacatttgatgtacatgtgtagggaaagttaaaagtgttgattacataatcaaagctacctgtggtgatgttgccacctgttaaaatgtacactggatatgttgttaaacacgtgtctataatggaaacatttacaataaatattctgcatggaaa

SEQ ID NO: 305663 - DNA, 1470 bp, Homo sapiens
atcggccaccgccatcccatccagcgagcatctgccgccgcgccgccgccaccctcccagagagcactggccaccgctccaccatcacttgcccagagtttgggccaccgcccgccgccaccagcccagagagcatcggcccctgtctgctgctcgcgcctggagatgtcagaggtccccgttgctcgcgtctggctggtactgctcctgctgactgtccaggtcggcgtgacagccggcgctccgtggcagtgcgcgccctgctccgccgagaagctcgcgctctgcccgccggtgtccgcctcgtgctcggaggtcacccggtccgccggctgcggctgttgcccgatgtgcgccctgcctctgggcgccgcgtgcggcgtggcgactgcacgctgcgcccggggactcagttgccgcgcgctgccgggggagcagcaacctctgcacgccctcacccgcggccaaggcgcctgcgtgcaggagtctgacgcctccgctccccatgctgcagaggcagggagccctgaaagcccagagagcacggagataactgaggaggagctcctggataatttccatctgatggccccttctgaagaggatcattccatcctttgggacgccatcagtacctatgatggctcgaaggctctccatgtcaccaacatcaaaaaatggaagcaaggcacaggagacatcaggagaagaaatttccaaattttacctgccaaactgcaacaagaatggattttatcacagcagacagtgtgagacatccatggatggagaggcgggactctgctggtgcgtctacccttggaatgggaagaggatccctgggtctccagagatcaggggagaccccaactgccagatgtattttaatgtacaaaactgaaaccagatgaaataatgttctgtcacgtgaaatatttaagtatatagtatatttatactctagaacatgcacatttatatatatatgtatatgtatatatatatagtaactactttttatactccatacataacttgatatagaaagctgtttatttattcactgtaagtttattttttctacacagtaaaaacttgtactatgttaataacttgtcctatgtcaatttgtatatcatgaaacacttctcatcatattgtatgtaagtaattgcatttctgctcttccaaagctcctgcgtctgtttttaaagagcatggaaaaatactgcctagaaaatgcaaaatgaaataagagagagtagtttttcagctagtttgaaggaggacggttaacttgtatattccaccattcacatttgatgtacatgtgtagggaaagttaaaagtgttgattacataatcaaagctacctgtggtgatgttgccacctgttaaaatgtacactggatatgttgttaaacacgtgtctataatggaaacatttacaataaatattctgcatggaaa

SEQ ID NO: 305664 - DNA, 1460 bp, Homo sapiens
atcggccaccgccatcccatccagcgagcatctgccgccgcgccgccgccaccctcccagagagcactggccaccgctccaccatcacttgcccagagtttgggccaccgcccgccgccaccagcccagagagcatcggcccctgtctgctgctcgcgcctggagatgtcagaggtccccgttgctcgcgtctggctggtactgctcctgctgactgtccaggtcggcgtgacagccggcgctccgtggcagtgcgcgccctgctccgccgagaagctcgcgctctgcccgccggtgtccgcctcgtgctcggaggtcacccggtccgccggctgcggctgttgcccgatgtgcgccctgcctctgggcgccgcgtgcggcgtggcgactgcacgctgcgcccggggactcagttgccgcgcgctgccgggggagcagcaacctctgcacgccctcacccgcggccaaggcgcctgcgtgcaggagtctgacgcctccgctccccatgctgcagaggcagggagccctgaaagcccagagagcacggagataactgaggaggagctcctggataatttccatctgatggccccttctgaagaggatcattccatcctttgggacgccatcagtacctatgatggctcgaaggctctccatgtcaccaacatcaaaaaatggaaggagccctgccgaatagaactctacagagtcgtagagagtttagccaaggcacaggagacatcaggagaagaaatttccaaattttacctgccaaactgcaacaagaatggattttatcacagcagacagtgtgagacatccatggatggagaggcgggactctgctggtgcgtctacccttggaatgggaagaggatccctgggtctccagagatcaggggagaccccaactgccagatgtattttaatgtacatatatttatactctagaacatgcacatttatatatatatgtatatgtatatatatatagtaactactttttatactccatacataacttgatatagaaagctgtttatttattcactgtaagtttattttttctacacagtaaaaacttgtactatgttaataacttgtcctatgtcaatttgtatatcatgaaacacttctcatcatattgtatgtaagtaattgcatttctgctcttccaaagctcctgcgtctgtttttaaagagcatggaaaaatactgcctagaaaatgcaaaatgaaataagagagagtagtttttcagctagtttgaaggaggacggttaacttgtatattccaccattcacatttgatgtacatgtgtagggaaagttaaaagtgttgattacataatcaaagctacctgtggtgatgttgccacctgttaaaatgtacactggatatgttgttaaacacgtgtctataatggaaacatttacaataaatattctgcatggaaa

SEQ ID NO: 305665 - DNA, 1944 bp, Homo sapiens
ctaaaagcttcacttccattcattgccatagaaaaacaatgtttgatgtgtatgttgccccctaagaacatgacaatcaggttctttcctggatttaagcaggcatttgtttgtagcgggaagtggaggaaatgcctctttctctactccagcccctatctcctcatctggactgcttgcacgtcctgtcctgtgccattcttggaggaattaggacttccataccctgatagggtgttagagtgagtgtgtgagagtcagtgacccttccaaggagggaacagggatttcctgcggattctctgcccttcagaggaaatgaaagggagtcgtctcactgatcctcaaggagatggatttccacagggggtcccttataggccagtgtgctgattctgttcatgtacctttggactctatctgcaagatcctcttgccatgggggtggagggggtgttgcagagaagtccattaggacgtgggaaggcaggggccccaaaatagaagagggtagtagtttgggtcaggagagctgcattctagactccacttctagatgaactgtaccatccattcagggatattagttccccattttaaggatggagaagctgaggtttcgaggctccctactaatgcggttaggaactgaactctaatcctggcttctttagggttgttctcaacctcagcaaatgcatttgttgctctgctcccctgctgctttaaaagcagaaacgtggggcacccttgccaggccctgaaacttactattgtcaggaacagagctggcatgctgttgggacataactcttcctggaaaccattacaaggtcctttacagtgagagtcagtgaaaatcaggttagggaatgtggccatcctcatggcccagcctggttttgagggaaggaagtgatctcctgggggcccgaaaggggcagatgctttgggagggctcatggggtctgcaatgtttcctttccagaggcagggagccctgaaagcccagagagcacggagataactgaggaggagctcctggataatttccatctgatggccccttctgaagaggatcattccatcctttgggacgccatcagtacctatgatggctcgaaggctctccatgtcaccaacatcaaaaaatggaagcaaggcacaggagacatcaggagaagaaatttccaaattttacctgccaaactgcaacaagaatggattttatcacagcagacagtgtgagacatccatggatggagaggcgggactctgctggtgcgtctacccttggaatgggaagaggatccctgggtctccagagatcaggggagaccccaactgccagatgtattttaatgtacaaaactgaaaccagatgaaataatgttctgtcacgtgaaatatttaagtatatagtatatttatactctagaacatgcacatttatatatatatgtatatgtatatatatatagtaactactttttatactccatacataacttgatatagaaagctgtttatttattcactgtaagtttattttttctacacagtaaaaacttgtactatgttaataacttgtcctatgtcaatttgtatatcatgaaacacttctcatcatattgtatgtaagtaattgcatttctgctcttccaaagctcctgcgtctgtttttaaagagcatggaaaaatactgcctagaaaatgcaaaatgaaataagagagagtagtttttcagctagtttgaaggaggacggttaacttgtatattccaccattcacatttgatgtacatgtgtagggaaagttaaaagtgttgattacataatcaaagctacctgtggtgatgttgccacctgttaaaatgtacactggatatgttgttaaacacgtgtctataatggaaacatttacaataaatattctgcatggaaa

SEQ ID NO: 305666 - DNA, 935 bp, Homo sapiens
tttaacacacatgggaagtcattattgcacatgccactcggtcactgtctctattttatgatgagaaccaggagggtgtgagatttgcctgcatcatgggcagctggtttcacagccgggactcttggcttggctctgcagtgctcggctgcactgaaaaaagggccagctatggctctactttccctgtcagcttgtcatctgctgctcttgaccttggtcttgtctttgcagtgtgagacatccatggatggagaggcgggactctgctggtgcgtctacccttggaatgggaagaggatccctgggtctccagagatcaggggagaccccaactgccagatgtattttaatgtacaaaactgaaaccagatgaaataatgttctgtcacgtgaaatatttaagtatatagtatatttatactctagaacatgcacatttatatatatatgtatatgtatatatatatagtaactactttttatactccatacataacttgatatagaaagctgtttatttattcactgtaagtttattttttctacacagtaaaaacttgtactatgttaataacttgtcctatgtcaatttgtatatcatgaaacacttctcatcatattgtatgtaagtaattgcatttctgctcttccaaagctcctgcgtctgtttttaaagagcatggaaaaatactgcctagaaaatgcaaaatgaaataagagagagtagtttttcagctagtttgaaggaggacggttaacttgtatattccaccattcacatttgatgtacatgtgtagggaaagttaaaagtgttgattacataatcaaagctacctgtggtgatgttgccacctgttaaaatgtacactggatatgttgttaaacacgtgtctataatggaaacatttacaataaatattctgcatggaaa

SEQ ID NO: 305667 - DNA, 763 bp, Homo sapiens
gagagagagagagagagagagagagagagagagagagagagagagagagagagagagagagagagagagagagagagagagagagagcgggactctgctggtgcgtctacccttggaatgggaagaggatccctgggtctccagagatcaggggagaccccaactgccagatgtattttaatgtacaaaactgaaaccagatgaaataatgttctgtcacgtgaaatatttaagtatatagtatatttatactctagaacatgcacatttatatatatatgtatatgtatatatatatagtaactactttttatactccatacataacttgatatagaaagctgtttatttattcactgtaagtttattttttctacacagtaaaaacttgtactatgttaataacttgtcctatgtcaatttgtatatcatgaaacacttctcatcatattgtatgtaagtaattgcatttctgctcttccaaagctcctgcgtctgtttttaaagagcatggaaaaatactgcctagaaaatgcaaaatgaaataagagagagtagtttttcagctagtttgaaggaggacggttaacttgtatattccaccattcacatttgatgtacatgtgtagggaaagttaaaagtgttgattacataatcaaagctacctgtggtgatgttgccacctgttaaaatgtacactggatatgttgttaaacacgtgtctataatggaaacatttacaataaatattctgcatggaaa

SEQ ID NO: 305668 - DNA, 529 bp, Homo sapiens
  misc_feature (25)..(25): n is a, c, g, or t
  misc_feature (64)..(64): n is a, c, g, or t
  misc_feature (92)..(93): n is a, c, g, or t
aaaaaaaaacacaagaacatgcaanataaaaaaaaaaaagaaaaagaaaaaaaaaaaagaaacnactttaaaataacaacacaaaacaaaannattgatatagaaagctgtttatttattcactgtaagtttattttttctacacagtaaaaacttgtactatgttaataacttgtcctatgtcaatttgtatatcatgaaacacttctcatcatattgtatgtaagtaattgcatttctgctcttccaaagctcctgcgtctgtttttaaagagcatggaaaaatactgcctagaaaatgcaaaatgaaataagagagagtagtttttcagctagtttgaaggaggacggttaacttgtatattccaccattcacatttgatgtacatgtgtagggaaagttaaaagtgttgattacataatcaaagctacctgtggtgatgttgccacctgttaaaatgtacactggatatgttgttaaacacgtgtctataatggaaacatttacaataaatattctgcatggaaa

SEQ ID NO: 305669 - DNA, 2203 bp, Homo sapiens
atcggccaccgccatcccatccagcgagcatctgccgccgcgccgccgccaccctcccagagagcactggccaccgctccaccatcacttgcccagagtttgggccaccgcccgccgccaccagcccagagagcatcggcccctgtctgctgctcgcgcctggagatgtcagaggtccccgttgctcgcgtctggctggtactgctcctgctgactgtccaggtcggcgtgacagccggcgctccgtggcagtgcgcgccctgctccgccgagaagctcgcgctctgcccgccggtgtccgcctcgtgctcggaggtcacccggtccgccggctgcggctgttgcccgatgtgcgccctgcctctgggcgccgcgtgcggcgtggcgactgcacgctgcgcccggggactcagttgccgcgcgctgccgggggagcagcaacctctgcacgccctcacccgcggccaaggcgcctgcgtgcaggagtctgacgcctccgctccccatgctgcagaggcagggagccctgaaagcccagagagcacggagataactgaggaggagctcctggataatttccatctgatggccccttctgaagaggatcattccatcctttgggacgccatcagtacctatgatggctcgaaggctctccatgtcaccaacatcaaaaaatggaagaaggtgaggcccagcaggtgggtggtgggaactctcctgtcagaggatgtagcttgagtcggctgtgacaagcagacctggcccactccttcctggtcctgatgccctggaaagaaatgcttttcccccaaaacctagtggccatttctcagttaaactttgtcaaactgtgaacacatggactttcaggagaggagcccactggatgcaaagaaaatgtagttccggacgataggttacttcatgtctctgagctcctctctaaagggtgtgagaacattgagttacattgttccaaaacttagtacaagggcctaactgctttcacccccattgtatgatttgcctccctttaaaaaagttgtcataaaatagacataataagtaatgcatgttattctgcaaccactaccaatatctaccttcagaattttcatcttcccaaactgaagctcggaactcattaaacatcaactctccattatcttaattatgtctgttttgaattctaccacttgagggcgacagagaatcaaagtcggagtgatttgatttgagaaaataaattacttccacaaacatgcctacccagaaaaagggaggattaaaccattttctcaacattttggaatttcatctgagaataacgataaatggaggaaagttaattcttaaattatccaaatgaatgccttaatcctcacttgatttagtttatgtaaaagaaccttgtagattgcagaggaaagttattcaaaatctagaaatgtcttctgctaaattcttaattaagagttatgcccactcttctaaccagatggcgggtgccaaaagtattcagtaggtggcaggaagagttgggaagagttttgtggtgttggtgaggctcttgccaggggatgtctctgtgcaggtgttgagagagtgattggtgagggagagaatggtgttcttgttctttatctgaacaacttaagacagactaactgcaggtgggaaaaagaggcccagagggagcacatcacatgacacctagtcccaggtccccgtggccagatcgtagggccactcctgcttctacaaaacctcttccatcagtcattgtctaggctgataattcactgtgtcttgttagatatgctaatgtcaagttattctcttaggagccctgccgaatagaactctacagagtcgtagagagtttagccaaggcacaggagacatcaggagaagaaatttccaaattttacctgccaaactgcaacaagaatggattttatcacagcagacaggtaggtggccttgccagtgtgcgtcgtcagggtgaaagggactactgccctacattcctgccaagccacggtcattcatgtcaaagaaggtccactccaaagtagacaccagaagtggttgtattgagccagatccacccctctgggaacctggaacagctaggtgaagaaagcctattgaacaggtcaatatgtcaccaccagaggtggaaaacctgcgctggacc

SEQ ID NO: 305670 - DNA, 711 bp, Homo sapiens
agaaggaaggaccatttctgaggtgatgaaaatgttctatattgtgattactgtatttcttacacaactatgtatacatttatcgaaactcctcagattatacaacttaaatttgatcaattttaatgtatatagattgaactcagtaaaactgaattttaaaatgtgagataatagctatcgttaacttaaaaagcaccatacgaattgattattgttgatagtgatagtgatgtgaaaaggactgtgtctctttaacaaaggcagatgtaatcaatgtgaatttcattagcaatctctagattttatggttctgtgtacttttacttttaaaatattattattgactttttaccagaaaatattttctgtacaatttcttgcatctaatttttttatcaaacatgaatttgcaacataatttttgaaaactcatgtttcttgagtctacagctataaacaggaccttgcctgtcttgttgaccactggcatagttggtgtacctattgttgtgtaacatattactataaaattcagtgacctgaaacaactaacttttattacctcatggtttctgtgatccgcttcccagcgaactcatttgggcccctctgccaggcctctcacaacatgaaaactggcttctccaaaaagtcatacaagagagtgcccaagatgcaatctgccatctttttgtaacctaaaatctg

SEQ ID NO: 305671 - DNA, 155 bp, Homo sapiens
caacatgatactgtgaggagattctcggacactagtcctctaacagtatcatgttgcaggaattccccattgctctgcaacttccaaaccagtttgagtcatacaaatgttttctaaacttttattgtattactgcaataaatcttttaacagta

SEQ ID NO: 305672 - DNA, 4944 bp, Homo sapiens
  misc_feature (3686)..(3686): n is a, c, g, or t
  misc_feature (3692)..(3692): n is a, c, g, or t
  misc_feature (3843)..(3843): n is a, c, g, or t
attgataagggtccgtgtcgactttgaggtcaggacagaaatactgaatgactttacacttaggaaaaaatagctaaataattaagatgcaggctgtagtgttcaaaccaatagagcagggaaagggaaatgtagatactttattaattcagtggaagataggaaagttagaagcaaaggaggctgggcacagtggctcatgcctgtaatcctagcactttgggaggccaagacaggtggatcacctgaggttaggggtttcaccatgttggccaggatggtcttgatctcctaacctcttgatctgccctccttggcctcccaaagtgctgcgattacaggcgtgagccaccgcactggcctaatttctcttttctctgcattgaactagaaaaacatcgttctctttttcgtaatgttccatagttacaaaagctataacataaggtctttttcttcattatgttttctgacatatctgaaaataagcagtgatcccaggtagataatcatattaaccataagagaccaacgtttgtgatatttattacatgcttttttcagagatggaaaataatgtcctgcaagatgaggattgaacagttaaaacaaacaatatgtaaaggaaatgaagaaatggagaaaaattctgaaggccttctcaaaaccaaggaaaagaatcagaagctttacagtcgagcacaacggcaccaagagaaaaaggagaagattcagaggcataatcgcaaacttggtgacctggtagaaaaaaagaccattgacttaagaagtcattatgagcgtctggcaaatcttcgacgatcccatatattagagctcacctctgtcatttttccaatcgaggaagtaaagacgggtgtgagagaccccgcagatgtgtcttcagagagtgacagtgccatgacctccagcactgtgagcaagcttgctgaagcccggaggacaacttacctctcaggacgatgggtctgtgacgatcacaacggagacaccagcattagcattacagggccttggattagcctccctaacaatggggactactctgcctactacagctgggtggaggagaagaaaacaacccaggggcctgacatggagcagagtaaccctgcctacaccatcagtgctgcgctgtgctatgcaactcagctggtcaacattctgtctcatatacttgatgtaaatcttcccaaaaagctctgcaacagtgaattttgtggcgaaaatctaagcaagcagaaatttactcgagcagtgaagaaactgaatgcaaatattctttacctttgtttttctcagcatgtaaatttagatcaattacaaccactgcataccctcaggaatctaatgtacctggtcagtccaagctctgaacacctaggcaggtcagggccctttgaagtacgagcagaccttgaggagtccatggaatttgtggatcccggagttgctggagaatcagatgagagcggagatgagcgcgtcagcgatgaagaaaccgacctgggcacagactgggagaacttgcctagtccccggttttgtgatatcccttcccagtctgtggaagtctcccagagtcagagcacccaggcgtccccacccatcgcgagcagcagtgcaggtgggatgatctcctctgcagcagcctcggtgacctcctggtttaaagcttacactggacaccgttaacgagcatggaccaaaacataccaaatctgcatcaagaaagttcttctcccactacactctagtaaacattttctgtttaagttaagatagtgtctggaacaaagaggttaaagtgttgttttgttttgtctttttaagcagggagacaaacatttctatttgccaagtggcctgtgatggtgaccaacatgcttatgataattaagagaacaggggtcgaaggtctttctacccagaccagtgctggtggaaggaggacctgtgcgtgtggccagttctgccaaggaagcagttgatttgggttccctctgggcccgggccaccgggcccacagatatgggtcagtgtgctggtccttgcggtgctgagactgttcctgacactttaagttttagaggttggttgaatcacaagaggtgattcttgattattaggacatgaaagataaaagctctttaataagagtttttctgccattgttttttgtatgagaaccagcaggcaatttaaaatttctaatttggtcctttgattttgtttgggaggggtgagttacacgtattttattcatgctgctctgtcgtagtttgtcagacattcctgtttttctttcccccacacaccaaagaaaatgaaagtctttttctttaggacccacatccataaatggaagaaatcctggctgcaataatgtctagagagtttttaactattttcttgtattctgaggggaattaagcttattcttacctagttgaattcctgccatccacactatgagcattttgaaattgaacttatattttctgggtgaaaataagtcatgaaggtcattcccttatgtaagctcaatgcctgcctgggcacaggggaaaagccacttagttaagtggcctctggtcattcttgtggtgtccactttctttctatgggattgagtaggtggcaggtgttttcaggggaaaccatcctacttgtttccccgaactctttgttgctctgaggacacagctttgctcagaaatgcagcgcagatccttacggctgatgctactctgctctgttctggggaaagcacaatataaagaaagaatttcccagccaggcgcagtggctcacgcctgtaatcccagcactttaggaggccgaggcaggcggatcacttgaggtcaggagtttgagagcagcctggctaacatggtgaaaccctgtttctactaaaaatacaaaaaattaccgggtgtggtggcgcacgcctgtaatcccagctactcgggaggctgcggcaggagaatcgcttgaaccgggaggcagaggttgcagtgagccgagattgtgccattgcactccagcctgggcaacaagagcgaaactccgtctcaaaaaaaaaaagaatttccctcagcaggagatcattttcagctcacgtgtcttgtcattcttttagtgacaatcttacaagaaaactataatgagagaggcattatgtacaaatatgtaagtagtttatttttaataactgcaaaaaaatcctatgtaacaactaccaaaagaaatcctatgaaagagtcctaacaggcattattaccatatcttatgtgattggcatgatagcacctctgataaatcattcagaggtttgccatgccccagcttcttttctcatcataataattgtagttgatactttgcctccaagtccgaggtgctatatagcttttgctaatggtatatttggtgttttgtatagttttgggtagagttgcagaacggagtttatttctatccggtagtcacaaattccttggctctatgaattttccatgaaaggaggaagtaggcttttctcgttgtgggtggtcttttttttttttggagacggagtctcactcagctgcccaggctggagtgtagtggcaccatctccgctcactgcaaccaccatctcctgggttcaagcaattcttccntctcancctcccgagtagctgggattataggcacctgccatcatgcccagctaatttttgtattttagtaaagacgggggttttcaccatgttggccaggctggtcttgaactcctgacttcaggtgatccgcttgccttggcctcctaaagtgctnggattacaggcctgagccaccgcgcccggccccttatgggttcttctacactgctgggatctctgttttaagtgctcagcttcatgattgattgctgggcttccattttcccatccagttctggagttcgtagagagtgaagatggtagacttgaacagataaataaacttaacgatcttgtaagagttgtctagctacttaaaaccctcagaagtaagagcttagtctcacgagttgtaagagtgggatttggagcttggtggtggagactgacttcagctgagagatgcacaacagtcatggttttcttaagcctcttatgaaaccatgaatgagagatgaagctaaagaatagaatccagagatcacaaactcatctagagtacttccacaaaatttacaaagatgtgggaactttatggataggatatattttgtttgttgttgttaatatcaactagaggcactttacatagggttaagtgatcgaacccttttgtggttttgaacaccaacatactggcttacactgctgaaatattttgggtttcattattttgcactggatccaccctgtaaatactcttaagtatacatttcaaccactgttttttctactctttttgctgctcattaaaatctttcatgtaggtgccagaaccatatgtaaacagctttttaaaaaattgaagctggtattttgtttaaacaaaaagccatagaacttggtcatgttttccattttaaaatgatttactgaaacaaagtaatactaataaaaacccacaggcaccaaacaggctgcttaaaatggtctgttaaagacattttttggttatggaatataagaaaagttttgcacatctgtaagggggaaaaacagtatatcaccattgggtagagtggacgggactcatgtaaggactcaatttggggaagagcattcagtggcatgctgttagaggactagtgtccgagaatctcctcacagtatcatgttgcaggaattccccattgctctgcaacttccaaaccagtttgagtcatacaaatgttttctaaacttttattgtattactgcaataaatcttttaacagta

SEQ ID NO: 305673 - DNA, 4372 bp, Homo sapiens
  misc_feature (2720)..(2720): n is a, c, g, or t
  misc_feature (2726)..(2726): n is a, c, g, or t
  misc_feature (2877)..(2877): n is a, c, g, or t
ttctttgtataccatttattacttattacactaaataatatccagagtatacatcaagtggctttttgttagaattgtctcattggagtgccgtgtatttacttcgtagacactgcagttctttacaacaggaagtcagacttaggaccagcatgggccatctcagtgaataggtttttttcctatgcacggtcatcaccaatgaagtaggcagacttgtgggaaagtgtggtatcatgattttatttataacttgggtggagattatttgggtaaaggaaaacgcaatcatatgtcaacacggagtgctgcatagacttggggaatgaatggggtgtgcggcgtccctcatcccctcaggtgagggccttcaggaagatggcatattttctggtgttgagaatggttgttatcctaaagagaccctcattgtctgcacacaggtcagggccctttgaagtacgagcagaccttgaggagtccatggaatttgtggatcccggagttgctggagaatcagatgagagcggagatgagcgcgtcagcgatgaagaaaccgacctgggcacagactgggagaacttgcctagtccccggttttgtgatatcccttcccagtctgtggaagtctcccagagtcagagcacccaggcgtccccacccatcgcgagcagcagtgcaggtgggatgatctcctctgcagcagcctcggtgacctcctggtttaaagcttacactggacaccgttaacgagcatggaccaaaacataccaaatctgcatcaagaaagttcttctcccactacactctagtaaacattttctgtttaagttaagatagtgtctggaacaaagaggttaaagtgttgttttgttttgtctttttaagcagggagacaaacatttctatttgccaagtggcctgtgatggtgaccaacatgcttatgataattaagagaacaggggtcgaaggtctttctacccagaccagtgctggtggaaggaggacctgtgcgtgtggccagttctgccaaggaagcagttgatttgggttccctctgggcccgggccaccgggcccacagatatgggtcagtgtgctggtccttgcggtgctgagactgttcctgacactttaagttttagaggttggttgaatcacaagaggtgattcttgattattaggacatgaaagataaaagctctttaataagagtttttctgccattgttttttgtatgagaaccagcaggcaatttaaaatttctaatttggtcctttgattttgtttgggaggggtgagttacacgtattttattcatgctgctctgtcgtagtttgtcagacattcctgtttttctttcccccacacaccaaagaaaatgaaagtctttttctttaggacccacatccataaatggaagaaatcctggctgcaataatgtctagagagtttttaactattttcttgtattctgaggggaattaagcttattcttacctagttgaattcctgccatccacactatgagcattttgaaattgaacttatattttctgggtgaaaataagtcatgaaggtcattcccttatgtaagctcaatgcctgcctgggcacaggggaaaagccacttagttaagtggcctctggtcattcttgtggtgtccactttctttctatgggattgagtaggtggcaggtgttttcaggggaaaccatcctacttgtttccccgaactctttgttgctctgaggacacagctttgctcagaaatgcagcgcagatccttacggctgatgctactctgctctgttctggggaaagcacaatataaagaaagaatttcccagccaggcgcagtggctcacgcctgtaatcccagcactttaggaggccgaggcaggcggatcacttgaggtcaggagtttgagagcagcctggctaacatggtgaaaccctgtttctactaaaaatacaaaaaattaccgggtgtggtggcgcacgcctgtaatcccagctactcgggaggctgcggcaggagaatcgcttgaaccgggaggcagaggttgcagtgagccgagattgtgccattgcactccagcctgggcaacaagagcgaaactccgtctcaaaaaaaaaaagaatttccctcagcaggagatcattttcagctcacgtgtcttgtcattcttttagtgacaatcttacaagaaaactataatgagagaggcattatgtacaaatatgtaagtagtttatttttaataactgcaaaaaaatcctatgtaacaactaccaaaagaaatcctatgaaagagtcctaacaggcattattaccatatcttatgtgattggcatgatagcacctctgataaatcattcagaggtttgccatgccccagcttcttttctcatcataataattgtagttgatactttgcctccaagtccgaggtgctatatagcttttgctaatggtatatttggtgttttgtatagttttgggtagagttgcagaacggagtttatttctatccggtagtcacaaattccttggctctatgaattttccatgaaaggaggaagtaggcttttctcgttgtgggtggtcttttttttttttggagacggagtctcactcagctgcccaggctggagtgtagtggcaccatctccgctcactgcaaccaccatctcctgggttcaagcaattcttccntctcancctcccgagtagctgggattataggcacctgccatcatgcccagctaatttttgtattttagtaaagacgggggttttcaccatgttggccaggctggtcttgaactcctgacttcaggtgatccgcttgccttggcctcctaaagtgctnggattacaggcctgagccaccgcgcccggccccttatgggttcttctacactgctgggatctctgttttaagtgctcagcttcatgattgattgctgggcttccattttcccatccagttctggagttcgtagagagtgaagatggtagacttgaacagataaataaacttaacgatcttgtaagagttgtctagctacttaaaaccctcagaagtaagagcttagtctcacgagttgtaagagtgggatttggagcttggtggtggagactgacttcagctgagagatgcacaacagtcatggttttcttaagcctcttatgaaaccatgaatgagagatgaagctaaagaatagaatccagagatcacaaactcatctagagtacttccacaaaatttacaaagatgtgggaactttatggataggatatattttgtttgttgttgttaatatcaactagaggcactttacatagggttaagtgatcgaacccttttgtggttttgaacaccaacatactggcttacactgctgaaatattttgggtttcattattttgcactggatccaccctgtaaatactcttaagtatacatttcaaccactgttttttctactctttttgctgctcattaaaatctttcatgtaggtgccagaaccatatgtaaacagctttttaaaaaattgaagctggtattttgtttaaacaaaaagccatagaacttggtcatgttttccattttaaaatgatttactgaaacaaagtaatactaataaaaacccacaggcaccaaacaggctgcttaaaatggtctgttaaagacattttttggttatggaatataagaaaagttttgcacatctgtaagggggaaaaacagtatatcaccattgggtagagtggacgggactcatgtaaggactcaatttggggaagagcattcagtggcatgctgttagaggactagtgtccgagaatctcctcacagtatcatgttgcaggaattccccattgctctgcaacttccaaaccagtttgagtcatacaaatgttttctaaacttttattgtattactgcaataaatcttttaacagtaaaaaactcatgtgtatgtctttttcaaactgttcatttgcactgctgcatcgagggtagcaagaatgagattgaaccctggagtactttatacaaattatagaagaagtttgtagaatttttttgccaggtaagaaaaaatgttaatatattttttaaaattatggattatggtggtattaacaatgatctttcccaagctgagaagctggttgcatactttccctaaagacgtgtttttctttggtagccatcatttgatgcatgtgacctacaatgacctggttttgtgcaacagacccctggggcagaaggcctctaggatgcccacgtggaacctgcccagactttcttcaggacaagaggaaaagggaaatgttggaaccactcagatg

SEQ ID NO: 305674 - DNA, 2996 bp, Homo sapiens
tgctctcagcaaaaaaaaaaaaaaaaatatatatatatatatatatacacacaaagaatggaccatttatgtctggtcatggagcatctattaaggaagcactaaaacgtaacagtgctatcatgataaaatcataaatgataaactcgtggattattagtagttttgttggaattaaggttttgtacatggtggttgttttcttactgcagacatggagcagagtaaccctgcctacaccatcagtgctgcgctgtgctatgcaactcagctggtcaacattctgtctcatatacttgatgtaaatcttcccaaaaagctctgcaacagtgaattttgtggcgaaaatctaagcaagcagaaatttactcgagcagtgaagaaactgaatgcaaatattctttacctttgtttttctcagcatgtaaatttagatcaattacaaccactgcataccctcaggaatctaatgtacctggtcagtccaagctctgaacacctaggcaggtcagggccctttgaagtacgagcagaccttgaggagtccatggaatttgtggatcccggagttgctggagaatcagatgagagcggagatgagcgcgtcagcgatgaagaaaccgacctgggcacagactgggagaacttgcctagtccccggttttgtgatatcccttcccagtctgtggaagtctcccagagtcagagcacccaggcgtccccacccatcgcgagcagcagtgcaggtgggatgatctcctctgcagcagcctcggtgacctcctggtttaaagcttacactggacaccgttaacgagcatggaccaaaacataccaaatctgcatcaagaaagttcttctcccactacactctagtaaacattttctgtttaagttaagatagtgtctggaacaaagaggttaaagtgttgttttgttttgtctttttaagcagggagacaaacatttctatttgccaagtggcctgtgatggtgaccaacatgcttatgataattaagagaacaggggtcgaaggtctttctacccagaccagtgctggtggaaggaggacctgtgcgtgtggccagttctgccaaggaagcagttgatttgggttccctctgggcccgggccaccgggcccacagatatgggtcagtgtgctggtccttgcggtgctgagactgttcctgacactttaagttttagaggttggttgaatcacaagaggtgattcttgattattaggacatgaaagataaaagctctttaataagagtttttctgccattgttttttgtatgagaaccagcaggcaatttaaaatttctaatttggtcctttgattttgtttgggaggggtgagttacacgtattttattcatgctgctctgtcgtagtttgtcagacattcctgtttttctttcccccacacaccaaagaaaatgaaagtctttttctttaggacccacatccataaatggaagaaatcctggctgcaataatgtctagagagtttttaactattttcttgtattctgaggggaattaagcttattcttacctagttgaattcctgccatccacactatgagcattttgaaattgaacttatattttctgggtgaaaataagtcatgaaggtcattcccttatgtaagctcaatgcctgcctgggcacaggggaaaagccacttagttaagtggcctctggtcattcttgtggtgtccactttctttctatgggattgagtaggtggcaggtgttttcaggggaaaccatcctacttgtttccccgaactctttgttgctctgaggacacagctttgctcagaaatgcagcgcagatccttacggctgatgctactctgctctgttctggggaaagcacaatataaagaaagaatttcccaccgcgcccggccccttatgggttcttctacactgctgggatctctgttttaagtgctcagcttcatgattgattgctgggcttccattttcccatccagttctggagttcgtagagagtgaagatggtagacttgaacagataaataaacttaacgatcttgtaagagttgtctagctacttaaaaccctcagaagtaagagcttagtctcacgagttgtaagagtgggatttggagcttggtggtggagactgacttcagctgagagatgcacaacagtcatggttttcttaagcctcttatgaaaccatgaatgagagatgaagctaaagaatagaatccagagatcacaaactcatctagagtacttccacaaaatttacaaagatgtgggaactttatggataggatatattttgtttgttgttgttaatatcaactagaggcactttacatagggttaagtgatcgaacccttttgtggttttgaacaccaacatactggcttacactgctgaaatattttgggtttcattattttgcactggatccaccctgtaaatactcttaagtatacatttcaaccactgttttttctactctttttgctgctcattaaaatctttcatgtaggtgccagaaccatatgtaaacagctttttaaaaaattgaagctggtattttgtttaaacaaaaagccatagaacttggtcatgttttccattttaaaatgatttactgaaacaaagtaatactaataaaaacccacaggcaccaaacaggctgcttaaaatggtctgttaaagacattttttggttatggaatataagaaaagttttgcacatctgtaagggggaaaaacagtatatcaccattgggtagagtggacgggactcatgtaaggactcaatttggggaagagcattcagtggcatgctgttagaggactagtgtccgagaatctcctcacagtatcatgttgcaggaattccccattgctctgcaacttccaaaccagtttgagtcatacaaatgttttctaaacttttattgtattactgcaataaatcttttaacagta

SEQ ID NO: 305675 - DNA, 1349 bp, Homo sapiens
gtgactggctctcctctcaggccatcatggcgtctcccagtgggaagggagcccgggcgctggaggctcctggctgcgggccccggccgctcgcccgggacctggtggactccgtggacgatgcggaggggctgtacgtggctgtggagcgctgcccgctgtgcaacactacccgccggcggctgacctgcgccaaatgcgttcagagcggcgatttcgtctacttcgacggccgcgaccgggagaggtttatcgacaagaaggaaaggttaagccgacttaagagcaagcaagaagaatttcagaaagaagtgttaaaagctatggaaggaaaatggataacagatcagttgagatggaaaataatgtcctgcaagatgaggattgaacagttaaaacaaacaatatgtaaaggaaatgaagaaatggagaaaaattctgaaggccttctcaaaaccaaggaaaagaatcagaagctttacagtcgagcacaacggcaccaagagaaaaaggagaagattcagaggcataatcgcaaacttggtgacctggttttcttaagcctcttatgaaaccatgaatgagagatgaagctaaagaatagaatccagagatcacaaactcatctagagtacttccacaaaatttacaaagatgtgggaactttatggataggatatattttgtttgttgttgttaatatcaactagaggcactttacatagggttaagtgatcgaacccttttgtggttttgaacaccaacatactggcttacactgctgaaatattttgggtttcattattttgcactggatccaccctgtaaatactcttaagtatacatttcaaccactgttttttctactctttttgctgctcattaaaatctttcatgtaggtgccagaaccatatgtaaacagctttttaaaaaattgaagctggtattttgtttaaacaaaaagccatagaacttggtcatgttttccattttaaaatgatttactgaaacaaagtaatactaataaaaacccacaggcaccaaacaggctgcttaaaatggtctgttaaagacattttttggttatggaatataagaaaagttttgcacatctgtaagggggaaaaacagtatatcaccattgggtagagtggacgggactcatgtaaggactcaatttggggaagagcattcagtggcatgctgttagaggactagtgtccgagaatctcctcacagtatcatgttgcaggaattccccattgctctgcaacttccaaaccagtttgagtcatacaaatgttttctaaacttttattgtattactgcaataaatcttttaacagta

SEQ ID NO: 305676 - DNA, 299 bp, Homo sapiens
tgctttatgtgtaatatctacttgaactaaactctcaaattttccacttagtgaacattatattattcaggttttgctttcagtttagattgcaagggaaaacacgcatgtttgtggggtggagctctgcagtacacaggaactgtttgcagagataattgttgggtgtgatttatttattttagattctgaaggccttctcaaaaccaaggaaaagaatcagaagctttacagtcgagcacaacggcaccaagagaaaaaggagaagattcagaggcataatcgcaaacttggtgacc

SEQ ID NO: 305677 - DNA, 374 bp, Homo sapiens
cttttcgatgttctagcatgtcttgcagttatattgcatgcccttaaaaaccctctctcttgaaaatccgtgtgtgtcttcctacttgtagagaccccgcagatgtgtcttcagagagtgacagtgccatgacctccagcactgtgagcaagcttgctgaagcccggaggacaacttacctctcaggacgatgggtctgtgacgatcacaacggagacaccagcattagcattacagggccttggattagcctccctaacaatggggactactctgcctactacagctgggtggaggagaagaaaacaacccaggggcctggtgagaagcagcatatcctttgaaatctgtatatagagagagttataggtaaa

SEQ ID NO: 305678 - DNA, 3978 bp, Homo sapiens
  misc_feature (2720)..(2720): n is a, c, g, or t
  misc_feature (2726)..(2726): n is a, c, g, or t
  misc_feature (2877)..(2877): n is a, c, g, or t
ttctttgtataccatttattacttattacactaaataatatccagagtatacatcaagtggctttttgttagaattgtctcattggagtgccgtgtatttacttcgtagacactgcagttctttacaacaggaagtcagacttaggaccagcatgggccatctcagtgaataggtttttttcctatgcacggtcatcaccaatgaagtaggcagacttgtgggaaagtgtggtatcatgattttatttataacttgggtggagattatttgggtaaaggaaaacgcaatcatatgtcaacacggagtgctgcatagacttggggaatgaatggggtgtgcggcgtccctcatcccctcaggtgagggccttcaggaagatggcatattttctggtgttgagaatggttgttatcctaaagagaccctcattgtctgcacacaggtcagggccctttgaagtacgagcagaccttgaggagtccatggaatttgtggatcccggagttgctggagaatcagatgagagcggagatgagcgcgtcagcgatgaagaaaccgacctgggcacagactgggagaacttgcctagtccccggttttgtgatatcccttcccagtctgtggaagtctcccagagtcagagcacccaggcgtccccacccatcgcgagcagcagtgcaggtgggatgatctcctctgcagcagcctcggtgacctcctggtttaaagcttacactggacaccgttaacgagcatggaccaaaacataccaaatctgcatcaagaaagttcttctcccactacactctagtaaacattttctgtttaagttaagatagtgtctggaacaaagaggttaaagtgttgttttgttttgtctttttaagcagggagacaaacatttctatttgccaagtggcctgtgatggtgaccaacatgcttatgataattaagagaacaggggtcgaaggtctttctacccagaccagtgctggtggaaggaggacctgtgcgtgtggccagttctgccaaggaagcagttgatttgggttccctctgggcccgggccaccgggcccacagatatgggtcagtgtgctggtccttgcggtgctgagactgttcctgacactttaagttttagaggttggttgaatcacaagaggtgattcttgattattaggacatgaaagataaaagctctttaataagagtttttctgccattgttttttgtatgagaaccagcaggcaatttaaaatttctaatttggtcctttgattttgtttgggaggggtgagttacacgtattttattcatgctgctctgtcgtagtttgtcagacattcctgtttttctttcccccacacaccaaagaaaatgaaagtctttttctttaggacccacatccataaatggaagaaatcctggctgcaataatgtctagagagtttttaactattttcttgtattctgaggggaattaagcttattcttacctagttgaattcctgccatccacactatgagcattttgaaattgaacttatattttctgggtgaaaataagtcatgaaggtcattcccttatgtaagctcaatgcctgcctgggcacaggggaaaagccacttagttaagtggcctctggtcattcttgtggtgtccactttctttctatgggattgagtaggtggcaggtgttttcaggggaaaccatcctacttgtttccccgaactctttgttgctctgaggacacagctttgctcagaaatgcagcgcagatccttacggctgatgctactctgctctgttctggggaaagcacaatataaagaaagaatttcccagccaggcgcagtggctcacgcctgtaatcccagcactttaggaggccgaggcaggcggatcacttgaggtcaggagtttgagagcagcctggctaacatggtgaaaccctgtttctactaaaaatacaaaaaattaccgggtgtggtggcgcacgcctgtaatcccagctactcgggaggctgcggcaggagaatcgcttgaaccgggaggcagaggttgcagtgagccgagattgtgccattgcactccagcctgggcaacaagagcgaaactccgtctcaaaaaaaaaaagaatttccctcagcaggagatcattttcagctcacgtgtcttgtcattcttttagtgacaatcttacaagaaaactataatgagagaggcattatgtacaaatatgtaagtagtttatttttaataactgcaaaaaaatcctatgtaacaactaccaaaagaaatcctatgaaagagtcctaacaggcattattaccatatcttatgtgattggcatgatagcacctctgataaatcattcagaggtttgccatgccccagcttcttttctcatcataataattgtagttgatactttgcctccaagtccgaggtgctatatagcttttgctaatggtatatttggtgttttgtatagttttgggtagagttgcagaacggagtttatttctatccggtagtcacaaattccttggctctatgaattttccatgaaaggaggaagtaggcttttctcgttgtgggtggtcttttttttttttggagacggagtctcactcagctgcccaggctggagtgtagtggcaccatctccgctcactgcaaccaccatctcctgggttcaagcaattcttccntctcancctcccgagtagctgggattataggcacctgccatcatgcccagctaatttttgtattttagtaaagacgggggttttcaccatgttggccaggctggtcttgaactcctgacttcaggtgatccgcttgccttggcctcctaaagtgctnggattacaggcctgagccaccgcgcccggccccttatgggttcttctacactgctgggatctctgttttaagtgctcagcttcatgattgattgctgggcttccattttcccatccagttctggagttcgtagagagtgaagatggtagacttgaacagataaataaacttaacgatcttgtaagagttgtctagctacttaaaaccctcagaagtaagagcttagtctcacgagttgtaagagtgggatttggagcttggtggtggagactgacttcagctgagagatgcacaacagtcatggttttcttaagcctcttatgaaaccatgaatgagagatgaagctaaagaatagaatccagagatcacaaactcatctagagtacttccacaaaatttacaaagatgtgggaactttatggataggatatattttgtttgttgttgttaatatcaactagaggcactttacatagggttaagtgatcgaacccttttgtggttttgaacaccaacatactggcttacactgctgaaatattttgggtttcattattttgcactggatccaccctgtaaatactcttaagtatacatttcaaccactgttttttctactctttttgctgctcattaaaatctttcatgtaggtgccagaaccatatgtaaacagctttttaaaaaattgaagctggtattttgtttaaacaaaaagccatagaacttggtcatgttttccattttaaaatgatttactgaaacaaagtaatactaataaaaacccacaggcaccaaacaggctgcttaaaatggtctgttaaagacattttttggttatggaatataagaaaagttttgcacatctgtaagggggaaaaacagtatatcaccattgggtagagtggacgggactcatgtaaggactcaatttggggaagagcattcagtggcatgctgttagaggactagtgtccgagaatctcctcacagtatcatgttgcaggaattccccattgctctgcaacttccaaaccagtttgagtcatacaaatgttttctaaacttttattgtattactgcaataaatcttttaacagta

SEQ ID NO: 305679 - DNA, 4042 bp, Homo sapiens
  misc_feature (2784)..(2784): n is a, c, g, or t
  misc_feature (2790)..(2790): n is a, c, g, or t
  misc_feature (2941)..(2941): n is a, c, g, or t
tgctctcagcaaaaaaaaaaaaaaaaatatatatatatatatatatacacacaaagaatggaccatttatgtctggtcatggagcatctattaaggaagcactaaaacgtaacagtgctatcatgataaaatcataaatgataaactcgtggattattagtagttttgttggaattaaggttttgtacatggtggttgttttcttactgcagacatggagcagagtaaccctgcctacaccatcagtgctgcgctgtgctatgcaactcagctggtcaacattctgtctcatatacttgatgtaaatcttcccaaaaagctctgcaacagtgaattttgtggcgaaaatctaagcaagcagaaatttactcgagcagtgaagaaactgaatgcaaatattctttacctttgtttttctcagcatgtaaatttagatcaattacaaccactgcataccctcaggaatctaatgtacctggtcagtccaagctctgaacacctaggcaggtcagggccctttgaagtacgagcagaccttgaggagtccatggaatttgtggatcccggagttgctggagaatcagatgagagcggagatgagcgcgtcagcgatgaagaaaccgacctgggcacagactgggagaacttgcctagtccccggttttgtgatatcccttcccagtctgtggaagtctcccagagtcagagcacccaggcgtccccacccatcgcgagcagcagtgcaggtgggatgatctcctctgcagcagcctcggtgacctcctggtttaaagcttacactggacaccgttaacgagcatggaccaaaacataccaaatctgcatcaagaaagttcttctcccactacactctagtaaacattttctgtttaagttaagatagtgtctggaacaaagaggttaaagtgttgttttgttttgtctttttaagcagggagacaaacatttctatttgccaagtggcctgtgatggtgaccaacatgcttatgataattaagagaacaggggtcgaaggtctttctacccagaccagtgctggtggaaggaggacctgtgcgtgtggccagttctgccaaggaagcagttgatttgggttccctctgggcccgggccaccgggcccacagatatgggtcagtgtgctggtccttgcggtgctgagactgttcctgacactttaagttttagaggttggttgaatcacaagaggtgattcttgattattaggacatgaaagataaaagctctttaataagagtttttctgccattgttttttgtatgagaaccagcaggcaatttaaaatttctaatttggtcctttgattttgtttgggaggggtgagttacacgtattttattcatgctgctctgtcgtagtttgtcagacattcctgtttttctttcccccacacaccaaagaaaatgaaagtctttttctttaggacccacatccataaatggaagaaatcctggctgcaataatgtctagagagtttttaactattttcttgtattctgaggggaattaagcttattcttacctagttgaattcctgccatccacactatgagcattttgaaattgaacttatattttctgggtgaaaataagtcatgaaggtcattcccttatgtaagctcaatgcctgcctgggcacaggggaaaagccacttagttaagtggcctctggtcattcttgtggtgtccactttctttctatgggattgagtaggtggcaggtgttttcaggggaaaccatcctacttgtttccccgaactctttgttgctctgaggacacagctttgctcagaaatgcagcgcagatccttacggctgatgctactctgctctgttctggggaaagcacaatataaagaaagaatttcccagccaggcgcagtggctcacgcctgtaatcccagcactttaggaggccgaggcaggcggatcacttgaggtcaggagtttgagagcagcctggctaacatggtgaaaccctgtttctactaaaaatacaaaaaattaccgggtgtggtggcgcacgcctgtaatcccagctactcgggaggctgcggcaggagaatcgcttgaaccgggaggcagaggttgcagtgagccgagattgtgccattgcactccagcctgggcaacaagagcgaaactccgtctcaaaaaaaaaaagaatttccctcagcaggagatcattttcagctcacgtgtcttgtcattcttttagtgacaatcttacaagaaaactataatgagagaggcattatgtacaaatatgtaagtagtttatttttaataactgcaaaaaaatcctatgtaacaactaccaaaagaaatcctatgaaagagtcctaacaggcattattaccatatcttatgtgattggcatgatagcacctctgataaatcattcagaggtttgccatgccccagcttcttttctcatcataataattgtagttgatactttgcctccaagtccgaggtgctatatagcttttgctaatggtatatttggtgttttgtatagttttgggtagagttgcagaacggagtttatttctatccggtagtcacaaattccttggctctatgaattttccatgaaaggaggaagtaggcttttctcgttgtgggtggtcttttttttttttggagacggagtctcactcagctgcccaggctggagtgtagtggcaccatctccgctcactgcaaccaccatctcctgggttcaagcaattcttccntctcancctcccgagtagctgggattataggcacctgccatcatgcccagctaatttttgtattttagtaaagacgggggttttcaccatgttggccaggctggtcttgaactcctgacttcaggtgatccgcttgccttggcctcctaaagtgctnggattacaggcctgagccaccgcgcccggccccttatgggttcttctacactgctgggatctctgttttaagtgctcagcttcatgattgattgctgggcttccattttcccatccagttctggagttcgtagagagtgaagatggtagacttgaacagataaataaacttaacgatcttgtaagagttgtctagctacttaaaaccctcagaagtaagagcttagtctcacgagttgtaagagtgggatttggagcttggtggtggagactgacttcagctgagagatgcacaacagtcatggttttcttaagcctcttatgaaaccatgaatgagagatgaagctaaagaatagaatccagagatcacaaactcatctagagtacttccacaaaatttacaaagatgtgggaactttatggataggatatattttgtttgttgttgttaatatcaactagaggcactttacatagggttaagtgatcgaacccttttgtggttttgaacaccaacatactggcttacactgctgaaatattttgggtttcattattttgcactggatccaccctgtaaatactcttaagtatacatttcaaccactgttttttctactctttttgctgctcattaaaatctttcatgtaggtgccagaaccatatgtaaacagctttttaaaaaattgaagctggtattttgtttaaacaaaaagccatagaacttggtcatgttttccattttaaaatgatttactgaaacaaagtaatactaataaaaacccacaggcaccaaacaggctgcttaaaatggtctgttaaagacattttttggttatggaatataagaaaagttttgcacatctgtaagggggaaaaacagtatatcaccattgggtagagtggacgggactcatgtaaggactcaatttggggaagagcattcagtggcatgctgttagaggactagtgtccgagaatctcctcacagtatcatgttgcaggaattccccattgctctgcaacttccaaaccagtttgagtcatacaaatgttttctaaacttttattgtattactgcaataaatcttttaacagta

SEQ ID NO: 305680 - DNA, 1545 bp, Homo sapiens
attgataagggtccgtgtcgactttgaggtcaggacagaaatactgaatgactttacacttaggaaaaaatagctaaataattaagatgcaggctgtagtgttcaaaccaatagagcagggaaagggaaatgtagatactttattaattcagtggaagataggaaagttagaagcaaaggaggctgggcacagtggctcatgcctgtaatcctagcactttgggaggccaagacaggtggatcacctgaggttaggggtttcaccatgttggccaggatggtcttgatctcctaacctcttgatctgccctccttggcctcccaaagtgctgcgattacaggcgtgagccaccgcactggcctaatttctcttttctctgcattgaactagaaaaacatcgttctctttttcgtaatgttccatagttacaaaagctataacataaggtctttttcttcattatgttttctgacatatctgaaaataagcagtgatcccaggtagataatcatattaaccataagagaccaacgtttgtgatatttattacatgcttttttcagagatggaaaataatgtcctgcaagatgaggattgaacagttaaaacaaacaatatgtaaaggaaatgaagaaatggagaaaaattctgaaggccttctcaaaaccaaggaaaagaatcagaagctttacagtcgagcacaacggcaccaagagaaaaaggagaagattcagaggcataatcgcaaacttggtgacctggtagaaaaaaagaccattgacttaagaagtcattatgagcgtctggcaaatcttcgacgatcccatatattagagctcacctctgtcatttttccaatcgaggaagtaaagacgggtgtgagagaccccgcagatgtgtcttcagagagtgacagtgccatgacctccagcactgtgagcaagcttgctgaagcccggaggacaacttacctctcaggacgatgggtctgtgacgatcacaacggagacaccagcattagcattacagggccttggattagcctccctaacaatggggactactctgcctactacagctgggtggaggagaagaaaacaacccaggggcctggtgagaagcagcatatcctttgaaatctgtatatagagagagttataggtaaaattgacataacaaaatgaagagctttcaagtgaaccattcaggggcatttagtacattcacagcactgtgctcccatcacctccatgtcatttcaaaacattttgatcaccccagacagaaaccccatggcatgaaagtgtcacatttccccactctcccttcccctcagctcctgggcaaccacacattgctttctgtgtctatagatttgcctgttctgggcagcttatataaatggaatcacagaacatatagctttttgtgtcagacttctttcacttagcgtaatgttttcaagattcatccacatgatagtatatattagtgtttcattcgtttttatggttgagtaatattccatcatatggataagacac

SEQ ID NO: 305681 - DNA, 2804 bp, Homo sapiens
gtggcgatcatggcaagttagaagttttctgactcctttcggaggagcctccgggaccccggggagtaacaggtgtctggaggctgaagggtggaggggttcctggatttggggtttgcttgtgaaactcccctccaccctcctctctcgcacccacccaccccctcacccccttctttttccgtccttggaaaatggtgtccaagctcacgtcgctccagcaagaactcctgagcgccctgctgagctccggggtcaccaaggaggtgctggttcaggccttggaggagttgctgccatccccgaacttcggggtgaagctggagacgctgcccctgtcccctggcagcggggccgagcccgacaccaagccggtcttccatactctcaccaacggccacgccaagggccgcttgtccggcgacgagggctccgaggacggcgacgactatgacacacctcccatcctcaaggagctgcaggcgctcaacaccgaggaggcggcggagcagcgggcggaggtggaccggatgctcagtgaggacccttggagggctgctaaaatgatcaagggttacatgcagcaacacaacatcccccagagggaggtggtcgatgtcaccggcctgaaccagtcgcacctctcccagcatctcaacaagggcacccctatgaagacccagaagcgtgccgctctgtacacctggtacgtcagaaagcaacgagagatcctccgacaattcaaccagacagtccagagttctggaaatatgacagacaaaagcagtcaggatcagctgctgtttctctttccagagttcagtcaacagagccatgggcctgggcagtccgatgatgcctgctctgagcccaccaacaagaagatgcgccgcaaccggttcaaatgggggcccgcgtcccagcaaatcttgtaccaggcctacgatcggcaaaagaaccccagcaaggaagagagagaggccttagtggaggaatgcaacagggcagaatgtttgcagcgaggggtgtccccctccaaagcccacggcctgggctccaacttggtcactgaggtccgtgtctacaactggtttgcaaaccgcaggaaggaggaggcattccggcaaaagctggccatggacgcctatagctccaaccagactcacagcctgaaccctctgctctcccacggctccccccaccaccagcccagctcctctcctccaaacaagctgtcaggagtgcgctacagccagcagggaaacaatgagatcacttcctcctcaacaatcagtcaccatggcaacagcgccatggtgaccagccagtcggttttacagcaagtctccccagccagcctggacccaggccacaatctcctctcacctgatggtaaaatgatctcagtctcaggaggaggtttgcccccagtcagcaccttgacgaatatccacagcctctcccaccataatccccagcaatctcaaaacctcatcatgacacccctctctggagtcatggcaattgcacaaagcctcaacacctcccaagcacagagtgtccctgtcatcaacagtgtggccggcagcctggcagccctgcagcccgtccagttctcccagcagctgcacagccctcaccagcagcccctcatgcagcagagcccaggcagccacatggcccagcagcccttcatggcagctgtgactcagctgcagaactcacacatgtacgcacacaagcaggaacccccccagtattcccacacctcccggtttccatctgcaatggtggtcacagataccagcagcatcagtacactcaccaacatgtcttcaagtaaacagtgtcctctacaagcctggtgatgcccacacaccacttacttcgtgcgcaacaacaaggaccctgttttccacaccatcaccctctgggcagctgtcatggaaaagcccagtgacctgaccagcacctgcgagaggtccctgcttacctgacggacgtcctgctggcacctcagacaatccactctcaggaggcgcagcccgaagcccagtttcccttctatgcagtattgccacaatgcctctcccacgatgtcaaggactcctgtctgtcctggaggtgggagacaaggaacctccgaagaggaagcaagaaagccgtactgtctatgttgtgatccttcatcgaacaaactgatgcgaaaacttgaatctgttactgaaatgaggagagaaggacatgtgctattgaactgagccaaacacactgtaaatatccacagactccctcccctgcccccatcccaaatgatcttgagatttcttttaaagaagtaaatttgtccaatggctgtaaactataaactactgtaattaagtgcaatttcccctctgtgtcctctcccctctgccctgtatataatactaaagtgtctattagttttctttgtaaaggtcagagtcaaaatttcaaaagtgatctgtcccctctcccctcatggagaaacatcctaagtgggaagtgaagccccttgtcctctcccgcgggcctggacacttatggggacagcataccttggactgactaccagctaactccagtctcctgacattaagacacacctctggatccctggaggggctgaatgtagtgtgtcagagtaacatgccagcttcctgtgggccaggagctcagccgtgcactccctaagaaaccccagggcagggaaactggctgtttgatagcagaagaaaaagttgcagtctcagaaagccttccattaaaacaatttattttat

SEQ ID NO: 305682 - DNA, 1884 bp, Homo sapiens
gaatccatccagtcattcatttattcatcagaagtttaccgagtggctattcagtgccaaggcactggggatacatcagtgaacaaaacaaacgagataaaaatttcctgccctcgtggcgcttacattctagaattaaatagagaacatgccatatttaccctggagaaaagcagccgatatttcttgtgggtggacaggggaggagaaagcaactttattttcttattacccacccttgaaaacaagaggtgccgagtcattgttccaggaccctggtggcactaatgttccctactgggtttgtgttgttttgcaggagtgcgctacagccagcagggaaacaatgagatcacttcctcctcaacaatcagtcaccatggcaacagcgccatggtgaccagccagtcggttttacagcaagtctccccagccagcctggacccaggccacaatctcctctcacctgatggtaaaatgatctcagtctcaggaggaggtttgcccccagtcagcaccttgacgaatatccacagcctctcccaccataatccccagcaatctcaaaacctcatcatgacacccctctctggagtcatggcaattgcacaaagcctcaacacctcccaagcacagagtgtccctgtcatcaacagtgtggccggcagcctggcagccctgcagcccgtccagttctcccagcagctgcacagccctcaccagcagcccctcatgcagcagagcccaggcagccacatggcccagcagcccttcatggcagctgtgactcagctgcagaactcacacatgtacgcacacaagcaggaacccccccagtattcccacacctcccggtttccatctgcaatggtggtcacagataccagcagcatcagtacactcaccaacatgtcttcaagtaaacagtgtcctctacaagcctggtgatgcccacacaccacttacttcgtgcgcaacaacaaggaccctgttttccacaccatcaccctctgggcagctgtcatggaaaagcccagtgacctgaccagcacctgcgagaggtccctgcttacctgacggacgtcctgctggcacctcagacaatccactctcaggaggcgcagcccgaagcccagtttcccttctatgcagtattgccacaatgcctctcccacgatgtcaaggactcctgtctgtcctggaggtgggagacaaggaacctccgaagaggaagcaagaaagccgtactgtctatgttgtgatccttcatcgaacaaactgatgcgaaaacttgaatctgttactgaaatgaggagagaaggacatgtgctattgaactgagccaaacacactgtaaatatccacagactccctcccctgcccccatcccaaatgatcttgagatttcttttaaagaagtaaatttgtccaatggctgtaaactataaactactgtaattaagtgcaatttcccctctgtgtcctctcccctctgccctgtatataatactaaagtgtctattagttttctttgtaaaggtcagagtcaaaatttcaaaagtgatctgtcccctctcccctcatggagaaacatcctaagtgggaagtgaagccccttgtcctctcccgcgggcctggacacttatggggacagcataccttggactgactaccagctaactccagtctcctgacattaagacacacctctggatccctggaggggctgaatgtagtgtgtcagagtaacatgccagcttcctgtgggccaggagctcagccgtgcactccctaagaaaccccagggcagggaaactggctgtttgatagcagaagaaaaagttgcagtctcagaaagccttccattaaaacaatttattttat

SEQ ID NO: 305683 - DNA, 3035 bp, Homo sapiens
gtggcgatcatggcaagttagaagttttctgactcctttcggaggagcctccgggaccccggggagtaacaggtgtctggaggctgaagggtggaggggttcctggatttggggtttgcttgtgaaactcccctccaccctcctctctcgcacccacccaccccctcacccccttctttttccgtccttggaaaatggtgtccaagctcacgtcgctccagcaagaactcctgagcgccctgctgagctccggggtcaccaaggaggtgctggttcaggccttggaggagttgctgccatccccgaacttcggggtgaagctggagacgctgcccctgtcccctggcagcggggccgagcccgacaccaagccggtcttccatactctcaccaacggccacgccaagggccgcttgtccggcgacgagggctccgaggacggcgacgactatgacacacctcccatcctcaaggagctgcaggcgctcaacaccgaggaggcggcggagcagcgggcggaggtggaccggatgctcagtgaggacccttggagggctgctaaaatgatcaagggttacatgcagcaacacaacatcccccagagggaggtggtcgatgtcaccggcctgaaccagtcgcacctctcccagcatctcaacaagggcacccctatgaagacccagaagcgtgccgctctgtacacctggtacgtcagaaagcaacgagagatcctccgacaattcaaccagacagtccagagttctggaaatatgacagacaaaagcagtcaggatcagctgctgtttctctttccagagttcagtcaacagagccatgggcctgggcagtccgatgatgcctgctctgagcccaccaacaagaagatgcgccgcaaccggttcaaatgggggcccgcgtcccagcaaatcttgtaccaggcctacgatcggcaaaagaaccccagcaaggaagagagagaggccttagtggaggaatgcaacagggcagaatgtttgcagcgaggggtgtccccctccaaagcccacggcctgggctccaacttggtcactgaggtccgtgtctacaactggtttgcaaaccgcaggaaggaggaggcattccggcaaaagctggccatggacgcctatagctccaaccagactcacagcctgaaccctctgctctcccacggctccccccaccaccagcccagctcctctcctccaaacaagctgtcaggagtgcgctacagccagcagggaaacaatgagatcacttcctcctcaacaatcagtcaccatggcaacagcgccatggtgaccagccagtcggttttacagcaagtctccccagccagcctggacccaggccacaatctcctctcacctgatggtaaaatgatctcagtctcaggaggaggtttgcccccagtcagcaccttgacgaatatccacagcctctcccaccataatccccagcaatctcaaaacctcatcatgacacccctctctggagtcatggcaattgcacaaagcctcaacacctcccaagcacagagtgtccctgtcatcaacagtgtggccggcagcctggcagccctgcagcccgtccagttctcccagcagctgcacagccctcaccagcagcccctcatgcagcagagcccaggcagccacatggcccagcagcccttcatggcagctgtgactcagctgcagaactcacacatgtacgcacacaagcaggaacccccccagtattcccacacctcccggtttccatctgcaatggtggtcacagataccagcagcatcagtacactcaccaacatgtcttcaagtaaacagtgtcctctacaagcctggtgatgcccacacaccacttacttcgtgcgcaacaacaaggaccctgttttccacaccatcaccctctgggcagctgtcatggaaaagcccagtgacctgaccagcacctgcgagaggtccctgcttacctgacggacgtcctgctggcacctcagacaatccactctcaggaggcgcagcccgaagcccagtttcccttctatgcagtattgccacaatgcctctcccacgatgtcaaggactcctgtctgtcctggaggtgggagacaaggaacctccgaagaggaagcaagaaagccgtactgtctatgttgtgatccttcatcgaacaaactgatgcgaaaacttgaatctgttactgaaatgaggagagaaggacatgtgctattgaactgagccaaacacactgtaaatatccacagactccctcccctgcccccatcccaaatgatcttgagatttcttttaaagaagtaaatttgtccaatggctgtaaactataaactactgtaattaagtgcaatttcccctctgtgtcctctcccctctgccctgtatataatactaaagtgtctattagttttctttgtaaaggtcagagtcaaaatttcaaaagtgatctgtcccctctcccctcatggagaaacatcctaagtgggaagtgaagccccttgtcctctcccgcgggcctggacacttatggggacagcataccttggactgactaccagctaactccagtctcctgacattaagacacacctctggatccctggaggggctgaatgtagtgtgtcagagtaacatgccagcttcctgtgggccaggagctcagccgtgcactccctaagaaaccccagggcagggaaactggctgtttgatagcagaagaaaaagttgcagtctcagaaagccttccattaaaacaatttattttatcactacccagagtctcatatttctgtctctgatactttccctgccatggttccaccgagaacccctggcccctggtctccttggaattttctgtatactccactgggatcctgtagtgtgtcatctaggggtgtagagaggtgggtggccttctcttgccgtcatgctcccagtgtctgtgtaggctttactgctgattgaggtgaagaagagttgaatcccccagtaaga

SEQ ID NO: 305684 - DNA, 4184 bp, Homo sapiens
gtggcgatcatggcaagttagaagttttctgactcctttcggaggagcctccgggaccccggggagtaacaggtgtctggaggctgaagggtggaggggttcctggatttggggtttgcttgtgaaactcccctccaccctcctctctcgcacccacccaccccctcacccccttctttttccgtccttggaaaatggtgtccaagctcacgtcgctccagcaagaactcctgagcgccctgctgagctccggggtcaccaaggaggtgctggttcaggccttggaggagttgctgccatccccgaacttcggggtgaagctggagacgctgcccctgtcccctggcagcggggccgagcccgacaccaagccggtcttccatactctcaccaacggccacgccaagggccgcttgtccggcgacgagggctccgaggacggcgacgactatgacacacctcccatcctcaaggagctgcaggcgctcaacaccgaggaggcggcggagcagcgggcggaggtggaccggatgctcagtgaggacccttggagggctgctaaaatgatcaagggttacatgcagcaacacaacatcccccagagggaggtggtcgatgtcaccggcctgaaccagtcgcacctctcccagcatctcaacaagggcacccctatgaagacccagaagcgtgccgctctgtacacctggtacgtcagaaagcaacgagagatcctccgacaattcaaccagacagtccagagttctggaaatatgacagacaaaagcagtcaggatcagctgctgtttctctttccagagttcagtcaacagagccatgggcctgggcagtccgatgatgcctgctctgagcccaccaacaagaagatgcgccgcaaccggttcaaatgggggcccgcgtcccagcaaatcttgtaccaggcctacgatcggcaaaagaaccccagcaaggaagagagagaggccttagtggaggaatgcaacagggcagaatgtttgcagcgaggggtgtccccctccaaagcccacggcctgggctccaacttggtcactgaggtccgtgtctacaactggtttgcaaaccgcaggaaggaggaggcattccggcaaaagctggccatggacgcctatagctccaaccagactcacagcctgaaccctctgctctcccacggctccccccaccaccagcccagctcctctcctccaaacaagctgtcaggtaagcaaaggttgggcctcactgcctcggcaacccaaccatcctggttcttgccacggatcttatctggtttaagggttttcagaggagcaaacgcttttgagatgatcctagggccgctctctcattgccagaatatactcccctggaaataatgtgtggctctgatcagtttcctccaactcctggttcagccattgccctgtgagggctcactcggcttccagggagccctttaccctatttgtctccttccctcttcttctccctgtgtggctgctgactcagcggtcattctacactgaggaggctgccttatgggtgggccagatccaaaccgcaggcaaacgggtcgtgatggcgtggcaaccctcactgtgttggaggatggcactccggccacctcctccatctctggccatatcctgcccctcgctcggtccggctgcctcaggagaagctcagtagcctttggggacggccactctgttggtggcctctgcttgttggcttccgtgtgtcatcagggttggtgggggtcagtcacttgaaatctttgcagcaatgagttgggaaaaactgaccgagtacctgctccatcatgcttgattgagtgctcctgtgtgctggccctggcctggattagaatgcctctgctgtgggctttgggtttgtcaggatggaatcctacgacctcctcgggggaaagcacacctcatgctgagcgctctcttaggcacaggctgggatggagcacttcttctggtccttcattcttctggcaaagctggcttctagaatggatgtgctcactggggtctgtgtggtgcccatgaccacaaagtgtagcagcctcctgcctgctccaagaaaagggcttgtgaaaggaaagccaaacactgtttctaactcaggggtgattctgaaacctgttggctcccctcacctgtcggttgccttctgatgagaaaggcctgagggctgggggctgacccaagtgttgaggggaccaaagccaccaagacaggctcggagccatcagctgggtggtgtacaagcatttgttccatccctgctgtgccctcccatagcactgcctctttccaggggcctctgggagcctgacagtgcccagcatgaaggtggggccagtgctgggggtttctgtaggtccactcccacagaggagagaggctcagccacacaggaagaaagtcttggttacttaagaggcagagaagccctaggcaaagactggcctgattgcagagtaacttcgcccctttaggaaattcaaagcagggttctgaggcaaatggcacatggctggcactgagcagtaccagtgtgcttgcccaccacagcgatccacggagctgaagctgggagctacagggggcgtggttggggcaaggggcattactgggaagacaatggccattgtgttgggacctgtgatctccacaccaaagtcagggagcctggaagccaaacaaaggcccagcagccttctgacaagcaagggctgtgctgaggtcaccacggggtcgttggtttaggcatcctgtgtgctgacaggagacccagagagctagggctggagggacagggagcagggcagaaaacacagcctgtgtactcctctgactggagtctaggaagggcgtgtcatgggaagcggatactcgggtgctcaagtctgatctttctaaaatcttgtaatgttagaatttggaggaatttgaagaaggaactgaggcccagaaagaggcagtgatttgccaaagtgacacagagcaatggtacgaaaacaaggactagagctctggcctgctggttcccactccatactttcccacagcactacgatgtgttgaatgcttaccaagtcctgggatatgctagtgatgtacgagctgcgcgtcctgcctctgggaggttactgtctggtaggaaggatatcgggtcactgtcgagtccccagaaccagctgcagatggaggttttgtttgggggctttgtggatctttctgcggtgtaataagatcctatactgtttctggagcaacagttatgggacactgatattatcagtggctgcctttcttctgtcttttttttttttttttttttttgagagacagggtctacctctgtcacccgagctagagtgcagtggtgcagtcttggctcactacagcctcgaactcctggtctcaagcagtcctcctgtcttagcctcccaaagtgctgggattacagttgtgagattgtgcccagcccttctgctttaattttcactctgggctcctcaacatggtccttgtcccaagcccagggactggcttctctttctctgagtgtagttatgtatctgggttctaaccagtaaggttataactgtggctaattcacataacttctctgagtctgaatttcctgcctacaaaatggagaaataggaccttccacacagggtgcatgtgaggatgaaaggagtgaatgtataaagacacctttcccgataacccatactaccctcattatgactcttaacattagagagggctaaacaagggcagtgagaagactggcaggcagcagaaatcattttctttttgatctcacacaccagggcattccccgtaagaggcagtgagatgtagcctggccctggaactagaaacagaggtggctgctgtgctagtgcctgagatgcacgatgctggggtcaaagacttgtgtccccacctcaggctgccaggatggcgtgtgtgccgtgacagggctcccgagtcatgcactcaggcagacagcaggctggagcccagcattcaggggtggcttctgtctgtagagccgcatggcactcttcccacctcagtgcccacagccaaggtagggtcactaaccaagccagaaacgtaactgtgtgcagaataccg

SEQ ID NO: 305685 - DNA, 2445 bp, Homo sapiens
cgcggggcggggctggcggcgccggcgcagcccgggggcggcgggaggaggaggtggcggcggtggcgctgggagctcctgtcaccgctggggccgggccgggcgggagtgcaggggacgtgagggcgcaagggccgggacatggggcccgccagccccgctgctcgcggtctaagtcgccgcccgggccagccgccgctgccgctgctgctgccactattgctgctgcttctgcgcgcgcagcccgccatcgggagcctggccggtgggagccccggcgcggccgaggccccggggtcggcccaggtggctggactatgcgggcgcctaacccttcaccgggacctgcgcaccggccgctgggaaccagacccacagcgctctcgacgctgtctccgggacccgcagcgcgtgctggagtactgcagacagatgtacccggagctgcagattgcacgtgtggagcaggctacgcaggccatccccatggagcgctggtgcgggggttcccggagcggcagctgcgcccacccccaccaccaggttgtgcccttccgctgcctgcctggtgaatttgtgagtgaggccctgctggtgcctgaaggctgccggttcttgcaccaggagcgcatggaccaatgtgagagttcaacccggaggcatcaggaggcacaggaggcctgcagctcccagggcctcatcctgcacggctcgggcatgctcttaccctgtggctcggatcggttccgtggtgtggagtatgtgtgctgtccccctccagggacccccgacccatctgggacagcagttggtgacccctccacccggtcctggcccccggggagcagagtagagggggctgaggacgaggaagaggaggaatccttcccacagccagtagatgattacttcgtggagcctccgcaggctgaagaggaagaggaaacggtcccacccccaagctcccatacacttgcagtggtcggcaaagtcactcccaccccgaggcccacagacggtgtggatatttactttggcatgcctggggaaatcagtgagcacgaggggttcctgagggccaagatggacctggaggagcgtaggatgcgccagattaatgaggtgatgcgtgaatgggccatggcagacaaccagtccaagaacctgcctaaagccgacagacaggccctgaatgagcacttccagtccattctgcagactctggaggagcaggtgtctggtgagcgacagcgcctggtggaaacccacgccacccgcgtcatcgcccttatcaacgaccagcgccgggctgccttggagggcttcctggcagccctgcaggcagatccgcctcaggcggagcgtgtcctgttggccctgcggcgctacctgcgtgcggagcagaaggaacagaggcacacgctgcgccactaccagcatgtggccgccgtggatcccgagaaggcacagcagatgcgcttccaggtgcatacccaccttcaagtgattgaggagagggtgaatcagagcctgggcctgcttgaccagaacccccacctggctcaggagctgcggccccaaatccaggaactcctccactctgaacacctgggtcccagtgaattggaagcccctgcccctgggggcagcagcgaggacaagggtgggctgcagcctccagattccaaggatgacacccccatgacccttccaaaagggtccacagaacaagatgctgcatcccctgagaaagagaagatgaacccgctggaacagtatgagcgaaaggtgaatgcgtctgttccaaggggtttccctttccactcatcggagattcagagggatgagctggcaccagctgggacaggggtgtcccgtgaggctgtgtcgggtctgctgatcatgggagcgggcggaggctccctcatcgtcctctccatgctgctcctgcgcaggaagaagccctacggggctatcagccatggcgtggtggaggtggaccccatgctgaccctggaggagcagcagctccgcgaactgcagcggcacggctatgagaaccccacttaccgcttcctggaggaacgaccctgacccggcccccttcaccccttcagccgagcccagacctcccctcttcctggagccccagaaccccaactcccagcctagggcagcagggagtcttgaagtgatcatttcacacccttttgtgagacggctggaaattcttatttcccctttccaattccaaaattccatccctaagaattcccagatagtcccagcagcctccccacgtggcacctcctcaccttaatttattttttaagtttatttatggctctttaaggtgaccgccaccttggtcctagtgtctattccctggaattcaccctctcatgtttccctactaacatcccaataaagtcctcttccctacca

SEQ ID NO: 305686 - DNA, 512 bp, Homo sapiens
ttcggcacgagcggcacgaggttaagaagctctacggggctatcagccatggcgtggtggatgtggaccccatgctgaccctggaggagcagcagctccgcgaactgcagcggcacggctatgagaaccccacttaccgcttcctggaggaacgaccctgacccggcccccttcaccccttcagccgagcccagacctcccctcttcctggagccccagaaccccaactcccagcctagggcagcagggagtcttgaagtgatcatttcacacccttttgtgagacggctggaaattcttatttcccctttccaattccaaaattccatccctaagaattcccagatagtcccagcagcctccccacgtggcacctcctcaccttaatttattttttaagtttatttatggctctttaaggtgaccgccaccttggtcctagtgtctattccctggaattcaccctctcatgtttccctactaacatcccaataaagtcctcttccctacca

SEQ ID NO: 305687 - DNA, 2047 bp, Homo sapiens
  misc_feature (1996)..(1996): n is a, c, g, or t
  misc_feature (2038)..(2038): n is a, c, g, or t
cgcggggcggggctggcggcgccggcgcagcccgggggcggcgggaggaggaggtggcggcggtggcgctgggagctcctgtcaccgctggggccgggccgggcgggagtgcaggggacgtgagggcgcaagggccgggacatggggcccgccagccccgctgctcgcggtctaagtcgccgcccgggccagccgccgctgccgctgctgctgccactattgctgctgcttctgcgcgcgcagcccgccatcgggagcctggccggtgggagccccggcgcggccgaggccccggggtcggcccaggtggctggactatgcgggcgcctaacccttcaccgggacctgcgcaccggccgctgggaaccagacccacagcgctctcgacgctgtctccgggacccgcagcgcgtgctggagtactgcagacagatgtacccggagctgcagattgcacgtgtggagcaggctacgcaggccatccccatggagcgctggtgcgggggttcccggagcggcagctgcgcccacccccaccaccaggttgtgcccttccgctgcctgcctggtgaatttgtgagtgaggccctgctggtgcctgaaggctgccggttcttgcaccaggagcgcatggaccaatgtgagagttcaacccggaggcatcaggaggcacaggaggcctgcagctcccagggcctcatcctgcacggctcgggcatgctcttaccctgtggctcggatcggttccgtggtgtggagtatgtgtgctgtccccctccagggacccccgacccatctgggacagcagttggtgacccctccacccggtcctggcccccggggagcagagtagagggggctgaggacgaggaagaggaggaatccttcccacagccagtagatgattacttcgtggagcctccgcaggctgaagaggaagaggaaacggtcccacccccaagctcccatacacttgcagtggtcggcaaagtcactcccaccccgaggcccacagacggtgtggatatttactttggcatgcctggggaaatcagtgagcacgaggggttcctgagggccaagatggacctggaggagcgtaggatgcgccagattaatgaggtgatgcgtgaatgggccatggcagacaaccagtccaagaacctgcctaaagccgacagacaggccctgaatgagcacttccagtccattctgcagactctggaggagcaggtgtctggtgagcgacagcgcctggtggaaacccacgccacccgcgtcatcgcccttatcaacgaccagcgccgggctgccttggagggcttcctggcagccctgcaggcagatccgcctcaggcggagcgtgtcctgttggccctgcggcgctacctgcgtgcggagcagaaggaacagaggcacacgctgcgccactaccagcatgtggccgccgtggatcccgagaaggcacagcagatgcgcttccaggtgcatacccaccttcaagtgattgaggagagggtgaatcagagcctgggcctgcttgaccagaacccccacctggctcaggagctgcggccccaaatccaggaactcctccactctgaacacctgggtcccagtgaattggaagcccctgcccctgggggcagcagcgaggacaagggtgggctgcagcctccagattccaaggatgacacccccatgacccttccaaaagggtccacagaacaagatgctgcatcccctgagaaagagaagatgaacccgctggaacagtatgagcgaaaggtgaatgcgtctgttccaaggggtttccctttccactcatcggagattcagagggatgagctggcaccagctgggacaggggtgtcccgtgaggctgtgtcgggtctgctgatcatgggagcgggcggaggctccctcatcgtcctctccatgctgctcctgcgcaggaagaagccctacggggctatcagccatggcgtggtggagnggacccattcttaccttgaggagcaaaagttcggaactgggnggacggttt

SEQ ID NO: 305688 - DNA, 794 bp, Homo sapiens
cctgggtgacagagtgagactctgtctaaagaaaaaaaaaaagaatgagatcagacttgggggtagggtccacagaacaagatgctgcatcccctgagaaagagaagatgaacccgctggaacagtatgagcgaaaggtgaatgcgtctgttccaaggggtttccctttccactcatcggagattcagagggatgagctggcaccagctgggacaggggtgtcccgtgaggctgtgtcgggtctgctgatcatgggagcgggcggaggctccctcatcgtcctctccatgctgctcctgcgcaggaagaagccctacggggctatcagccatggcgtggtggaggtggaccccatgctgaccctggaggagcagcagctccgcgaactgcagcggcacggctatgagaaccccacttaccgcttcctggaggaacgaccctgacccggcccccttcaccccttcagccgagcccagacctcccctcttcctggagccccagaaccccaactcccagcctagggcagcagggagtcttgaagtgatcatttcacacccttttgtgagacggctggaaattcttatttcccctttccaattccaaaattccatccctaagaattcccagatagtcccagcagcctccccacgtggcacctcctcaccttaatttattttttaagtttatttatggctctttaaggtgaccgccaccttggtcctagtgtctattccctggaattcaccctctcatgtttccctactaacatcccaataaagtcctcttccctacca

SEQ ID NO: 305689 - DNA, 406 bp, Homo sapiens
tccagaactacatctcccataatgccaggcagcagcggtggctaaactgggtgcatgatggtctccagtgcactctaggaaatgtggttctctaggtagaaaaggcgacctggaggtgggctgcagactgacctcctgatccctggtcttgcagtcactcccaccccgaggcccacagacggtgtggatatttactttggcatgcctggggaaatcagtgagcacgaggggttcctgagggccaagatggacctggaggagcgtaggatgcgccagattaatgaggtgataatactgggggccccaggaccccctacagtacagagctccctaaataccaggaaattcctccaggacacattgatactacctccaaaggctccctaagcccctttgaccttgagct

SEQ ID NO: 305690 - DNA, 440 bp, Homo sapiens
gctgggggcttggattccttgtcctgagggaagagggagctgaggacgtggaattgagatcctagaaaatgagagggctgggggacgctctcttgggcccttgggtaggaagaagccagtgccaggcttctgggttcctgacacctcctgctcccccaggtgaatgcgtctgttccaaggggtttccctttccactcatcggagattcagagggatgagctggtaagaggaggaacagccgggtacctaggggaagagaccagaggtcagcggccaggctgtgattcccaaagccacacaggaccctcaaagaagccctctgccccatctcctctccctgcaggcaccagctgggacaggggtgtcccgtgaggctgtgtcgggtctgctgatcatgggagcgggcggaggctccctcatcgtcctctccatgctgctcc

SEQ ID NO: 305691 - DNA, 423 bp, Homo sapiens
agcagcagctccgcgaactgcagcggcacggctatgagaaccccacttaccgcttcctggaggaacgaccctgacccggcccccttcaccccttcagccgagcccagacctcccctcttcctggagccccagaaccccaactcccagcctagggcagcagggagtcttgaagtgatcatttcacacccttttgtgagacggctggaaattcttatttcccctttccaattccaaaattccatccctaagaattcccagatagtcccagcagcctccccacgtggcacctcctcaccttaatttattttttaagtttatttatggctctttaaggtgaccgccaccttggtcctagtgtctattccctggaattcaccctctcatgtttccctactaacatcccaataaagtcctcttccctac

SEQ ID NO: 305692 - DNA, 2421 bp, Homo sapiens
cgcggggcggggctggcggcgccggcgcagcccgggggcggcgggaggaggaggtggcggcggtggcgctgggagctcctgtcaccgctggggccgggccgggcgggagtgcaggggacgtgagggcgcaagggccgggacatggggcccgccagccccgctgctcgcggtctaagtcgccgcccgggccagccgccgctgccgctgctgctgccactattgctgctgcttctgcgcgcgcagcccgccatcgggagcctggccggtgggagccccggcgcggccgaggccccggggtcggcccaggtggctggactatgcgggcgcctaacccttcaccgggacctgcgcaccggccgctgggaaccagacccacagcgctctcgacgctgtctccgggacccgcagcgcgtgctggagtactgcagacagatgtacccggagctgcagattgcacgtgtggagcaggctacgcaggccatccccatggagcgctggtgcgggggttcccggagcggcagctgcgcccacccccaccaccaggttgtgcccttccgctgcctgcctggtgaatttgtgagtgaggccctgctggtgcctgaaggctgccggttcttgcaccaggagcgcatggaccaatgtgagagttcaacccggaggcatcaggaggcacaggaggcctgcagctcccagggcctcatcctgcacggctcgggcatgctcttaccctgtggctcggatcggttccgtggtgtggagtatgtgtgctgtccccctccagggacccccgacccatctgggacagcagttggtgacccctccacccggtcctggcccccggggagcagagtagagggggctgaggacgaggaagaggaggaatccttcccacagccagtagatgattacttcgtggagcctccgcaggctgaagaggaagaggaaacggtcccacccccaagctcccatacacttgcagtggtcggcaaagtcactcccaccccgaggcccacagacggtgtggatatttactttggcatgcctggggaaatcagtgagcacgaggggttcctgagggccaagatggacctggaggagcgtaggatgcgccagattaatgaggtgatgcgtgaatgggccatggcagacaaccagtccaagaacctgcctaaagccgacagacaggccctgaatgagcacttccagtccattctgcagactctggaggagcaggtgtctggtgagcgacagcgcctggtggaaacccacgccacccgcgtcatcgcccttatcaacgaccagcgccgggctgccttggagggcttcctggcagccctgcaggcagatccgcctcaggcggagcgtgtcctgttggccctgcggcgctacctgcgtgcggagcagaaggaacagaggcacacgctgcgccactaccagcatgtggccgccgtggatcccgagaaggcacagcagatgcgcttccaggtgcatacccaccttcaagtgattgaggagagggtgaatcagagcctgggcctgcttgaccagaacccccacctggctcaggagctgcggccccaaatccaggaactcctccactctgaacacctgggtcccagtgaattggaagcccctgcccctgggggcagcagcgaggacaagggtgggctgcagcctccagattccaaggatgggtccacagaacaagatgctgcatcccctgagaaagagaagatgaacccgctggaacagtatgagcgaaaggtgaatgcgtctgttccaaggggtttccctttccactcatcggagattcagagggatgagctggcaccagctgggacaggggtgtcccgtgaggctgtgtcgggtctgctgatcatgggagcgggcggaggctccctcatcgtcctctccatgctgctcctgcgcaggaagaagccctacggggctatcagccatggcgtggtggaggtggaccccatgctgaccctggaggagcagcagctccgcgaactgcagcggcacggctatgagaaccccacttaccgcttcctggaggaacgaccctgacccggcccccttcaccccttcagccgagcccagacctcccctcttcctggagccccagaaccccaactcccagcctagggcagcagggagtcttgaagtgatcatttcacacccttttgtgagacggctggaaattcttatttcccctttccaattccaaaattccatccctaagaattcccagatagtcccagcagcctccccacgtggcacctcctcaccttaatttattttttaagtttatttatggctctttaaggtgaccgccaccttggtcctagtgtctattccctggaattcaccctctcatgtttccctactaacatcccaataaagtcctcttccctacca

SEQ ID NO: 305693 - DNA, 2050 bp, Homo sapiens
tcggcaccttccaaggaggcatcacagaggcggggcgggcagacgctgctaggcgcgggcgctgcgggacctggaggtacagaatgccgtgttggtgagcccctcgctgagtggccactatgccctgcccttctctgatgcgaggccaccaccagctacctggatttgtgcccatcgcacccagctccacccagaattatacccaggagcaattctgggctgtgaagactccaacccttatcctgtatggagagctggaacacatcctggctcgagagtcactgcctgcagctcccagggcctcatcctgcacggctcgggcatgctcttaccctgtggctcggatcggttccgtggtgtggagtatgtgtgctgtccccctccagggacccccgacccatctgggacagcagttggtgacccctccacccggtcctggcccccggggagcagagtagagggggctgaggacgaggaagaggaggaatccttcccacagccagtagatgattacttcgtggagcctccgcaggctgaagaggaagaggaaacggtcccacccccaagctcccatacacttgcagtggtcggcaaagtcactcccaccccgaggcccacagacggtgtggatatttactttggcatgcctggggaaatcagtgagcacgaggggttcctgagggccaagatggacctggaggagcgtaggatgcgccagattaatgaggtgatgcgtgaatgggccatggcagacaaccagtccaagaacctgcctaaagccgacagacaggccctgaatgagcacttccagtccattctgcagactctggaggagcaggtgtctggtgagcgacagcgcctggtggaaacccacgccacccgcgtcatcgcccttatcaacgaccagcgccgggctgccttggagggcttcctggcagccctgcaggcagatccgcctcaggcggagcgtgtcctgttggccctgcggcgctacctgcgtgcggagcagaaggaacagaggcacacgctgcgccactaccagcatgtggccgccgtggatcccgagaaggcacagcagatgcgcttccaggtgcatacccaccttcaagtgattgaggagagggtgaatcagagcctgggcctgcttgaccagaacccccacctggctcaggagctgcggccccaaatccaggaactcctccactctgaacacctgggtcccagtgaattggaagcccctgcccctgggggcagcagcgaggacaagggtgggctgcagcctccagattccaaggatgacacccccatgacccttccaaaagggtccacagaacaagatgctgcatcccctgagaaagagaagatgaacccgctggaacagtatgagcgaaaggtgaatgcgtctgttccaaggggtttccctttccactcatcggagattcagagggatgagctggcaccagctgggacaggggtgtcccgtgaggctgtgtcgggtctgctgatcatgggagcgggcggaggctccctcatcgtcctctccatgctgctcctgcgcaggaagaagccctacggggctatcagccatggcgtggtggaggtggaccccatgctgaccctggaggagcagcagctccgcgaactgcagcggcacggctatgagaaccccacttaccgcttcctggaggaacgaccctgacccggcccccttcaccccttcagccgagcccagacctcccctcttcctggagccccagaaccccaactcccagcctagggcagcagggagtcttgaagtgatcatttcacacccttttgtgagacggctggaaattcttatttcccctttccaattccaaaattccatccctaagaattcccagatagtcccagcagcctccccacgtggcacctcctcaccttaatttattttttaagtttatttatggctctttaaggtgaccgccaccttggtcctagtgtctattccctggaattcaccctctcatgtttccctactaacatcccaataaagtcctcttccctacca

SEQ ID NO: 305694 - DNA, 2583 bp, Homo sapiens
gcatagcgctcggagcctcttgcggccacaggcgcggcgtcctcggcggcgggcggcagctagcgggagccgggacgccggtgcagccgcagcgcgcggaggaacccgggtgtgccgggagctgggcggccacgtccggacgggaccgagacccctcgtagcgcattgcggcgacctcgccttccccggccgcgagcgcgccgctgcttgaaaagccgcggaacccaaggacttttctccggtccgagctcggggcgccccgcaggcgcacggtacccgtgctgcagtcgggcacgccgcggcgccgggggcctccgcagggcgatggagcccggtctgcaaggaaagtgaggcgccgccgctgcgttctggaggaggggggcacaaggtctggagaccccgggtggcggacgggagccctccccccgccccgcctccggggcaccagctccggctccattgttcccgcccgggctggaggcgccgagcaccgagcgccgccgggagtcgagcgccggccgcggagctcttgcgaccccgccaggacccgaacagagcccgggggcggcgggccggagccggggacgcgggcacacgcccgctcgcacaagccacggcggactctcccgaggcggaacctccacgccgagcgagggtcagtttgaaaaggaggatcgagctcactgtggagtatccatggagatgtggagccttgtcaccaacctctaactgcagaactgggatgtggagctggaagtgcctcctcttctgggctgtgctggtcacagccacactctgcaccgctaggccgtccccgaccttgcctgaacaagatgctctcccctcctcggaggatgatgatgatgatgatgactcctcttcagaggagaaagaaacagataacaccaaaccaaaccgtatgcccgtagctccatattggacatccccagaaaagatggaaaagaaattgcatgcagtgccggctgccaagacagtgaagttcaaatgcccttccagtgggaccccaaaccccacactgcgctggttgaaaaatggcaaagaattcaaacctgaccacagaattggaggctacaaggtccgttatgccacctggagcatcataatggactctgtggtgccctctgacaagggcaactacacctgcattgtggagaatgagtacggcagcatcaaccacacataccagctggatgtcgtggagcggtcccctcaccggcccatcctgcaagcagggttgcccgccaacaaaacagtggccctgggtagcaacgtggagttcatgtgtaaggtgtacagtgacccgcagccgcacatccagtggctaaagcacatcgaggtgaatgggagcaagattggcccagacaacctgccttatgtccagatcttgaaggtaatcatggcaccagtcttcgtgggccagtctactgggaaggagaccactgtctcgggggctcaagttcctgtgggcaggctcagttgcccccgaatgggatcattcctcacgcttcaggcacacacactccatctcagtagggatctagccacatcccccaggactagtaacagaggtcacaaagtggaggtgagctgggaacagagggctgcagggatgggtggtgctggtctgtaataagctttgagagcaacgtcactggggctttggggtcagctacacaaggaaggcatttggacccctgccttttcattgcccgaaaccagagcctttccaccaagcgtttcccagtcttagccctgtgtcctgagttacgtacgatctttctggcaaatggggtgcatgataagagcatctcttacgaagagttggaaaaacaaatgccatatataaattctaagccatatgaggacgaggagtaatggcattttcttcctttttcctctcactcccagacattcattgtccctgaatgctccattaatccagggaaggtaattgcctaaatctccagtggatctcgcaacaggaaggaaccagaagctgggaaagttgtttacctctttgtcccagagttagacctcatcctcccctagcttagctgtctcagagatatactggccctcccttctcttctctttgctgctggtgctaaaactgctctgtaggtcattggccactgtctccactcacaacccctgctccagtcctggagggagtgggttaaacacaaatagaacattccatttgaagcagtgattctttttttttttttttttttttaatcaaatgctttggacttttgaagtccacttgttctgtacttgtaaaagggaaagaaggccgggcgcagtcgtcacgcctgtaatcccagcactttagatcacttgaggtcaggagtttgagaccagcccggccaacatggtgaaaccccatctctactaaaaatacaaaaattagctgtgcatagtggttggcacctgtagtcccagctactcaggaggctgaggcaagctaactgcttgaacccagaaggcagaggttgcagtgagctgagatcacgccactgcactccagcctgggtgacagagtgagtgagactctgcgtt

SEQ ID NO: 305695 - DNA, 693 bp, Homo sapiens
  misc_feature (18)..(18): n is a, c, g, or t
  misc_feature (34)..(34): n is a, c, g, or t
  misc_feature (40)..(40): n is a, c, g, or t
  misc_feature (43)..(43): n is a, c, g, or t
  misc_feature (45)..(45): n is a, c, g, or t
  misc_feature (58)..(58): n is a, c, g, or t
  misc_feature (65)..(65): n is a, c, g, or t
  misc_feature (68)..(68): n is a, c, g, or t
  misc_feature (71)..(71): n is a, c, g, or t
  misc_feature (393)..(393): n is a, c, g, or t
  misc_feature (398)..(398): n is a, c, g, or t
  misc_feature (402)..(402): n is a, c, g, or t
cctctaacgggtcctggntttacatggaggtttnttggtnagngncacccccattggnggcaganggnccnccacctcagccccaaactgggggctctgtatatagctatgaagaaaacacaaagtgtataaatctgagtatatatttacatgtctttttaaaagggtcgttaccagagatttacccatcgggtaagatgctcctggtggctgggaggcatcagttgctatatattaaaaacaaaaaagaaaaaaaaggaaaatgtttttaaaaaggtcatatattttttgctacttttgctgttttatttttttaaattatgttctaaacctattttcagtttaggtccctcaataaaaattgctgctgcttcaaaaaaaaaaaaaaaaaanaaaanaaanaaaaaaaaaaaaaaaaaaagaaaaaaaaaaaaaacaacaaacaaaagcacacaacgaaagctacagtaaccaacaccaacacaaccagagactcaaaacagaggtgccaactccttcacgctcgacgatgacacacatacccgccccgctagccaagcgagtcctcacgcaccccagacgaacactatagccgagcggcgacgtctaccaccaaacatagagactcaaagcagacaggaaacacagcaagcaacgttctgcagctgaggccaaacaccaatcacagcaact

SEQ ID NO: 305696 - DNA, 998 bp, Homo sapiens
gcatagcgctcggagcctcttgcggccacaggcgcggcgtcctcggcggcgggcggcagctagcgggagccgggacgccggtgcagccgcagcgcgcggaggaacccgggtgtgccgggagctgggcggccacgtccggacgggaccgagacccctcgtagcgcattgcggcgacctcgccttccccggccgcgagcgcgccgctgcttgaaaagccgcggaacccaaggacttttctccggtccgagctcggggcgccccgcaggcgcacggtacccgtgctgcagtcgggcacgccgcggcgccgggggcctccgcagggcgatggagcccggtctgcaaggaaagtgaggcgccgccgctgcgttctggaggaggggggcacaaggtctggagaccccgggtggcggacgggagccctccccccgccccgcctccggggcaccagctccggctccattgttcccgcccgggctggaggcgccgagcaccgagcgccgccgggagtcgagcgccggccgcggagctcttgcgaccccgccaggacccgaacagagcccgggggcggcgggccggagccggggacgcgggcacacgcccgctcgcacaagccacggcggactctcccgaggcggaacctccacgccgagcgagggtcagtttgaaaaggaggatcgagctcactgtggagtatccatggagatgtggagccttgtcaccaacctctaactgcagaactgggatgtggagctggaagtgcctcctcttctgggctgtgctggtcacagccacactctgcaccgctaggccgtccccgaccttgcctgaacaagagatgaggtctcactttgttgctcaggctgatctctaacccctggactcaaacaatcctctcacctcagcctcccgaagtattggagttaagagatgtgagccactgtgcccggccaatttttaaatttgtaattgatgcataatggttatgtataatcgtcggg

SEQ ID NO: 305697 - DNA, 3919 bp, Homo sapiens
gcatagcgctcggagcctcttgcggccacaggcgcggcgtcctcggcggcgggcggcagctagcgggagccgggacgccggtgcagccgcagcgcgcggaggaacccgggtgtgccgggagctgggcggccacgtccggacgggaccgagacccctcgtagcgcattgcggcgacctcgccttccccggccgcgagcgcgccgctgcttgaaaagccgcggaacccaaggacttttctccggtccgagctcggggcgccccgcaggcgcacggtacccgtgctgcagtcgggcacgccgcggcgccgggggcctccgcagggcgatggagcccggtctgcaaggaaagtgaggcgccgccgctgcgttctggaggaggggggcacaaggtctggagaccccgggtggcggacgggagccctccccccgccccgcctccggggcaccagctccggctccattgttcccgcccgggctggaggcgccgagcaccgagcgccgccgggagtcgagcgccggccgcggagctcttgcgaccccgccaggacccgaacagagcccgggggcggcgggccggagccggggacgcgggcacacgcccgctcgcacaagccacggcggactctcccgaggcggaacctccacgccgagcgagggtcagtttgaaaaggaggatcgagctcactgtggagtatccatggagatgtggagccttgtcaccaacctctaactgcagaactgggatgtggagctggaagtgcctcctcttctgggctgtgctggtcacagccacactctgcaccgctaggccgtccccgaccttgcctgaacaagatgctctcccctcctcggaggatgatgatgatgatgatgactcctcttcagaggagaaagaaacagataacaccaaaccaaaccgtatgcccgtagctccatattggacatccccagaaaagatggaaaagaaattgcatgcagtgccggctgccaagacagtgaagttcaaatgcccttccagtgggaccccaaaccccacactgcgctggttgaaaaatggcaaagaattcaaacctgaccacagaattggaggctacaaggtccgttatgccacctggagcatcataatggactctgtggtgccctctgacaagggcaactacacctgcattgtggagaatgagtacggcagcatcaaccacacataccagctggatgtcgtggagcggtcccctcaccggcccatcctgcaagcagggttgcccgccaacaaaacagtggccctgggtagcaacgtggagttcatgtgtaaggtgtacagtgacccgcagccgcacatccagtggctaaagcacatcgaggtgaatgggagcaagattggcccagacaacctgccttatgtccagatcttgaagactgctggagttaataccaccgacaaagagatggaggtgcttcacttaagaaatgtctcctttgaggacgcaggggagtatacgtgcttggcgggtaactctatcggactctcccatcactctgcatggttgaccgttctggaagccctggaagagaggccggcagtgatgacctcgcccctgtacctggagatcatcatctattgcacaggggccttcctcatctcctgcatggtggggtcggtcatcgtctacaagatgaagagtggtaccaagaagagtgacttccacagccagatggctgtgcacaagctggccaagagcatccctctgcgcagacaggtaacagtgtctgctgactccagtgcatccatgaactctggggttcttctggttcggccatcacggctctcctccagtgggactcccatgctagcaggggtctctgagtatgagcttcccgaagaccctcgctgggagctgcctcgggacagactggtcttaggcaaacccctgggagagggctgctttgggcaggtggtgttggcagaggctatcgggctggacaaggacaaacccaaccgtgtgaccaaagtggctgtgaagatgttgaagtcggacgcaacagagaaagacttgtcagacctgatctcagaaatggagatgatgaagatgatcgggaagcataagaatatcatcaacctgctgggggcctgcacgcaggatggtcccttgtatgtcatcgtggagtatgcctccaagggcaacctgcgggagtacctgcaggcccggaggcccccagggctggaatactgctacaaccccagccacaacccagaggagcagctctcctccaaggacctggtgtcctgcgcctaccaggtggcccgaggcatggagtatctggcctccaagaagtgcatacaccgagacctggcagccaggaatgtcctggtgacagaggacaatgtgatgaagatagcagactttggcctcgcacgggacattcaccacatcgactactataaaaagacaaccaacggccgactgcctgtgaagtggatggcacccgaggcattatttgaccggatctacacccaccagagtgatgtgtggtctttcggggtgctcctgtgggagatcttcactctgggcggctccccataccccggtgtgcctgtggaggaacttttcaagctgctgaaggagggtcaccgcatggacaagcccagtaactgcaccaacgagctgtacatgatgatgcgggactgctggcatgcagtgccctcacagagacccaccttcaagcagctggtggaagacctggaccgcatcgtggccttgacctccaaccaggagtacctggacctgtccatgcccctggaccagtactcccccagctttcccgacacccggagctctacgtgctcctcaggggaggattccgtcttctctcatgagccgctgcccgaggagccctgcctgccccgacacccagcccagcttgccaatggcggactcaaacgccgctgactgccacccacacgccctccccagactccaccgtcagctgtaaccctcacccacagcccctgctgggcccaccacctgtccgtccctgtcccctttcctgctggcaggagccggctgcctaccaggggccttcctgtgtggcctgccttcaccccactcagctcacctctccctccacctcctctccacctgctggtgagaggtgcaaagaggcagatctttgctgccagccacttcatcccctcccagatgttggaccaacaccccttccctgccaccaggcactgcctggagggcagggagtgggagccaatgaacaggcatgcaagtgagagcttcctgagctttctcctgtcggtttggtctgttttgccttcacccataagcccctcgcactctggtggcaggtgccttgtcctcagggctacagcagtagggaggtcagtgcttcgtgcctcgattgaaggtgacctctgccccagataggtggtgccagtggcttattaattccgatactagtttgctttgctgaccaaatgcctggtaccagaggatggtgaggcgaaggccaggttgggggcagtgttgtggccctggggcccagccccaaactgggggctctgtatatagctatgaagaaaacacaaagtgtataaatctgagtatatatttacatgtctttttaaaagggtcgttaccagagatttacccatcgggtaagatgctcctggtggctgggaggcatcagttgctatatattaaaaacaaaaaagaaaaaaaaggaaaatgtttttaaaaaggtcatatattttttgctacttttgctgttttatttttttaaattatgttctaaacctattttcagtttaggtccctcaataaaaattgctgctgcttcaaaaaaaagatcacgaaagtcagagagaccacacaaacacacaagtgtgggcagcccgcttcagcgaagtacagcgg

SEQ ID NO: 305698 - DNA, 5439 bp, Homo sapiens
gcatagcgctcggagcctcttgcggccacaggcgcggcgtcctcggcggcgggcggcagctagcgggagccgggacgccggtgcagccgcagcgcgcggaggaacccgggtgtgccgggagctgggcggccacgtccggacgggaccgagacccctcgtagcgcattgcggcgacctcgccttccccggccgcgagcgcgccgctgcttgaaaagccgcggaacccaaggacttttctccggtccgagctcggggcgccccgcaggcgcacggtacccgtgctgcagtcgggcacgccgcggcgccgggggcctccgcagggcgatggagcccggtctgcaaggaaagtgaggcgccgccgctgcgttctggaggaggggggcacaaggtctggagaccccgggtggcggacgggagccctccccccgccccgcctccggggcaccagctccggctccattgttcccgcccgggctggaggcgccgagcaccgagcgccgccgggagtcgagcgccggccgcggagctcttgcgaccccgccaggacccgaacagagcccgggggcggcgggccggagccggggacgcgggcacacgcccgctcgcacaagccacggcggactctcccgaggcggaacctccacgccgagcgagggtcagtttgaaaaggaggatcgagctcactgtggagtatccatggagatgtggagccttgtcaccaacctctaactgcagaactgggatgtggagctggaagtgcctcctcttctgggctgtgctggtcacagccacactctgcaccgctaggccgtccccgaccttgcctgaacaagatgctctcccctcctcggaggatgatgatgatgatgatgactcctcttcagaggagaaagaaacagataacaccaaaccaaaccgtatgcccgtagctccatattggacatccccagaaaagatggaaaagaaattgcatgcagtgccggctgccaagacagtgaagttcaaatgcccttccagtgggaccccaaaccccacactgcgctggttgaaaaatggcaaagaattcaaacctgaccacagaattggaggctacaaggtccgttatgccacctggagcatcataatggactctgtggtgccctctgacaagggcaactacacctgcattgtggagaatgagtacggcagcatcaaccacacataccagctggatgtcgtggagcggtcccctcaccggcccatcctgcaagcagggttgcccgccaacaaaacagtggccctgggtagcaacgtggagttcatgtgtaaggtgtacagtgacccgcagccgcacatccagtggctaaagcacatcgaggtgaatgggagcaagattggcccagacaacctgccttatgtccagatcttgaagactgctggagttaataccaccgacaaagagatggaggtgcttcacttaagaaatgtctcctttgaggacgcaggggagtatacgtgcttggcgggtaactctatcggactctcccatcactctgcatggttgaccgttctggaagccctggaagagaggccggcagtgatgacctcgcccctgtacctggagatcatcatctattgcacaggggccttcctcatctcctgcatggtggggtcggtcatcgtctacaagatgaagagtggtaccaagaagagtgacttccacagccagatggctgtgcacaagctggccaagagcatccctctgcgcagacaggtaacagtgtctgctgactccagtgcatccatgaactctggggttcttctggttcggccatcacggctctcctccagtgggactcccatgctagcaggggtctctgagtatgagcttcccgaagaccctcgctgggagctgcctcgggacagactggtcttaggcaaacccctgggagagggctgctttgggcaggtggtgttggcagaggctatcgggctggacaaggacaaacccaaccgtgtgaccaaagtggctgtgaagatgttgaagtcggacgcaacagagaaagacttgtcagacctgatctcagaaatggagatgatgaagatgatcgggaagcataagaatatcatcaacctgctgggggcctgcacgcaggatggtcccttgtatgtcatcgtggagtatgcctccaagggcaacctgcgggagtacctgcaggcccggaggcccccagggctggaatactgctacaaccccagccacaacccagaggagcagctctcctccaaggacctggtgtcctgcgcctaccaggtggcccgaggcatggagtatctggcctccaagaagtgcatacaccgagacctggcagccaggaatgtcctggtgacagaggacaatgtgatgaagatagcagactttggcctcgcacgggacattcaccacatcgactactataaaaagacaaccaacggccgactgcctgtgaagtggatggcacccgaggcattatttgaccggatctacacccaccagagtgatgtgtggtctttcggggtgctcctgtgggagatcttcactctgggcggctccccataccccggtgtgcctgtggaggaacttttcaagctgctgaaggagggtcaccgcatggacaagcccagtaactgcaccaacgagctgtacatgatgatgcgggactgctggcatgcagtgccctcacagagacccaccttcaagcagctggtggaagacctggaccgcatcgtggccttgacctccaaccaggagtacctggacctgtccatgcccctggaccagtactcccccagctttcccgacacccggagctctacgtgctcctcaggggaggattccgtcttctctcatgagccgctgcccgaggagccctgcctgccccgacacccagcccagcttgccaatggcggactcaaacgccgctgactgccacccacacgccctccccagactccaccgtcagctgtaaccctcacccacagcccctgctgggcccaccacctgtccgtccctgtcccctttcctgctggcaggagccggctgcctaccaggggccttcctgtgtggcctgccttcaccccactcagctcacctctccctccacctcctctccacctgctggtgagaggtgcaaagaggcagatctttgctgccagccacttcatcccctcccagatgttggaccaacaccccttccctgccaccaggcactgcctggagggcagggagtgggagccaatgaacaggcatgcaagtgagagcttcctgagctttctcctgtcggtttggtctgttttgccttcacccataagcccctcgcactctggtggcaggtgccttgtcctcagggctacagcagtagggaggtcagtgcttcgtgcctcgattgaaggtgacctctgccccagataggtggtgccagtggcttattaattccgatactagtttgctttgctgaccaaatgcctggtaccagaggatggtgaggcgaaggccaggttgggggcagtgttgtggccctggggcccagccccaaactgggggctctgtatatagctatgaagaaaacacaaagtgtataaatctgagtatatatttacatgtctttttaaaagggtcgttaccagagatttacccatcgggtaagatgctcctggtggctgggaggcatcagttgctatatattaaaaacaaaaaagaaaaaaaaggaaaatgtttttaaaaaggtcatatattttttgctacttttgctgttttatttttttaaattatgttctaaacctattttcagtttaggtccctcaataaaaattgctgctgcttcatttatctatgggctgtatgaaaagggtgggaatgtccactggaaagaagggacacccacgggccctggggctaggtctgtcccgagggcaccgcatgctcccggcgcaggttccttgtaacctcttcttcctaggtcctgcacccagacctcacgacgcacctcctgcctctccgctgcttttggaaagtcagaaaaagaagatgtctgcttcgagggcaggaaccccatccatgcagtagaggcgctgggcagagagtcaaggcccagcagccatcgaccatggatggtttcctccaaggaaaccggtggggttgggctggggagggggcacctacctaggaatagccacggggtagagctacagtgatttaagaggaaagcaagggcgcggttgctcacgcctgtaatcccagcactttgggacaccgaggtgggcagatcacttcaggtcaggagtttgagaccagcctggccaacttagtgaaaccccatctctactaaaaatgcaaaaattatccaggcatggtggcacacgcctgtaatcccagctccacaggaggctgaggcagaatcccttgaagctgggaggcggaggttgcagtgagccgagattgcgccattgcactccagcctgggcaacagagaaaacaaaaaggaaaacaaatgatgaaggtctgcagaaactgaaacccagacatgtgtctgccccctctatgtgggcatggttttgccagtgcttctaagtgcaggagaacatgtcacctgaggctagttttgcattcaggtccctggcttcgtttcttgttggtatgcctccccagatcgtccttcctgtatccatgtgaccagactgtatttgttgggactgtcgcagatcttggcttcttacagttcttcctgtccaaactccatcctgtccctcaggaacggggggaaaattctccgaatgtttttggttttttggctgcttggaatttacttctgccacctgctggtcatcactgtcctcactaagtggattctggctcccccgtacctcatggctcaaactaccactcctcagtcgctatattaaagcttatattttgctggattactgctaaatacaaaagaaagttcaatatgttttcatttctgtagggaaaatgggattgctgctttaaatttctgagctagggattttttggcagctgcagtgttggcgactattgtaaaattctctttgtttctctctgtaaatagcacctgctaacattacaatttgtatttatgtttaaagaaggcatcatttggtgaacagaactaggaaatgaatttttagctcttaaaagcatttgctttgagaccgcacaggagtgtctttccttgtaaaacagtgatgataatttctgccttggccctaccttgaagcaatgttgtgtgaagggatgaagaatctaaaagtcttcataagtccttgggagaggtgctagaaaaatataaggcactatcataattacagtgatgtccttgctgttactactcaaatcacccacaaatttccccaaagactgcgctagctgtcaaataaaagacagtgaaattgacctgagag

SEQ ID NO: 305699 - DNA, 3843 bp, Homo sapiens
gcatagcgctcggagcctcttgcggccacaggcgcggcgtcctcggcggcgggcggcagctagcgggagccgggacgccggtgcagccgcagcgcgcggaggaacccgggtgtgccgggagctgggcggccacgtccggacgggaccgagacccctcgtagcgcattgcggcgacctcgccttccccggccgcgagcgcgccgctgcttgaaaagccgcggaacccaaggacttttctccggtccgagctcggggcgccccgcaggcgcacggtacccgtgctgcagtcgggcacgccgcggcgccgggggcctccgcagggcgatggagcccggtctgcaaggaaagtgaggcgccgccgctgcgttctggaggaggggggcacaaggtctggagaccccgggtggcggacgggagccctccccccgccccgcctccggggcaccagctccggctccattgttcccgcccgggctggaggcgccgagcaccgagcgccgccgggagtcgagcgccggccgcggagctcttgcgaccccgccaggacccgaacagagcccgggggcggcgggccggagccggggacgcgggcacacgcccgctcgcacaagccacggcggactctcccgaggcggaacctccacgccgagcgagggtcagtttgaaaaggaggatcgagctcactgtggagtatccatggagatgtggagccttgtcaccaacctctaactgcagaactgggatgtggagctggaagtgcctcctcttctgggctgtgctggtcacagccacactctgcaccgctaggccgtccccgaccttgcctgaacaagatgctctcccctcctcggaggatgatgatgatgatgatgactcctcttcagaggagaaagaaacagataacaccaaaccaaaccgtatgcccgtagctccatattggacatccccagaaaagatggaaaagaaattgcatgcagtgccggctgccaagacagtgaagttcaaatgcccttccagtgggaccccaaaccccacactgcgctggttgaaaaatggcaaagaattcaaacctgaccacagaattggaggctacaaggtccgttatgccacctggagcatcataatggactctgtggtgccctctgacaagggcaactacacctgcattgtggagaatgagtacggcagcatcaaccacacataccagctggatgtcgtggagcggtcccctcaccggcccatcctgcaagcagggttgcccgccaacaaaacagtggccctgggtagcaacgtggagttcatgtgtaaggtgtacagtgacccgcagccgcacatccagtggctaaagcacatcgaggtgaatgggagcaagattggcccagacaacctgccttatgtccagatcttgaagactgctggagttaataccaccgacaaagagatggaggtgcttcacttaagaaatgtctcctttgaggacgcaggggagtatacgtgcttggcgggtaactctatcggactctcccatcactctgcatggttgaccgttctggaagccctggaagagaggccggcagtgatgacctcgcccctgtacctggagatcatcatctattgcacaggggccttcctcatctcctgcatggtggggtcggtcatcgtctacaagatgaagagtggtaccaagaagagtgacttccacagccagatggctgtgcacaagctggccaagagcatccctctgcgcagacaggtaacagtgtctgctgactccagtgcatccatgaactctggggttcttctggttcggccatcacggctctcctccagtgggactcccatgctagcaggggtctctgagtatgagcttcccgaagaccctcgctgggagctgcctcgggacagactggtcttaggcaaacccctgggagagggctgctttgggcaggtggtgttggcagaggctatcgggctggacaaggacaaacccaaccgtgtgaccaaagtggctgtgaagatgttgaagtcggacgcaacagagaaagacttgtcagacctgatctcagaaatggagatgatgaagatgatcgggaagcataagaatatcatcaacctgctgggggcctgcacgcaggatggtcccttgtatgtcatcgtggagtatgcctccaagggcaacctgcgggagtacctgcaggcccggaggcccccagggctggaatactgctacaaccccagccacaacccagaggagcagctctcctccaaggacctggtgtcctgcgcctaccaggtggcccgaggcatggagtatctggcctccaagaagtgcatacaccgagacctggcagccaggaatgtcctggtgacagaggacaatgtgatgaagatagcagactttggcctcgcacgggacattcaccacatcgactactataaaaagacaaccaacggccgactgcctgtgaagtggatggcacccgaggcattatttgaccggatctacacccaccagagtgatgtgtggtctttcggggtgctcctgtgggagatcttcactctgggcggctccccataccccggtgtgcctgtggaggaacttttcaagctgctgaaggagggtcaccgcatggacaagcccagtaactgcaccaacgagctgtacatgatgatgcgggactgctggcatgcagtgccctcacagagacccaccttcaagcagctggtggaagacctggaccgcatcgtggccttgacctccaaccaggagtacctggacctgtccatgcccctggaccagtactcccccagctttcccgacacccggagctctacgtgctcctcaggggaggattccgtcttctctcatgagccgctgcccgaggagccctgcctgccccgacacccagcccagcttgccaatggcggactcaaacgccgctgactgccacccacacgccctccccagactccaccgtcagctgtaaccctcacccacagcccctgctgggcccaccacctgtccgtccctgtcccctttcctgctggcaggagccggctgcctaccaggggccttcctgtgtggcctgccttcaccccactcagctcacctctccctccacctcctctccacctgctggtgagaggtgcaaagaggcagatctttgctgccagccacttcatcccctcccagatgttggaccaacaccccttccctgccaccaggcactgcctggagggcagggagtgggagccaatgaacaggcatgcaagtgagagcttcctgagctttctcctgtcggtttggtctgttttgccttcacccataagcccctcgcactctggtggcaggtgccttgtcctcagggctacagcagtagggaggtcagtgcttcgtgcctcgattgaaggtgacctctgccccagataggtggtgccagtggcttattaattccgatactagtttgctttgctgaccaaatgcctggtaccagaggatggtgaggcgaaggccaggttgggggcagtgttgtggccctggggcccagccccaaactgggggctctgtatatagctatgaagaaaacacaaagtgtataaatctgagtatatatttacatgtctttttaaaagggtcgttaccagagatttacccatcgggtaagatgctcctggtggctgggaggcatcagttgctatatattaaaaacaaaaaagaaaaaaaaggaaaatgtttttaaaaaggtcatatattttttgctacttttgctgttttatttttttaaattatgttctaaacctattttcagtttaggtccctcaataaaaattgctgctgcttca

SEQ ID NO: 305700 - DNA, 4188 bp, Homo sapiens
  misc_feature (3861)..(3861): n is a, c, g, or t
  misc_feature (3866)..(3866): n is a, c, g, or t
  misc_feature (3870)..(3870): n is a, c, g, or t
gcatagcgctcggagcctcttgcggccacaggcgcggcgtcctcggcggcgggcggcagctagcgggagccgggacgccggtgcagccgcagcgcgcggaggaacccgggtgtgccgggagctgggcggccacgtccggacgggaccgagacccctcgtagcgcattgcggcgacctcgccttccccggccgcgagcgcgccgctgcttgaaaagccgcggaacccaaggacttttctccggtccgagctcggggcgccccgcaggcgcacggtacccgtgctgcagtcgggcacgccgcggcgccgggggcctccgcagggcgatggagcccggtctgcaaggaaagtgaggcgccgccgctgcgttctggaggaggggggcacaaggtctggagaccccgggtggcggacgggagccctccccccgccccgcctccggggcaccagctccggctccattgttcccgcccgggctggaggcgccgagcaccgagcgccgccgggagtcgagcgccggccgcggagctcttgcgaccccgccaggacccgaacagagcccgggggcggcgggccggagccggggacgcgggcacacgcccgctcgcacaagccacggcggactctcccgaggcggaacctccacgccgagcgagggtcagtttgaaaaggaggatcgagctcactgtggagtatccatggagatgtggagccttgtcaccaacctctaactgcagaactgggatgtggagctggaagtgcctcctcttctgggctgtgctggtcacagccacactctgcaccgctaggccgtccccgaccttgcctgaacaagatgctctcccctcctcggaggatgatgatgatgatgatgactcctcttcagaggagaaagaaacagataacaccaaaccaaaccgtatgcccgtagctccatattggacatccccagaaaagatggaaaagaaattgcatgcagtgccggctgccaagacagtgaagttcaaatgcccttccagtgggaccccaaaccccacactgcgctggttgaaaaatggcaaagaattcaaacctgaccacagaattggaggctacaaggtccgttatgccacctggagcatcataatggactctgtggtgccctctgacaagggcaactacacctgcattgtggagaatgagtacggcagcatcaaccacacataccagctggatgtcgtggagcggtcccctcaccggcccatcctgcaagcagggttgcccgccaacaaaacagtggccctgggtagcaacgtggagttcatgtgtaaggtgtacagtgacccgcagccgcacatccagtggctaaagcacatcgaggtgaatgggagcaagattggcccagacaacctgccttatgtccagatcttgaagactgctggagttaataccaccgacaaagagatggaggtgcttcacttaagaaatgtctcctttgaggacgcaggggagtatacgtgcttggcgggtaactctatcggactctcccatcactctgcatggttgaccgttctggaagccctggaagagaggccggcagtgatgacctcgcccctgtacctggagatcatcatctattgcacaggggccttcctcatctcctgcatggtggggtcggtcatcgtctacaagatgaagagtggtaccaagaagagtgacttccacagccagatggctgtgcacaagctggccaagagcatccctctgcgcagacaggtaacagtgtctgctgactccagtgcatccatgaactctggggttcttctggttcggccatcacggctctcctccagtgggactcccatgctagcaggggtctctgagtatgagcttcccgaagaccctcgctgggagctgcctcgggacagactggtcttaggcaaacccctgggagagggctgctttgggcaggtggtgttggcagaggctatcgggctggacaaggacaaacccaaccgtgtgaccaaagtggctgtgaagatgttgaagtcggacgcaacagagaaagacttgtcagacctgatctcagaaatggagatgatgaagatgatcgggaagcataagaatatcatcaacctgctgggggcctgcacgcaggatggtcccttgtatgtcatcgtggagtatgcctccaagggcaacctgcgggagtacctgcaggcccggaggcccccagggctggaatactgctacaaccccagccacaacccagaggagcagctctcctccaaggacctggtgtcctgcgcctaccaggtggcccgaggcatggagtatctggcctccaagaagtgcatacaccgagacctggcagccaggaatgtcctggtgacagaggacaatgtgatgaagatagcagactttggcctcgcacgggacattcaccacatcgactactataaaaagacaaccaacggccgactgcctgtgaagtggatggcacccgaggcattatttgaccggatctacacccaccagagtgatgtgtggtctttcggggtgctcctgtgggagatcttcactctgggcggctccccataccccggtgtgcctgtggaggaacttttcaagctgctgaaggagggtcaccgcatggacaagcccagtaactgcaccaacgagctgtacatgatgatgcgggactgctggcatgcagtgccctcacagagacccaccttcaagcagctggtggaagacctggaccgcatcgtggccttgacctccaaccaggagtacctggacctgtccatgcccctggaccagtactcccccagctttcccgacacccggagctctacgtgctcctcaggggaggattccgtcttctctcatgagccgctgcccgaggagccctgcctgccccgacacccagcccagcttgccaatggcggactcaaacgccgctgactgccacccacacgccctccccagactccaccgtcagctgtaaccctcacccacagcccctgctgggcccaccacctgtccgtccctgtcccctttcctgctggcaggagccggctgcctaccaggggccttcctgtgtggcctgccttcaccccactcagctcacctctccctccacctcctctccacctgctggtgagaggtgcaaagaggcagatctttgctgccagccacttcatcccctcccagatgttggaccaacaccccttccctgccaccaggcactgcctggagggcagggagtgggagccaatgaacaggcatgcaagtgagagcttcctgagctttctcctgtcggtttggtctgttttgccttcacccataagcccctcgcactctggtggcaggtgccttgtcctcagggctacagcagtagggaggtcagtgcttcgtgcctcgattgaaggtgacctctgccccagataggtggtgccagtggcttattaattccgatactagtttgctttgctgaccaaatgcctggtaccagaggatggtgaggcgaaggccaggttgggggcagtgttgtggccctggggcccagccccaaactgggggctctgtatatagctatgaagaaaacacaaagtgtataaatctgagtatatatttacatgtctttttaaaagggtcgttaccagagatttacccatcgggtaagatgctcctggtggctgggaggcatcagttgctatatattaaaaacaaaaaagaaaaaaaaggaaaatgtttttaaaaaggtcatatattttttgctacttttgctgttttatttttttaaattatgttctaaacctattttcagtttaggtccctcaataaaaattgctgctgcttcaaaaaaaaaaaaaaaaaanaaaanaaanaaaaaaaaaaaaaaaaaaagggggggggggctaaaaatttccccggggggggcccaattttgggtgtcccggttttttgggaaaagggggggcccatattgggaggcgtggatattatagactgaaggcgtggggcgcgggtgtgtttaaaaaagttgtgaagcggggaaaccactggtgactgtgggaatgtggggagagggaacccctacttggtgggggggcaatactggggacaactcccttgagaggatttaaggctcagggagcaactataactttgagggttaataggggttcagccagcgtatttagctc

SEQ ID NO: 305701 - DNA, 6598 bp, Homo sapiens
gcatagcgctcggagcctcttgcggccacaggcgcggcgtcctcggcggcgggcggcagctagcgggagccgggacgccggtgcagccgcagcgcgcggaggaacccgggtgtgccgggagctgggcggccacgtccggacgggaccgagacccctcgtagcgcattgcggcgacctcgccttccccggccgcgagcgcgccgctgcttgaaaagccgcggaacccaaggacttttctccggtccgagctcggggcgccccgcaggcgcacggtacccgtgctgcagtcgggcacgccgcggcgccgggggcctccgcagggcgatggagcccggtctgcaaggaaagtgaggcgccgccgctgcgttctggaggaggggggcacaaggtctggagaccccgggtggcggacgggagccctccccccgccccgcctccggggcaccagctccggctccattgttcccgcccgggctggaggcgccgagcaccgagcgccgccgggagtcgagcgccggccgcggagctcttgcgaccccgccaggacccgaacagagcccgggggcggcgggccggagccggggacgcgggcacacgcccgctcgcacaagccacggcggactctcccgaggcggaacctccacgccgagcgagggtcagtttgaaaaggaggatcgagctcactgtggagtatccatggagatgtggagccttgtcaccaacctctaactgcagaactgggatgtggagctggaagtgcctcctcttctgggctgtgctggtcacagccacactctgcaccgctaggccgtccccgaccttgcctgaacaagatgctctcccctcctcggaggatgatgatgatgatgatgactcctcttcagaggagaaagaaacagataacaccaaaccaaaccgtatgcccgtagctccatattggacatccccagaaaagatggaaaagaaattgcatgcagtgccggctgccaagacagtgaagttcaaatgcccttccagtgggaccccaaaccccacactgcgctggttgaaaaatggcaaagaattcaaacctgaccacagaattggaggctacaaggtccgttatgccacctggagcatcataatggactctgtggtgccctctgacaagggcaactacacctgcattgtggagaatgagtacggcagcatcaaccacacataccagctggatgtcgtggagcggtcccctcaccggcccatcctgcaagcagggttgcccgccaacaaaacagtggccctgggtagcaacgtggagttcatgtgtaaggtgtacagtgacccgcagccgcacatccagtggctaaagcacatcgaggtgaatgggagcaagattggcccagacaacctgccttatgtccagatcttgaagactgctggagttaataccaccgacaaagagatggaggtgcttcacttaagaaatgtctcctttgaggacgcaggggagtatacgtgcttggcgggtaactctatcggactctcccatcactctgcatggttgaccgttctggaagccctggaagagaggccggcagtgatgacctcgcccctgtacctggagatcatcatctattgcacaggggccttcctcatctcctgcatggtggggtcggtcatcgtctacaagatgaagagtggtaccaagaagagtgacttccacagccagatggctgtgcacaagctggccaagagcatccctctgcgcagacaggtaacagaaagtagatgggggatttgcacactcagcaccacctctctctctgggcctctaatgccctgccctctccattgtccctaatttatagctttgggccttattttctggcttctgggcaaggcacagaggaatatcatgaactaagtgctctagagtctgtttcaagctagtgtagcccgtgaatttcctgcaccctccatatcacactgcaagtcctccggactcctgggacatggattgggaggaagtcctatttggacagaatgtgcagccaatagcatgaatttgaactgtccccaagggctgcttagaagtgcagagatgcagggtagagaagagaactgtttgtattagtccattttcacactgctgagaaagacatacccaagaccgggcaatttacaaaagaaagaggtttaatggactcacagttccacgtggctggggaggcctcacaattgcagaaggcaaaaggcacgtctcacatggcggcagacgagaagagagcttgtacagggaaactcccctttataaaatcatcagatctcgtgagatttattcactatcacaagaacagcacagggaagacctgcccccatgagtcaatgacctcctaccaggtccctcccataacacgtgggaattcaagatgagatttgggtggggacacagccaaaccatctcagccataccatacccttgtcccctgtgtgcccacccttccccacgggaggaaatggtacagatggcacaggtgtgtgcaagaatgaccgttccctcagaagcctgtgctcattctggaaggtgctttgggagttaggaatccataagctaaggcaaagtatttgcaaagagtcaggagaacagagttgttactgcaatgatcagttataaaatgtcaagctggaagaggtgcatttggtctgcttattttaaaggtgagtgaagtccagaaaggccagcttgtggcagaaataggtcagtcctagaagttgggcctcctggcctaccatggtctttggaccactctgtgttgaggaaagaacatcagatacacagacatgtgcctctgccattgttgggaagccctgactaagaatgggaaggagtcaccccgtcccccttccttgctctagggtgaccccacacttccttgcaggtgtctgctgactccagtgcatccatgaactctggggttcttctggttcggccatcacggctctcctccagtgggactcccatgctagcaggggtctctgagtatgagcttcccgaagaccctcgctgggagctgcctcgggacagactggtcttaggcaaacccctgggagagggctgctttgggcaggtggtgttggcagaggctatcgggctggacaaggacaaacccaaccgtgtgaccaaagtggctgtgaagatgttgaagtcggacgcaacagagaaagacttgtcagacctgatctcagaaatggagatgatgaagatgatcgggaagcataagaatatcatcaacctgctgggggcctgcacgcaggatggtcccttgtatgtcatcgtggagtatgcctccaagggcaacctgcgggagtacctgcaggcccggaggcccccagggctggaatactgctacaaccccagccacaacccagaggagcagctctcctccaaggacctggtgtcctgcgcctaccaggtggcccgaggcatggagtatctggcctccaagaagtgcatacaccgagacctggcagccaggaatgtcctggtgacagaggacaatgtgatgaagatagcagactttggcctcgcacgggacattcaccacatcgactactataaaaagacaaccaacggccgactgcctgtgaagtggatggcacccgaggcattatttgaccggatctacacccaccagagtgatgtgtggtctttcggggtgctcctgtgggagatcttcactctgggcggctccccataccccggtgtgcctgtggaggaacttttcaagctgctgaaggagggtcaccgcatggacaagcccagtaactgcaccaacgagctgtacatgatgatgcgggactgctggcatgcagtgccctcacagagacccaccttcaagcagctggtggaagacctggaccgcatcgtggccttgacctccaaccaggagtacctggacctgtccatgcccctggaccagtactcccccagctttcccgacacccggagctctacgtgctcctcaggggaggattccgtcttctctcatgagccgctgcccgaggagccctgcctgccccgacacccagcccagcttgccaatggcggactcaaacgccgctgactgccacccacacgccctccccagactccaccgtcagctgtaaccctcacccacagcccctgctgggcccaccacctgtccgtccctgtcccctttcctgctggcaggagccggctgcctaccaggggccttcctgtgtggcctgccttcaccccactcagctcacctctccctccacctcctctccacctgctggtgagaggtgcaaagaggcagatctttgctgccagccacttcatcccctcccagatgttggaccaacaccccttccctgccaccaggcactgcctggagggcagggagtgggagccaatgaacaggcatgcaagtgagagcttcctgagctttctcctgtcggtttggtctgttttgccttcacccataagcccctcgcactctggtggcaggtgccttgtcctcagggctacagcagtagggaggtcagtgcttcgtgcctcgattgaaggtgacctctgccccagataggtggtgccagtggcttattaattccgatactagtttgctttgctgaccaaatgcctggtaccagaggatggtgaggcgaaggccaggttgggggcagtgttgtggccctggggcccagccccaaactgggggctctgtatatagctatgaagaaaacacaaagtgtataaatctgagtatatatttacatgtctttttaaaagggtcgttaccagagatttacccatcgggtaagatgctcctggtggctgggaggcatcagttgctatatattaaaaacaaaaaagaaaaaaaaggaaaatgtttttaaaaaggtcatatattttttgctacttttgctgttttatttttttaaattatgttctaaacctattttcagtttaggtccctcaataaaaattgctgctgcttcatttatctatgggctgtatgaaaagggtgggaatgtccactggaaagaagggacacccacgggccctggggctaggtctgtcccgagggcaccgcatgctcccggcgcaggttccttgtaacctcttcttcctaggtcctgcacccagacctcacgacgcacctcctgcctctccgctgcttttggaaagtcagaaaaagaagatgtctgcttcgagggcaggaaccccatccatgcagtagaggcgctgggcagagagtcaaggcccagcagccatcgaccatggatggtttcctccaaggaaaccggtggggttgggctggggagggggcacctacctaggaatagccacggggtagagctacagtgatttaagaggaaagcaagggcgcggttgctcacgcctgtaatcccagcactttgggacaccgaggtgggcagatcacttcaggtcaggagtttgagaccagcctggccaacttagtgaaaccccatctctactaaaaatgcaaaaattatccaggcatggtggcacacgcctgtaatcccagctccacaggaggctgaggcagaatcccttgaagctgggaggcggaggttgcagtgagccgagattgcgccattgcactccagcctgggcaacagagaaaacaaaaaggaaaacaaatgatgaaggtctgcagaaactgaaacccagacatgtgtctgccccctctatgtgggcatggttttgccagtgcttctaagtgcaggagaacatgtcacctgaggctagttttgcattcaggtccctggcttcgtttcttgttggtatgcctccccagatcgtccttcctgtatccatgtgaccagactgtatttgttgggactgtcgcagatcttggcttcttacagttcttcctgtccaaactccatcctgtccctcaggaacggggggaaaattctccgaatgtttttggttttttggctgcttggaatttacttctgccacctgctggtcatcactgtcctcactaagtggattctggctcccccgtacctcatggctcaaactaccactcctcagtcgctatattaaagcttatattttgctggattactgctaaatacaaaagaaagttcaatatgttttcatttctgtagggaaaatgggattgctgctttaaatttctgagctagggattttttggcagctgcagtgttggcgactattgtaaaattctctttgtttctctctgtaaatagcacctgctaacattacaatttgtatttatgtttaaagaaggcatcatttggtgaacagaactaggaaatgaatttttagctcttaaaagcatttgctttgagaccgcacaggagtgtctttccttgtaaaacagtgatgataatttctgccttggccctaccttgaagcaatgttgtgtgaagggatgaagaatctaaaagtcttcataagtccttgggagaggtgctagaaaaatataaggcactatcataattacagtgatgtccttgctgttactactcaaatcacccacaaatttccccaaagactgcgctagctgtcaaataaaagacagtgaaattgacctgagag

SEQ ID NO: 305702 - DNA, 5567 bp, Homo sapiens
gcatagcgctcggagcctcttgcggccacaggcgcggcgtcctcggcggcgggcggcagctagcgggagccgggacgccggtgcagccgcagcgcgcggaggaacccgggtgtgccgggagctgggcggccacgtccggacgggaccgagacccctcgtagcgcattgcggcgacctcgccttccccggccgcgagcgcgccgctgcttgaaaagccgcggaacccaaggacttttctccggtccgagctcggggcgccccgcaggcgcacggtacccgtgctgcagtcgggcacgccgcggcgccgggggcctccgcagggcgatggagcccggtctgcaaggaaagtgaggcgccgccgctgcgttctggaggaggggggcacaaggtctggagaccccgggtggcggacgggagccctccccccgccccgcctccggggcaccagctccggctccattgttcccgcccgggctggaggcgccgagcaccgagcgccgccgggagtcgagcgccggccgcggagctcttgcgaccccgccaggacccgaacagagcccgggggcggcgggccggagccggggacgcgggcacacgcccgctcgcacaagccacggcggactctcccgaggcggaacctccacgccgagcgagggtcagtttgaaaaggaggatcgagctcactgtggagtatccatggagatgtggagccttgtcaccaacctctaactgcagaactgggatgtggagctggaagtgcctcctcttctgggctgtgctggtcacagccacactctgcaccgctaggccgtccccgaccttgcctgaacaagatgctctcccctcctcggaggatgatgatgatgatgatgactcctcttcagaggagaaagaaacagataacaccaaaccaaaccgtatgcccgtagctccatattggacatccccagaaaagatggaaaagaaattgcatgcagtgccggctgccaagacagtgaagttcaaatgcccttccagtgggaccccaaaccccacactgcgctggttgaaaaatggcaaagaattcaaacctgaccacagaattggaggctacaaggtccgttatgccacctggagcatcataatggactctgtggtgccctctgacaagggcaactacacctgcattgtggagaatgagtacggcagcatcaaccacacataccagctggatgtcgtggagcggtcccctcaccggcccatcctgcaagcagggttgcccgccaacaaaacagtggccctgggtagcaacgtggagttcatgtgtaaggtgtacagtgacccgcagccgcacatccagtggctaaagcacatcgaggtgaatgggagcaagattggcccagacaacctgccttatgtccagatcttgaagactgctggagttaataccaccgacaaagagatggaggtgcttcacttaagaaatgtctcctttgaggacgcaggggagtatacgtgcttggcgggtaactctatcggactctcccatcactctgcatggttgaccgttctggaagccctggaagagaggccggcagtgatgacctcgcccctgtacctggagatcatcatctattgcacaggggccttcctcatctcctgcatggtggggtcggtcatcgtctacaagatgaagagtggtaccaagaagagtgacttccacagccagatggctgtgcacaagctggccaagagcatccctctgcgcagacaggtaacagtgtctgctgactccagtgcatccatgaactctggggttcttctggttcggccatcacggctctcctccagtgggactcccatgctagcaggggtctctgagtatgagcttcccgaagaccctcgctgggagctgcctcgggacagactggtcttaggcaaacccctgggagagggctgctttgggcaggtggtgttggcagaggctatcgggctggacaaggacaaacccaaccgtgtgaccaaagtggctgtgaagatgttgaagtcggacgcaacagagaaagacttgtcagacctgatctcagaaatggagatgatgaagatgatcgggaagcataagaatatcatcaacctgctgggggcctgcacgcaggatggtcccttgtatgtcatcgtggagtatgcctccaagggcaacctgcgggagtacctgcaggcccggaggcccccagggctggaatactgctacaaccccagccacaacccagaggagcagctctcctccaaggacctggtgtcctgcgcctaccaggtggcccgaggcatggagtatctggcctccaagaagtgcatacaccgagacctggcagccaggaatgtcctggtgacagaggacaatgtgatgaagatagcagactttggcctcgcacgggacattcaccacatcgactactataaaaagacaaccaacggccgactgcctgtgaagtggatggcacccgaggcattatttgaccggatctacacccaccagagtgatgtgtggtctttcggggtgctcctgtgggagatcttcactctgggcggctccccataccccggtgtgcctgtggaggaacttttcaagctgctgaaggagggtcaccgcatggacaagcccagtaactgcaccaacgagctgtaagcccgaggagatgtcggaggccctgagccaggccttggggcaagagtgggcttgaggggcagggggctagactagagagtatccatctccaggagacgtccctgaccttacagtcctgccgcaggtacatgatgatgcgggactgctggcatgcagtgccctcacagagacccaccttcaagcagctggtggaagacctggaccgcatcgtggccttgacctccaaccaggagtacctggacctgtccatgcccctggaccagtactcccccagctttcccgacacccggagctctacgtgctcctcaggggaggattccgtcttctctcatgagccgctgcccgaggagccctgcctgccccgacacccagcccagcttgccaatggcggactcaaacgccgctgactgccacccacacgccctccccagactccaccgtcagctgtaaccctcacccacagcccctgctgggcccaccacctgtccgtccctgtcccctttcctgctggcaggagccggctgcctaccaggggccttcctgtgtggcctgccttcaccccactcagctcacctctccctccacctcctctccacctgctggtgagaggtgcaaagaggcagatctttgctgccagccacttcatcccctcccagatgttggaccaacaccccttccctgccaccaggcactgcctggagggcagggagtgggagccaatgaacaggcatgcaagtgagagcttcctgagctttctcctgtcggtttggtctgttttgccttcacccataagcccctcgcactctggtggcaggtgccttgtcctcagggctacagcagtagggaggtcagtgcttcgtgcctcgattgaaggtgacctctgccccagataggtggtgccagtggcttattaattccgatactagtttgctttgctgaccaaatgcctggtaccagaggatggtgaggcgaaggccaggttgggggcagtgttgtggccctggggcccagccccaaactgggggctctgtatatagctatgaagaaaacacaaagtgtataaatctgagtatatatttacatgtctttttaaaagggtcgttaccagagatttacccatcgggtaagatgctcctggtggctgggaggcatcagttgctatatattaaaaacaaaaaagaaaaaaaaggaaaatgtttttaaaaaggtcatatattttttgctacttttgctgttttatttttttaaattatgttctaaacctattttcagtttaggtccctcaataaaaattgctgctgcttcatttatctatgggctgtatgaaaagggtgggaatgtccactggaaagaagggacacccacgggccctggggctaggtctgtcccgagggcaccgcatgctcccggcgcaggttccttgtaacctcttcttcctaggtcctgcacccagacctcacgacgcacctcctgcctctccgctgcttttggaaagtcagaaaaagaagatgtctgcttcgagggcaggaaccccatccatgcagtagaggcgctgggcagagagtcaaggcccagcagccatcgaccatggatggtttcctccaaggaaaccggtggggttgggctggggagggggcacctacctaggaatagccacggggtagagctacagtgatttaagaggaaagcaagggcgcggttgctcacgcctgtaatcccagcactttgggacaccgaggtgggcagatcacttcaggtcaggagtttgagaccagcctggccaacttagtgaaaccccatctctactaaaaatgcaaaaattatccaggcatggtggcacacgcctgtaatcccagctccacaggaggctgaggcagaatcccttgaagctgggaggcggaggttgcagtgagccgagattgcgccattgcactccagcctgggcaacagagaaaacaaaaaggaaaacaaatgatgaaggtctgcagaaactgaaacccagacatgtgtctgccccctctatgtgggcatggttttgccagtgcttctaagtgcaggagaacatgtcacctgaggctagttttgcattcaggtccctggcttcgtttcttgttggtatgcctccccagatcgtccttcctgtatccatgtgaccagactgtatttgttgggactgtcgcagatcttggcttcttacagttcttcctgtccaaactccatcctgtccctcaggaacggggggaaaattctccgaatgtttttggttttttggctgcttggaatttacttctgccacctgctggtcatcactgtcctcactaagtggattctggctcccccgtacctcatggctcaaactaccactcctcagtcgctatattaaagcttatattttgctggattactgctaaatacaaaagaaagttcaatatgttttcatttctgtagggaaaatgggattgctgctttaaatttctgagctagggattttttggcagctgcagtgttggcgactattgtaaaattctctttgtttctctctgtaaatagcacctgctaacattacaatttgtatttatgtttaaagaaggcatcatttggtgaacagaactaggaaatgaatttttagctcttaaaagcatttgctttgagaccgcacaggagtgtctttccttgtaaaacagtgatgataatttctgccttggccctaccttgaagcaatgttgtgtgaagggatgaagaatctaaaagtcttcataagtccttgggagaggtgctagaaaaatataaggcactatcataattacagtgatgtccttgctgttactactcaaatcacccacaaatttccccaaagactgcgctagctgtcaaataaaagacagtgaaattgacctgagag

SEQ ID NO: 305703 - DNA, 5399 bp, Homo sapiens
gcatagcgctcggagcctcttgcggccacaggcgcggcgtcctcggcggcgggcggcagctagcgggagccgggacgccggtgcagccgcagcgcgcggaggaacccgggtgtgccgggagctgggcggccacgtccggacgggaccgagacccctcgtagcgcattgcggcgacctcgccttccccggccgcgagcgcgccgctgcttgaaaagccgcggaacccaaggacttttctccggtccgagctcggggcgccccgcaggcgcacggtacccgtgctgcagtcgggcacgccgcggcgccgggggcctccgcagggcgatggagcccggtctgcaaggaaagtgaggcgccgccgctgcgttctggaggaggggggcacaaggtctggagaccccgggtggcggacgggagccctccccccgccccgcctccggggcaccagctccggctccattgttcccgcccgggctggaggcgccgagcaccgagcgccgccgggagtcgagcgccggccgcggagctcttgcgaccccgccaggacccgaacagagcccgggggcggcgggccggagccggggacgcgggcacacgcccgctcgcacaagccacggcggactctcccgaggcggaacctccacgccgagcgagggtcagtttgaaaaggaggatcgagctcactgtggagtatccatggagatgtggagccttgtcaccaacctctaactgcagaactgggatgtggagctggaagtgcctcctcttctgggctgtgctggtcacagccacactctgcaccgctaggccgtccccgaccttgcctgaacaagatgctctcccctcctcggaggatgatgatgatgatgatgactcctcttcagaggagaaagaaacagataacaccaaaccaaaccgtatgcccgtagctccatattggacatccccagaaaagatggaaaagaaattgcatgcagtgccggctgccaagacagtgaagttcaaatgcccttccagtgggaccccaaaccccacactgcgctggttgaaaaatggcaaagaattcaaacctgaccacagaattggaggctacaaggtccgttatgccacctggagcatcataatggactctgtggtgccctctgacaagggcaactacacctgcattgtggagaatgagtacggcagcatcaaccacacataccagctggatgtcgtggagcggtcccctcaccggcccatcctgcaagcagggttgcccgccaacaaaacagtggccctgggtagcaacgtggagttcatgtgtaaggtgtacagtgacccgcagccgcacatccagtggctaaagcacatcgaggtgaatgggagcaagattggcccagacaacctgccttatgtccagatcttgaagactgctggagttaataccaccgacaaagagatggaggtgcttcacttaagaaatgtctcctttgaggacgcaggggagtatacgtgcttggcgggtaactctatcggactctcccatcactctgcatggttgaccgttctggaagccctggaagagaggccggcagtgatgacctcgcccctgtacctggagatcatcatctattgcacaggggccttcctcatctcctgcatggtggggtcggtcatcgtctacaagatgaagagtggtaccaagaagagtgacttccacagccagatggctgtgcacaagctggccaagagcatccctctgcgcagacaggtaacagtgtctgctgactccagtgcatccatgaactctggggttcttctggttcggccatcacggctctcctccagtgggactcccatgctagcaggggtctctgagtatgagcttcccgaagaccctcgctgggagctgcctcgggacagactggtcttaggcaaacccctgggagagggctgctttgggcaggtggtgttggcagaggctatcgggctggacaaggacaaacccaaccgtgtgaccaaagtggctgtgaagatgttgaagtcggacgcaacagagaaagacttgtcagacctgatctcagaaatggagatgatgaagatgatcgggaagcataagaatatcatcaacctgctgggggcctgcacgcaggatggtcccttgtatgtcatcgtggagtatgcctccaagggcaacctgcgggagtacctgcaggcccggaggcccccagggctggaatactgctacaaccccagccacaacccagaggagcagctctcctccaaggacctggtgtcctgcgcctaccaggtggcccgaggcatggagtatctggcctccaagaagtgcatacaccgagacctggcagccaggaatgtcctggtgacagaggacaatgtgatgaagatagcagactttggcctcgcacgggacattcaccacatcgactactataaaaagacaaccaacggccgactgcctgtgaagtggatggcacccgaggcattatttgaccggatctacacccaccagagtgatgtggcggctccccataccccggtgtgcctgtggaggaacttttcaagctgctgaaggagggtcaccgcatggacaagcccagtaactgcaccaacgagctgtacatgatgatgcgggactgctggcatgcagtgccctcacagagacccaccttcaagcagctggtggaagacctggaccgcatcgtggccttgacctccaaccaggagtacctggacctgtccatgcccctggaccagtactcccccagctttcccgacacccggagctctacgtgctcctcaggggaggattccgtcttctctcatgagccgctgcccgaggagccctgcctgccccgacacccagcccagcttgccaatggcggactcaaacgccgctgactgccacccacacgccctccccagactccaccgtcagctgtaaccctcacccacagcccctgctgggcccaccacctgtccgtccctgtcccctttcctgctggcaggagccggctgcctaccaggggccttcctgtgtggcctgccttcaccccactcagctcacctctccctccacctcctctccacctgctggtgagaggtgcaaagaggcagatctttgctgccagccacttcatcccctcccagatgttggaccaacaccccttccctgccaccaggcactgcctggagggcagggagtgggagccaatgaacaggcatgcaagtgagagcttcctgagctttctcctgtcggtttggtctgttttgccttcacccataagcccctcgcactctggtggcaggtgccttgtcctcagggctacagcagtagggaggtcagtgcttcgtgcctcgattgaaggtgacctctgccccagataggtggtgccagtggcttattaattccgatactagtttgctttgctgaccaaatgcctggtaccagaggatggtgaggcgaaggccaggttgggggcagtgttgtggccctggggcccagccccaaactgggggctctgtatatagctatgaagaaaacacaaagtgtataaatctgagtatatatttacatgtctttttaaaagggtcgttaccagagatttacccatcgggtaagatgctcctggtggctgggaggcatcagttgctatatattaaaaacaaaaaagaaaaaaaaggaaaatgtttttaaaaaggtcatatattttttgctacttttgctgttttatttttttaaattatgttctaaacctattttcagtttaggtccctcaataaaaattgctgctgcttcatttatctatgggctgtatgaaaagggtgggaatgtccactggaaagaagggacacccacgggccctggggctaggtctgtcccgagggcaccgcatgctcccggcgcaggttccttgtaacctcttcttcctaggtcctgcacccagacctcacgacgcacctcctgcctctccgctgcttttggaaagtcagaaaaagaagatgtctgcttcgagggcaggaaccccatccatgcagtagaggcgctgggcagagagtcaaggcccagcagccatcgaccatggatggtttcctccaaggaaaccggtggggttgggctggggagggggcacctacctaggaatagccacggggtagagctacagtgatttaagaggaaagcaagggcgcggttgctcacgcctgtaatcccagcactttgggacaccgaggtgggcagatcacttcaggtcaggagtttgagaccagcctggccaacttagtgaaaccccatctctactaaaaatgcaaaaattatccaggcatggtggcacacgcctgtaatcccagctccacaggaggctgaggcagaatcccttgaagctgggaggcggaggttgcagtgagccgagattgcgccattgcactccagcctgggcaacagagaaaacaaaaaggaaaacaaatgatgaaggtctgcagaaactgaaacccagacatgtgtctgccccctctatgtgggcatggttttgccagtgcttctaagtgcaggagaacatgtcacctgaggctagttttgcattcaggtccctggcttcgtttcttgttggtatgcctccccagatcgtccttcctgtatccatgtgaccagactgtatttgttgggactgtcgcagatcttggcttcttacagttcttcctgtccaaactccatcctgtccctcaggaacggggggaaaattctccgaatgtttttggttttttggctgcttggaatttacttctgccacctgctggtcatcactgtcctcactaagtggattctggctcccccgtacctcatggctcaaactaccactcctcagtcgctatattaaagcttatattttgctggattactgctaaatacaaaagaaagttcaatatgttttcatttctgtagggaaaatgggattgctgctttaaatttctgagctagggattttttggcagctgcagtgttggcgactattgtaaaattctctttgtttctctctgtaaatagcacctgctaacattacaatttgtatttatgtttaaagaaggcatcatttggtgaacagaactaggaaatgaatttttagctcttaaaagcatttgctttgagaccgcacaggagtgtctttccttgtaaaacagtgatgataatttctgccttggccctaccttgaagcaatgttgtgtgaagggatgaagaatctaaaagtcttcataagtccttgggagaggtgctagaaaaatataaggcactatcataattacagtgatgtccttgctgttactactcaaatcacccacaaatttccccaaagactgcgctagctgtcaaataaaagacagtgaaattgacctgagag

SEQ ID NO: 305704 - DNA, 6474 bp, Homo sapiens
gcatagcgctcggagcctcttgcggccacaggcgcggcgtcctcggcggcgggcggcagctagcgggagccgggacgccggtgcagccgcagcgcgcggaggaacccgggtgtgccgggagctgggcggccacgtccggacgggaccgagacccctcgtagcgcattgcggcgacctcgccttccccggccgcgagcgcgccgctgcttgaaaagccgcggaacccaaggacttttctccggtccgagctcggggcgccccgcaggcgcacggtacccgtgctgcagtcgggcacgccgcggcgccgggggcctccgcagggcgatggagcccggtctgcaaggaaagtgaggcgccgccgctgcgttctggaggaggggggcacaaggtctggagaccccgggtggcggacgggagccctccccccgccccgcctccggggcaccagctccggctccattgttcccgcccgggctggaggcgccgagcaccgagcgccgccgggagtcgagcgccggccgcggagctcttgcgaccccgccaggacccgaacagagcccgggggcggcgggccggagccggggacgcgggcacacgcccgctcgcacaagccacggcggactctcccgaggcggaacctccacgccgagcgagggtcagtttgaaaaggaggatcgagctcactgtggagtatccatggagatgtggagccttgtcaccaacctctaactgcagaactgggatgtggagctggaagtgcctcctcttctgggctgtgctggtcacagccacactctgcaccgctaggccgtccccgaccttgcctgaacaagatgctctcccctcctcggaggatgatgatgatgatgatgactcctcttcagaggagaaagaaacagataacaccaaaccaaaccgtatgcccgtagctccatattggacatccccagaaaagatggaaaagaaattgcatgcagtgccggctgccaagacagtgaagttcaaatgcccttccagtgggaccccaaaccccacactgcgctggttgaaaaatggcaaagaattcaaacctgaccacagaattggaggctacaagagcggtcccctcaccggcccatcctgcaagcagggttgcccgccaacaaaacagtggccctgggtagcaacgtggagttcatgtgtaaggtgtacagtgacccgcagccgcacatccagtggctaaagcacatcgaggtgaatgggagcaagattggcccagacaacctgccttatgtccagatcttgaagactgctggagttaataccaccgacaaagagatggaggtgcttcacttaagaaatgtctcctttgaggacgcaggggagtatacgtgcttggcgggtaactctatcggactctcccatcactctgcatggttgaccgttctggaagccctggaagagaggccggcagtgatgacctcgcccctgtacctggagatcatcatctattgcacaggggccttcctcatctcctgcatggtggggtcggtcatcgtctacaagatgaagagtggtaccaagaagagtgacttccacagccagatggctgtgcacaagctggccaagagcatccctctgcgcagacaggtaacagaaagtagatgggggatttgcacactcagcaccacctctctctctgggcctctaatgccctgccctctccattgtccctaatttatagctttgggccttattttctggcttctgggcaaggcacagaggaatatcatgaactaagtgctctagagtctgtttcaagctagtgtagcccgtgaatttcctgcaccctccatatcacactgcaagtcctccggactcctgggacatggattgggaggaagtcctatttggacagaatgtgcagccaatagcatgaatttgaactgtccccaagggctgcttagaagtgcagagatgcagggtagagaagagaactgtttgtattagtccattttcacactgctgagaaagacatacccaagaccgggcaatttacaaaagaaagaggtttaatggactcacagttccacgtggctggggaggcctcacaattgcagaaggcaaaaggcacgtctcacatggcggcagacgagaagagagcttgtacagggaaactcccctttataaaatcatcagatctcgtgagatttattcactatcacaagaacagcacagggaagacctgcccccatgagtcaatgacctcctaccaggtccctcccataacacgtgggaattcaagatgagatttgggtggggacacagccaaaccatctcagccataccatacccttgtcccctgtgtgcccacccttccccacgggaggaaatggtacagatggcacaggtgtgtgcaagaatgaccgttccctcagaagcctgtgctcattctggaaggtgctttgggagttaggaatccataagctaaggcaaagtatttgcaaagagtcaggagaacagagttgttactgcaatgatcagttataaaatgtcaagctggaagaggtgcatttggtctgcttattttaaaggtgagtgaagtccagaaaggccagcttgtggcagaaataggtcagtcctagaagttgggcctcctggcctaccatggtctttggaccactctgtgttgaggaaagaacatcagatacacagacatgtgcctctgccattgttgggaagccctgactaagaatgggaaggagtcaccccgtcccccttccttgctctagggtgaccccacacttccttgcaggtgtctgctgactccagtgcatccatgaactctggggttcttctggttcggccatcacggctctcctccagtgggactcccatgctagcaggggtctctgagtatgagcttcccgaagaccctcgctgggagctgcctcgggacagactggtcttaggcaaacccctgggagagggctgctttgggcaggtggtgttggcagaggctatcgggctggacaaggacaaacccaaccgtgtgaccaaagtggctgtgaagatgttgaagtcggacgcaacagagaaagacttgtcagacctgatctcagaaatggagatgatgaagatgatcgggaagcataagaatatcatcaacctgctgggggcctgcacgcaggatggtcccttgtatgtcatcgtggagtatgcctccaagggcaacctgcgggagtacctgcaggcccggaggcccccagggctggaatactgctacaaccccagccacaacccagaggagcagctctcctccaaggacctggtgtcctgcgcctaccaggtggcccgaggcatggagtatctggcctccaagaagtgcatacaccgagacctggcagccaggaatgtcctggtgacagaggacaatgtgatgaagatagcagactttggcctcgcacgggacattcaccacatcgactactataaaaagacaaccaacggccgactgcctgtgaagtggatggcacccgaggcattatttgaccggatctacacccaccagagtgatgtgtggtctttcggggtgctcctgtgggagatcttcactctgggcggctccccataccccggtgtgcctgtggaggaacttttcaagctgctgaaggagggtcaccgcatggacaagcccagtaactgcaccaacgagctgtacatgatgatgcgggactgctggcatgcagtgccctcacagagacccaccttcaagcagctggtggaagacctggaccgcatcgtggccttgacctccaaccaggagtacctggacctgtccatgcccctggaccagtactcccccagctttcccgacacccggagctctacgtgctcctcaggggaggattccgtcttctctcatgagccgctgcccgaggagccctgcctgccccgacacccagcccagcttgccaatggcggactcaaacgccgctgactgccacccacacgccctccccagactccaccgtcagctgtaaccctcacccacagcccctgctgggcccaccacctgtccgtccctgtcccctttcctgctggcaggagccggctgcctaccaggggccttcctgtgtggcctgccttcaccccactcagctcacctctccctccacctcctctccacctgctggtgagaggtgcaaagaggcagatctttgctgccagccacttcatcccctcccagatgttggaccaacaccccttccctgccaccaggcactgcctggagggcagggagtgggagccaatgaacaggcatgcaagtgagagcttcctgagctttctcctgtcggtttggtctgttttgccttcacccataagcccctcgcactctggtggcaggtgccttgtcctcagggctacagcagtagggaggtcagtgcttcgtgcctcgattgaaggtgacctctgccccagataggtggtgccagtggcttattaattccgatactagtttgctttgctgaccaaatgcctggtaccagaggatggtgaggcgaaggccaggttgggggcagtgttgtggccctggggcccagccccaaactgggggctctgtatatagctatgaagaaaacacaaagtgtataaatctgagtatatatttacatgtctttttaaaagggtcgttaccagagatttacccatcgggtaagatgctcctggtggctgggaggcatcagttgctatatattaaaaacaaaaaagaaaaaaaaggaaaatgtttttaaaaaggtcatatattttttgctacttttgctgttttatttttttaaattatgttctaaacctattttcagtttaggtccctcaataaaaattgctgctgcttcatttatctatgggctgtatgaaaagggtgggaatgtccactggaaagaagggacacccacgggccctggggctaggtctgtcccgagggcaccgcatgctcccggcgcaggttccttgtaacctcttcttcctaggtcctgcacccagacctcacgacgcacctcctgcctctccgctgcttttggaaagtcagaaaaagaagatgtctgcttcgagggcaggaaccccatccatgcagtagaggcgctgggcagagagtcaaggcccagcagccatcgaccatggatggtttcctccaaggaaaccggtggggttgggctggggagggggcacctacctaggaatagccacggggtagagctacagtgatttaagaggaaagcaagggcgcggttgctcacgcctgtaatcccagcactttgggacaccgaggtgggcagatcacttcaggtcaggagtttgagaccagcctggccaacttagtgaaaccccatctctactaaaaatgcaaaaattatccaggcatggtggcacacgcctgtaatcccagctccacaggaggctgaggcagaatcccttgaagctgggaggcggaggttgcagtgagccgagattgcgccattgcactccagcctgggcaacagagaaaacaaaaaggaaaacaaatgatgaaggtctgcagaaactgaaacccagacatgtgtctgccccctctatgtgggcatggttttgccagtgcttctaagtgcaggagaacatgtcacctgaggctagttttgcattcaggtccctggcttcgtttcttgttggtatgcctccccagatcgtccttcctgtatccatgtgaccagactgtatttgttgggactgtcgcagatcttggcttcttacagttcttcctgtccaaactccatcctgtccctcaggaacggggggaaaattctccgaatgtttttggttttttggctgcttggaatttacttctgccacctgctggtcatcactgtcctcactaagtggattctggctcccccgtacctcatggctcaaactaccactcctcagtcgctatattaaagcttatattttgctggattactgctaaatacaaaagaaagttcaatatgttttcatttctgtagggaaaatgggattgctgctttaaatttctgagctagggattttttggcagctgcagtgttggcgactattgtaaaattctctttgtttctctctgtaaatagcacctgctaacattacaatttgtatttatgtttaaagaaggcatcatttggtgaacagaactaggaaatgaatttttagctcttaaaagcatttgctttgagaccgcacaggagtgtctttccttgtaaaacagtgatgataatttctgccttggccctaccttgaagcaatgttgtgtgaagggatgaagaatctaaaagtcttcataagtccttgggagaggtgctagaaaaatataaggcactatcataattacagtgatgtccttgctgttactactcaaatcacccacaaatttccccaaagactgcgctagctgtcaaataaaagacagtgaaattgacctgagag

SEQ ID NO: 305705 - DNA, 3907 bp, Homo sapiens
ttggctaggtagaggcgcgggttaccctggaagagaggccggcagtgatgacctcgcccctgtacctggagatcatcatctattgcacaggggccttcctcatctcctgcatggtggggtcggtcatcgtctacaagatgaagagtggtaccaagaagagtgacttccacagccagatggctgtgcacaagctggccaagagcatccctctgcgcagacaggtaacagtgtctgctgactccagtgcatccatgaactctggggttcttctggttcggccatcacggctctcctccagtgggactcccatgctagcaggggtctctgagtatgagcttcccgaagaccctcgctgggagctgcctcgggacagactggtcttaggcaaacccctgggagagggctgctttgggcaggtggtgttggcagaggctatcgggctggacaaggacaaacccaaccgtgtgaccaaagtggctgtgaagatgttgaagtcggacgcaacagagaaagacttgtcagacctgatctcagaaatggagatgatgaagatgatcgggaagcataagaatatcatcaacctgctgggggcctgcacgcaggatggtcccttgtatgtcatcgtggagtatgcctccaagggcaacctgcgggagtacctgcaggcccggaggcccccagggctggaatactgctacaaccccagccacaacccagaggagcagctctcctccaaggacctggtgtcctgcgcctaccaggtggcccgaggcatggagtatctggcctccaagaagtgcatacaccgagacctggcagccaggaatgtcctggtgacagaggacaatgtgatgaagatagcagactttggcctcgcacgggacattcaccacatcgactactataaaaagacaaccaacggccgactgcctgtgaagtggatggcacccgaggcattatttgaccggatctacacccaccagagtgatgtgtggtctttcggggtgctcctgtgggagatcttcactctgggcggctccccataccccggtgtgcctgtggaggaacttttcaagctgctgaaggagggtcaccgcatggacaagcccagtaactgcaccaacgagctgtacatgatgatgcgggactgctggcatgcagtgccctcacagagacccaccttcaagcagctggtggaagacctggaccgcatcgtggccttgacctccaaccaggagtacctggacctgtccatgcccctggaccagtactcccccagctttcccgacacccggagctctacgtgctcctcaggggaggattccgtcttctctcatgagccgctgcccgaggagccctgcctgccccgacacccagcccagcttgccaatggcggactcaaacgccgctgactgccacccacacgccctccccagactccaccgtcagctgtaaccctcacccacagcccctgctgggcccaccacctgtccgtccctgtcccctttcctgctggcaggagccggctgcctaccaggggccttcctgtgtggcctgccttcaccccactcagctcacctctccctccacctcctctccacctgctggtgagaggtgcaaagaggcagatctttgctgccagccacttcatcccctcccagatgttggaccaacaccccttccctgccaccaggcactgcctggagggcagggagtgggagccaatgaacaggcatgcaagtgagagcttcctgagctttctcctgtcggtttggtctgttttgccttcacccataagcccctcgcactctggtggcaggtgccttgtcctcagggctacagcagtagggaggtcagtgcttcgtgcctcgattgaaggtgacctctgccccagataggtggtgccagtggcttattaattccgatactagtttgctttgctgaccaaatgcctggtaccagaggatggtgaggcgaaggccaggttgggggcagtgttgtggccctggggcccagccccaaactgggggctctgtatatagctatgaagaaaacacaaagtgtataaatctgagtatatatttacatgtctttttaaaagggtcgttaccagagatttacccatcgggtaagatgctcctggtggctgggaggcatcagttgctatatattaaaaacaaaaaagaaaaaaaaggaaaatgtttttaaaaaggtcatatattttttgctacttttgctgttttatttttttaaattatgttctaaacctattttcagtttaggtccctcaataaaaattgctgctgcttcatttatctatgggctgtatgaaaagggtgggaatgtccactggaaagaagggacacccacgggccctggggctaggtctgtcccgagggcaccgcatgctcccggcgcaggttccttgtaacctcttcttcctaggtcctgcacccagacctcacgacgcacctcctgcctctccgctgcttttggaaagtcagaaaaagaagatgtctgcttcgagggcaggaaccccatccatgcagtagaggcgctgggcagagagtcaaggcccagcagccatcgaccatggatggtttcctccaaggaaaccggtggggttgggctggggagggggcacctacctaggaatagccacggggtagagctacagtgatttaagaggaaagcaagggcgcggttgctcacgcctgtaatcccagcactttgggacaccgaggtgggcagatcacttcaggtcaggagtttgagaccagcctggccaacttagtgaaaccccatctctactaaaaatgcaaaaattatccaggcatggtggcacacgcctgtaatcccagctccacaggaggctgaggcagaatcccttgaagctgggaggcggaggttgcagtgagccgagattgcgccattgcactccagcctgggcaacagagaaaacaaaaaggaaaacaaatgatgaaggtctgcagaaactgaaacccagacatgtgtctgccccctctatgtgggcatggttttgccagtgcttctaagtgcaggagaacatgtcacctgaggctagttttgcattcaggtccctggcttcgtttcttgttggtatgcctccccagatcgtccttcctgtatccatgtgaccagactgtatttgttgggactgtcgcagatcttggcttcttacagttcttcctgtccaaactccatcctgtccctcaggaacggggggaaaattctccgaatgtttttggttttttggctgcttggaatttacttctgccacctgctggtcatcactgtcctcactaagtggattctggctcccccgtacctcatggctcaaactaccactcctcagtcgctatattaaagcttatattttgctggattactgctaaatacaaaagaaagttcaatatgttttcatttctgtagggaaaatgggattgctgctttaaatttctgagctagggattttttggcagctgcagtgttggcgactattgtaaaattctctttgtttctctctgtaaatagcacctgctaacattacaatttgtatttatgtttaaagaaggcatcatttggtgaacagaactaggaaatgaatttttagctcttaaaagcatttgctttgagaccgcacaggagtgtctttccttgtaaaacagtgatgataatttctgccttggccctaccttgaagcaatgttgtgtgaagggatgaagaatctaaaagtcttcataagtccttgggagaggtgctagaaaaatataaggcactatcataattacagtgatgtccttgctgttactactcaaatcacccacaaatttccccaaagactgcgctagctgtcaaataaaagacagtgaaattgacctgagag

SEQ ID NO: 305706 - DNA, 3824 bp, Homo sapiens
  misc_feature (26)..(26): n is a, c, g, or t
ctttgctgcccgtttcgactctagangatccccgagtgggtcatcgtctacaagatgaagagtggtaccaagaagagtgacttccacagccagatggctgtgcacaagctggccaagagcatccctctgcgcagacaggtaacagtgtctgctgactccagtgcatccatgaactctggggttcttctggttcggccatcacggctctcctccagtgggactcccatgctagcaggggtctctgagtatgagcttcccgaagaccctcgctgggagctgcctcgggacagactggtcttaggcaaacccctgggagagggctgctttgggcaggtggtgttggcagaggctatcgggctggacaaggacaaacccaaccgtgtgaccaaagtggctgtgaagatgttgaagtcggacgcaacagagaaagacttgtcagacctgatctcagaaatggagatgatgaagatgatcgggaagcataagaatatcatcaacctgctgggggcctgcacgcaggatggtcccttgtatgtcatcgtggagtatgcctccaagggcaacctgcgggagtacctgcaggcccggaggcccccagggctggaatactgctacaaccccagccacaacccagaggagcagctctcctccaaggacctggtgtcctgcgcctaccaggtggcccgaggcatggagtatctggcctccaagaagtgcatacaccgagacctggcagccaggaatgtcctggtgacagaggacaatgtgatgaagatagcagactttggcctcgcacgggacattcaccacatcgactactataaaaagacaaccaacggccgactgcctgtgaagtggatggcacccgaggcattatttgaccggatctacacccaccagagtgatgtgtggtctttcggggtgctcctgtgggagatcttcactctgggcggctccccataccccggtgtgcctgtggaggaacttttcaagctgctgaaggagggtcaccgcatggacaagcccagtaactgcaccaacgagctgtacatgatgatgcgggactgctggcatgcagtgccctcacagagacccaccttcaagcagctggtggaagacctggaccgcatcgtggccttgacctccaaccaggagtacctggacctgtccatgcccctggaccagtactcccccagctttcccgacacccggagctctacgtgctcctcaggggaggattccgtcttctctcatgagccgctgcccgaggagccctgcctgccccgacacccagcccagcttgccaatggcggactcaaacgccgctgactgccacccacacgccctccccagactccaccgtcagctgtaaccctcacccacagcccctgctgggcccaccacctgtccgtccctgtcccctttcctgctggcaggagccggctgcctaccaggggccttcctgtgtggcctgccttcaccccactcagctcacctctccctccacctcctctccacctgctggtgagaggtgcaaagaggcagatctttgctgccagccacttcatcccctcccagatgttggaccaacaccccttccctgccaccaggcactgcctggagggcagggagtgggagccaatgaacaggcatgcaagtgagagcttcctgagctttctcctgtcggtttggtctgttttgccttcacccataagcccctcgcactctggtggcaggtgccttgtcctcagggctacagcagtagggaggtcagtgcttcgtgcctcgattgaaggtgacctctgccccagataggtggtgccagtggcttattaattccgatactagtttgctttgctgaccaaatgcctggtaccagaggatggtgaggcgaaggccaggttgggggcagtgttgtggccctggggcccagccccaaactgggggctctgtatatagctatgaagaaaacacaaagtgtataaatctgagtatatatttacatgtctttttaaaagggtcgttaccagagatttacccatcgggtaagatgctcctggtggctgggaggcatcagttgctatatattaaaaacaaaaaagaaaaaaaaggaaaatgtttttaaaaaggtcatatattttttgctacttttgctgttttatttttttaaattatgttctaaacctattttcagtttaggtccctcaataaaaattgctgctgcttcatttatctatgggctgtatgaaaagggtgggaatgtccactggaaagaagggacacccacgggccctggggctaggtctgtcccgagggcaccgcatgctcccggcgcaggttccttgtaacctcttcttcctaggtcctgcacccagacctcacgacgcacctcctgcctctccgctgcttttggaaagtcagaaaaagaagatgtctgcttcgagggcaggaaccccatccatgcagtagaggcgctgggcagagagtcaaggcccagcagccatcgaccatggatggtttcctccaaggaaaccggtggggttgggctggggagggggcacctacctaggaatagccacggggtagagctacagtgatttaagaggaaagcaagggcgcggttgctcacgcctgtaatcccagcactttgggacaccgaggtgggcagatcacttcaggtcaggagtttgagaccagcctggccaacttagtgaaaccccatctctactaaaaatgcaaaaattatccaggcatggtggcacacgcctgtaatcccagctccacaggaggctgaggcagaatcccttgaagctgggaggcggaggttgcagtgagccgagattgcgccattgcactccagcctgggcaacagagaaaacaaaaaggaaaacaaatgatgaaggtctgcagaaactgaaacccagacatgtgtctgccccctctatgtgggcatggttttgccagtgcttctaagtgcaggagaacatgtcacctgaggctagttttgcattcaggtccctggcttcgtttcttgttggtatgcctccccagatcgtccttcctgtatccatgtgaccagactgtatttgttgggactgtcgcagatcttggcttcttacagttcttcctgtccaaactccatcctgtccctcaggaacggggggaaaattctccgaatgtttttggttttttggctgcttggaatttacttctgccacctgctggtcatcactgtcctcactaagtggattctggctcccccgtacctcatggctcaaactaccactcctcagtcgctatattaaagcttatattttgctggattactgctaaatacaaaagaaagttcaatatgttttcatttctgtagggaaaatgggattgctgctttaaatttctgagctagggattttttggcagctgcagtgttggcgactattgtaaaattctctttgtttctctctgtaaatagcacctgctaacattacaatttgtatttatgtttaaagaaggcatcatttggtgaacagaactaggaaatgaatttttagctcttaaaagcatttgctttgagaccgcacaggagtgtctttccttgtaaaacagtgatgataatttctgccttggccctaccttgaagcaatgttgtgtgaagggatgaagaatctaaaagtcttcataagtccttgggagaggtgctagaaaaatataaggcactatcataattacagtgatgtccttgctgttactactcaaatcacccacaaatttccccaaagactgcgctagctgtcaaataaaagacagtgaaattgacctgagag

SEQ ID NO: 305707 - DNA, 5067 bp, Homo sapiens
gcatagcgctcggagcctcttgcggccacaggcgcggcgtcctcggcggcgggcggcagctagcgggagccgggacgccggtgcagccgcagcgcgcggaggaacccgggtgtgccgggagctgggcggccacgtccggacgggaccgagacccctcgtagcgcattgcggcgacctcgccttccccggccgcgagcgcgccgctgcttgaaaagccgcggaacccaaggacttttctccggtccgagctcggggcgccccgcaggcgcacggtacccgtgctgcagtcgggcacgccgcggcgccgggggcctccgcagggcgatggagcccggtctgcaaggaaagtgaggcgccgccgctgcgttctggaggaggggggcacaaggtctggagaccccgggtggcggacgggagccctccccccgccccgcctccggggcaccagctccggctccattgttcccgcccgggctggaggcgccgagcaccgagcgccgccgggagtcgagcgccggccgcggagctcttgcgaccccgccaggacccgaacagagcccgggggcggcgggccggagccggggacgcgggcacacgcccgctcgcacaagccacggcggactctcccgaggcggaacctccacgccgagcgagggtcagtttgaaaaggaggatcgagctcactgtggagtatccatggagatgtggagccttgtcaccaacctctaactgcagaactgggatgtggagctggaagtgcctcctcttctgggctgtgctggtcacagccacactctgcaccgctaggccgtccccgaccttgcctgaacaagatgctctcccctcctcggaggatgatgatgatgatgatgactcctcttcagaggagaaagaaacagataacaccaaaccaaaccgtatgcccgtagctccatattggacatccccagaaaagatggaaaagaaattgcatgcagtgccggctgccaagacagtgaagttcaaatgcccttccagtgggaccccaaaccccacactgcgctggttgaaaaatggcaaagaattcaaacctgaccacagaattggaggctacaaggtccgttatgccacctggagcatcataatggactctgtggtgccctctgacaagggcaactacacctgcattgtggagaatgagtacggcagcatcaaccacacataccagctggatgtcgtggagcggtcccctcaccggcccatcctgcaagcagggttgcccgccaacaaaacagtggccctgggtagcaacgtggagttcatgtgtaaggtgtacagtgacccgcagccgcacatccagtggctaaagcacatcgaggtgaatgggagcaagattggcccagacaacctgccttatgtccagatcttgaagactgctggagttaataccaccgacaaagagatggaggtgcttcacttaagaaatgtctcctttgaggacgcaggggagtatacgtgcttggcgggtaactctatcggactctcccatcactctgcatggttgaccgttctggaagccctggaagagaggccggcagtgatgacctcgcccctgtacctggagatcatcatctattgcacaggggccttcctcatctcctgcatggtggggtcggtcatcgtctacaagatgaagagtggtaccaagaagagtgacttccacagccagatggctgtgcacaagctggccaagagcatccctctgcgcagacaggtaacagtgtctgctgactccagtgcatccatgaactctggggttcttctggttcggccatcacggctctcctccagtgggactcccatgctagcaggggtctctgagtatgagcttcccgaagaccctcgctgggagctgcctcgggacagactggtcttaggcaaacccctgggagagggctgctttgggcaggtggtgttggcagaggctatcgggctggacaaggacaaacccaaccgtgtgaccaaagtggctgtgaagatgttgaagtcggacgcaacagagaaagacttgtcagacctgatctcagaaatggagatgatgaagatgatcgggaagcataagaatatcatcaacctgctgggggcctgcacgcaggatggtcccttgtatgtcatcgtggagtatgcctccaagggcaacctgcgggagtacctgcaggcccggaggcccccagggctggaatactgctacaaccccagccacaacccagaggagcagctctcctccaaggacctggtgtcctgcgcctaccaggtggcccgaggcatggagtatctggcctccaagaagtgcatacaccgagacctggcagccaggaatgtcctggtgacagaggacaatgtgatgaagatagcagactttggcctcgcacgggacattcaccacatcgactactataaaaagacaaccaacggccgactgcctgtgaagtggatggcacccgaggcattatttgaccggatctacacccaccagagtgatgtgtggtctttcggggtgctcctgtgggagatcttcactctgggcggctccccataccccggtgtgcctgtggaggaacttttcaagctgctgaaggagggtcaccgcatggacaagcccagtaactgcaccaacgagctgtacatgatgatgcgggactgctggcatgcagtgccctcacagagacccaccttcaagcagctggtggaagacctggaccgcatcgtggccttgacctccaaccaggagtacctggacctgtccatgcccctggaccagtactcccccagctttcccgacacccggagctctacgtgctcctcaggggaggattccgtcttctctcatgagccgctgcccgaggagccctgcctgccccgacacccagcccagcttgccaatggcggactcaaacgccgctgactgccacccataagcccctcgcactctggtggcaggtgccttgtcctcagggctacagcagtagggaggtcagtgcttcgtgcctcgattgaaggtgacctctgccccagataggtggtgccagtggcttattaattccgatactagtttgctttgctgaccaaatgcctggtaccagaggatggtgaggcgaaggccaggttgggggcagtgttgtggccctggggcccagccccaaactgggggctctgtatatagctatgaagaaaacacaaagtgtataaatctgagtatatatttacatgtctttttaaaagggtcgttaccagagatttacccatcgggtaagatgctcctggtggctgggaggcatcagttgctatatattaaaaacaaaaaagaaaaaaaaggaaaatgtttttaaaaaggtcatatattttttgctacttttgctgttttatttttttaaattatgttctaaacctattttcagtttaggtccctcaataaaaattgctgctgcttcatttatctatgggctgtatgaaaagggtgggaatgtccactggaaagaagggacacccacgggccctggggctaggtctgtcccgagggcaccgcatgctcccggcgcaggttccttgtaacctcttcttcctaggtcctgcacccagacctcacgacgcacctcctgcctctccgctgcttttggaaagtcagaaaaagaagatgtctgcttcgagggcaggaaccccatccatgcagtagaggcgctgggcagagagtcaaggcccagcagccatcgaccatggatggtttcctccaaggaaaccggtggggttgggctggggagggggcacctacctaggaatagccacggggtagagctacagtgatttaagaggaaagcaagggcgcggttgctcacgcctgtaatcccagcactttgggacaccgaggtgggcagatcacttcaggtcaggagtttgagaccagcctggccaacttagtgaaaccccatctctactaaaaatgcaaaaattatccaggcatggtggcacacgcctgtaatcccagctccacaggaggctgaggcagaatcccttgaagctgggaggcggaggttgcagtgagccgagattgcgccattgcactccagcctgggcaacagagaaaacaaaaaggaaaacaaatgatgaaggtctgcagaaactgaaacccagacatgtgtctgccccctctatgtgggcatggttttgccagtgcttctaagtgcaggagaacatgtcacctgaggctagttttgcattcaggtccctggcttcgtttcttgttggtatgcctccccagatcgtccttcctgtatccatgtgaccagactgtatttgttgggactgtcgcagatcttggcttcttacagttcttcctgtccaaactccatcctgtccctcaggaacggggggaaaattctccgaatgtttttggttttttggctgcttggaatttacttctgccacctgctggtcatcactgtcctcactaagtggattctggctcccccgtacctcatggctcaaactaccactcctcagtcgctatattaaagcttatattttgctggattactgctaaatacaaaagaaagttcaatatgttttcatttctgtagggaaaatgggattgctgctttaaatttctgagctagggattttttggcagctgcagtgttggcgactattgtaaaattctctttgtttctctctgtaaatagcacctgctaacattacaatttgtatttatgtttaaagaaggcatcatttggtgaacagaactaggaaatgaatttttagctcttaaaagcatttgctttgagaccgcacaggagtgtctttccttgtaaaacagtgatgataatttctgccttggccctaccttgaagcaatgttgtgtgaagggatgaagaatctaaaagtcttcataagtccttgggagaggtgctagaaaaatataaggcactatcataattacagtgatgtccttgctgttactactcaaatcacccacaaatttccccaaagactgcgctagctgtcaaataaaagacagtgaaattgacctgagag

SEQ ID NO: 305708 - DNA, 3590 bp, Homo sapiens
actctagaggatctcaaacgacccgaagacctcgcttgggagctgcctcgggacagactggtcttaggcaaacccctgggagagggctgctttgggcaggtggtgttggcagaggctatcgggctggacaaggacaaacccaaccgtgtgaccaaagtggctgtgaagatgttgaagtcggacgcaacagagaaagacttgtcagacctgatctcagaaatggagatgatgaagatgatcgggaagcataagaatatcatcaacctgctgggggcctgcacgcaggatggtcccttgtatgtcatcgtggagtatgcctccaagggcaacctgcgggagtacctgcaggcccggaggcccccagggctggaatactgctacaaccccagccacaacccagaggagcagctctcctccaaggacctggtgtcctgcgcctaccaggtggcccgaggcatggagtatctggcctccaagaagtgcatacaccgagacctggcagccaggaatgtcctggtgacagaggacaatgtgatgaagatagcagactttggcctcgcacgggacattcaccacatcgactactataaaaagacaaccaacggccgactgcctgtgaagtggatggcacccgaggcattatttgaccggatctacacccaccagagtgatgtgtggtctttcggggtgctcctgtgggagatcttcactctgggcggctccccataccccggtgtgcctgtggaggaacttttcaagctgctgaaggagggtcaccgcatggacaagcccagtaactgcaccaacgagctgtacatgatgatgcgggactgctggcatgcagtgccctcacagagacccaccttcaagcagctggtggaagacctggaccgcatcgtggccttgacctccaaccaggagtacctggacctgtccatgcccctggaccagtactcccccagctttcccgacacccggagctctacgtgctcctcaggggaggattccgtcttctctcatgagccgctgcccgaggagccctgcctgccccgacacccagcccagcttgccaatggcggactcaaacgccgctgactgccacccacacgccctccccagactccaccgtcagctgtaaccctcacccacagcccctgctgggcccaccacctgtccgtccctgtcccctttcctgctggcaggagccggctgcctaccaggggccttcctgtgtggcctgccttcaccccactcagctcacctctccctccacctcctctccacctgctggtgagaggtgcaaagaggcagatctttgctgccagccacttcatcccctcccagatgttggaccaacaccccttccctgccaccaggcactgcctggagggcagggagtgggagccaatgaacaggcatgcaagtgagagcttcctgagctttctcctgtcggtttggtctgttttgccttcacccataagcccctcgcactctggtggcaggtgccttgtcctcagggctacagcagtagggaggtcagtgcttcgtgcctcgattgaaggtgacctctgccccagataggtggtgccagtggcttattaattccgatactagtttgctttgctgaccaaatgcctggtaccagaggatggtgaggcgaaggccaggttgggggcagtgttgtggccctggggcccagccccaaactgggggctctgtatatagctatgaagaaaacacaaagtgtataaatctgagtatatatttacatgtctttttaaaagggtcgttaccagagatttacccatcgggtaagatgctcctggtggctgggaggcatcagttgctatatattaaaaacaaaaaagaaaaaaaaggaaaatgtttttaaaaaggtcatatattttttgctacttttgctgttttatttttttaaattatgttctaaacctattttcagtttaggtccctcaataaaaattgctgctgcttcatttatctatgggctgtatgaaaagggtgggaatgtccactggaaagaagggacacccacgggccctggggctaggtctgtcccgagggcaccgcatgctcccggcgcaggttccttgtaacctcttcttcctaggtcctgcacccagacctcacgacgcacctcctgcctctccgctgcttttggaaagtcagaaaaagaagatgtctgcttcgagggcaggaaccccatccatgcagtagaggcgctgggcagagagtcaaggcccagcagccatcgaccatggatggtttcctccaaggaaaccggtggggttgggctggggagggggcacctacctaggaatagccacggggtagagctacagtgatttaagaggaaagcaagggcgcggttgctcacgcctgtaatcccagcactttgggacaccgaggtgggcagatcacttcaggtcaggagtttgagaccagcctggccaacttagtgaaaccccatctctactaaaaatgcaaaaattatccaggcatggtggcacacgcctgtaatcccagctccacaggaggctgaggcagaatcccttgaagctgggaggcggaggttgcagtgagccgagattgcgccattgcactccagcctgggcaacagagaaaacaaaaaggaaaacaaatgatgaaggtctgcagaaactgaaacccagacatgtgtctgccccctctatgtgggcatggttttgccagtgcttctaagtgcaggagaacatgtcacctgaggctagttttgcattcaggtccctggcttcgtttcttgttggtatgcctccccagatcgtccttcctgtatccatgtgaccagactgtatttgttgggactgtcgcagatcttggcttcttacagttcttcctgtccaaactccatcctgtccctcaggaacggggggaaaattctccgaatgtttttggttttttggctgcttggaatttacttctgccacctgctggtcatcactgtcctcactaagtggattctggctcccccgtacctcatggctcaaactaccactcctcagtcgctatattaaagcttatattttgctggattactgctaaatacaaaagaaagttcaatatgttttcatttctgtagggaaaatgggattgctgctttaaatttctgagctagggattttttggcagctgcagtgttggcgactattgtaaaattctctttgtttctctctgtaaatagcacctgctaacattacaatttgtatttatgtttaaagaaggcatcatttggtgaacagaactaggaaatgaatttttagctcttaaaagcatttgctttgagaccgcacaggagtgtctttccttgtaaaacagtgatgataatttctgccttggccctaccttgaagcaatgttgtgtgaagggatgaagaatctaaaagtcttcataagtccttgggagaggtgctagaaaaatataaggcactatcataattacagtgatgtccttgctgttactactcaaatcacccacaaatttccccaaagactgcgctagctgtcaaataaaagacagtgaaattgacctgagag

SEQ ID NO: 305709 - DNA, 3799 bp, Homo sapiens
gcatagcgctcggagcctcttgcggccacaggcgcggcgtcctcggcggcgggcggcagctagcgggagccgggacgccggtgcagccgcagcgcgcggaggaacccgggtgtgccgggagctgggcggccacgtccggacgggaccgagacccctcgtagcgcattgcggcgacctcgccttccccggccgcgagcgcgccgctgcttgaaaagccgcggaacccaaggacttttctccggtccgagctcggggcgccccgcaggcgcacggtacccgtgctgcagtcgggcacgccgcggcgccgggggcctccgcagggcgatggagcccggtctgcaaggaaagtgaggcgccgccgctgcgttctggaggaggggggcacaaggtctggagaccccgggtggcggacgggagccctccccccgccccgcctccggggcaccagctccggctccattgttcccgcccgggctggaggcgccgagcaccgagcgccgccgggagtcgagcgccggccgcggagctcttgcgaccccgccaggacccgaacagagcccgggggcggcgggccggagccggggacgcgggcacacgcccgctcgcacaagccacggcggactctcccgaggcggaacctccacgccgagcgagggtcagtttgaaaaggaggatcgagctcactgtggagtatccatggagatgtggagccttgtcaccaacctctaactgcagaactgggatgtggagctggaagtgcctcctcttctgggctgtgctggtcacagccacactctgcaccgctaggccgtccccgaccttgcctgaacaagatgctctcccctcctcggaggatgatgatgatgatgatgactcctcttcagaggagaaagaaacagataacaccaaaccaaaccgtatgcccgtagctccatattggacatccccagaaaagatggaaaagaaattgcatgcagtgccggctgccaagacagtgaagttcaaatgcccttccagtgggaccccaaaccccacactgcgctggttgaaaaatggcaaagaattcaaacctgaccacagaattggaggctacaaggtccgttatgccacctggagcatcataatggactctgtggtgccctctgacaagggcaactacacctgcattgtggagaatgagtacggcagcatcaaccacacataccagctggatgtcgtggagcggtcccctcaccggcccatcctgcaagcagggttgcccgccaacaaaacagtggccctgggtagcaacgtggagttcatgtgtaaggtgtacagtgacccgcagccgcacatccagtggctaaagcacatcgaggtgaatgggagcaagattggcccagacaacctgccttatgtccagatcttgaagactgctggagttaataccaccgacaaagagatggaggtgcttcacttaagaaatgtctcctttgaggacgcaggggagtatacgtgcttggcgggtaactctatcggactctcccatcactctgcatggttgaccgttctggaagccctggaagagaggccggcagtgatgacctcgcccctgtacctggagatcatcatctattgcacaggggccttcctcatctcctgcatggtggggtcggtcatcgtctacaagatgaagagtggtaccaagaagagtgacttccacagccagatggctgtgcacaagctggccaagagcatccctctgcgcagacaggtaacagtgtctgctgactccagtgcatccatgaactctggggttcttctggttcggccatcacggctctcctccagtgggactcccatgctagcaggggtctctgagtatgagcttcccgaagaccctcgctgggagctgcctcgggacagactggtcttaggcaaacccctgggagagggctgctttgggcaggtggtgttggcagaggctatcgggctggacaaggacaaacccaaccgtgtgaccaaagtggctgtgaagatgttgaagtcggacgcaacagagaaagacttgtcagacctgatctcagaaatggagatgatgaagatgatcgggaagcataagaatatcatcaacctgctgggggcctgcacgcaggatggtcccttgtatgtcatcgtggagtatgcctccaagggcaacctgcgggagtacctgcaggcccggaggcccccagggctggaatactgctacaaccccagccacaacccagaggagcagctctcctccaaggacctggtgtcctgcgcctaccaggtggcccgaggcatggagtatctggcctccaagaagtgcatacaccgagacctggcagccaggaatgtcctggtgacagaggacaatgtgatgaagatagcagactttggcctcgcacgggacattcaccacatcgactactataaaaagacaaccaacggccgactgcctgtgaagtggatggcacccgaggcattatttgaccggatctacacccaccagagtgatgtgtggtctttcggggtgctcctgtgggagatcttcactctgggcggctccccataccccggtgtgcctgtggaggaacttttcaagctgctgaaggagggtcaccgcatggacaagcccagtaactgcaccaacgagctgtacatgatgatgcgggactgctggcatgcagtgccctcacagagacccaccttcaagcagctggtggaagacctggaccgcatcgtggccttgacctccaaccaggagtacctggacctgtccatgcccctggaccagtactcccccagctttcccgacacccggagctctacgtgctcctcaggggaggattccgtcttctctcatgagccgctgcccgaggagccctgcctgccccgacacccagcccagcttgccaatggcggactcaaacgccgctgactgccacccacacgccctccccagactccaccgtcagctgtaaccctcacccacagcccctgctgggcccaccacctgtccgtccctgtcccctttcctgctggcaggagccggctgcctaccaggggccttcctgtgtggcctgccttcaccccactcagctcacctctccctccacctcctctccacctgctggtgagaggtgcaaagaggcagatctttgctgccagccacttcatcccctcccagatgttggaccaacaccccttccctgccaccaggcactgcctggagggcagggagtgggagccaatgaacaggcatgcaagtgagagcttcctgagctttctcctgtcggtttggtctgttttgccttcacccataagcccctcgcactctggtggcaggtgcctcgattgaaggtgacctctgccccagataggtggtgccagtggcttattaattccgatactagtttgctttgctgaccaaatgcctggtaccagaggatggtgaggcgaaggccaggttgggggcagtgttgtggccctggggcccagccccaaactgggggctctgtatatagctatgaagaaaacacaaagtgtataaatctgagtatatatttacatgtctttttaaaagggtcgttaccagagatttacccatcgggtaagatgctcctggtggctgggaggcatcagttgctatatattaaaaacaaaaaagaaaaaaaaggaaaatgtttttaaaaaggtcatatattttttgctacttttgctgttttatttttttaaattatgttctaaacctattttcagtttaggtccctcaataaaaattgctgctgcttca

SEQ ID NO: 305710 - DNA, 4891 bp, Homo sapiens
gcatagcgctcggagcctcttgcggccacaggcgcggcgtcctcggcggcgggcggcagctagcgggagccgggacgccggtgcagccgcagcgcgcggaggaacccgggtgtgccgggagctgggcggccacgtccggacgggaccgagacccctcgtagcgcattgcggcgacctcgccttccccggccgcgagcgcgccgctgcttgaaaagccgcggaacccaaggacttttctccggtccgagctcggggcgccccgcaggcgcacggtacccgtgctgcagtcgggcacgccgcggcgccgggggcctccgcagggcgatggagcccggtctgcaaggaaagtgaggcgccgccgctgcgttctggaggaggggggcacaaggtctggagaccccgggtggcggacgggagccctccccccgccccgcctccggggcaccagctccggctccattgttcccgcccgggctggaggcgccgagcaccgagcgccgccgggagtcgagcgccggccgcggagctcttgcgaccccgccaggacccgaacagagcccgggggcggcgggccggagccggggacgcgggcacacgcccgctcgcacaagccacggcggactctcccgaggcggaacctccacgccgagcgagggtcagtttgaaaaggaggatcgagctcactgtggagtatccatggagatgtggagccttgtcaccaacctctaactgcagaactgggatgtggagctggaagtgcctcctcttctgggctgtgctggtcacagccacactctgcaccgctaggccgtccccgaccttgcctgaacaagatgctctcccctcctcggaggatgatgatgatgatgatgactcctcttcagaggagaaagaaacagataacaccaaaccaaaccgtatgcccgtagctccatattggacatccccagaaaagatggaaaagaaattgcatgcagtgccggctgccaagacagtgaagttcaaatgcccttccagtgggaccccaaaccccacactgcgctggttgaaaaatggcaaagaattcaaacctgaccacagaattggaggctacaaggtccgttatgccacctggagcatcataatggactctgtggtgccctctgacaagggcaactacacctgcattgtggagaatgagtacggcagcatcaaccacacataccagctggatgtcgtggagcggtcccctcaccggcccatcctgcaagcagggttgcccgccaacaaaacagtggccctgggtagcaacgtggagttcatgtgtaaggtgtacagtgacccgcagccgcacatccagtggctaaagcacatcgaggtgaatgggagcaagattggcccagacaacctgccttatgtccagatcttgaagactgctggagttaataccaccgacaaagagatggaggtgcttcacttaagaaatgtctcctttgaggacgcaggggagtatacgtgcttggcgggtaactctatcggactctcccatcactctgcatggttgaccgttctggaagccctggaagagaggccggcagtgatgacctcgcccctgtacctggagatcatcatctattgcacaggggccttcctcatctcctgcatggtggggtcggtcatcgtctacaagatgaagagtggtaccaagaagagtgacttccacagccagatggctgtgcacaagctggccaagagcatccctctgcgcagacaggtaacagtgtctgctgactccagtgcatccatgaactctggggttcttctggttcggccatcacggctctcctccagtgggactcccatgctagcaggggtctctgagtatgagcttcccgaagaccctcgctgggagctgcctcgggacagactggtcttaggcaaacccctgggagagggctgctttgggcaggtggtgttggcagaggctatcgggctggacaaggacaaacccaaccgtgtgaccaaagtggctgtgaagatgttgaagtcggacgcaacagagaaagacttgtcagacctgatctcagaaatggagatgatgaagatgatcgggaagcataagaatatcatcaacctgctgggggcctgcacgcaggatggtcccttgtatgtcatcgtggagtatgcctccaagggcaacctgcgggagtacctgcaggcccggaggcccccagggctggaatactgctacaaccccagccacaacccagaggagcagctctcctccaaggacctggtgtcctgcgcctaccaggtggcccgaggcatggagtatctggcctccaagaagtgcatacaccgagacctggcagccaggaatgtcctggtgacagaggacaatgtgatgaagatagcagactttggcctcgcacgggacattcaccacatcgactactataaaaagacaaccaacggccgactgcctgtgaagtggatggcacccgaggcattatttgaccggatctacacccaccagagtgatgtgtggtctttcggggtgctcctgtgggagatcttcactctgggcggctccccataccccggtgtgcctgtggaggaacttttcaagctgctgaaggagggtcaccgcatggacaagcccagtaactgcaccaacgagctgtacatgatgatgcgggactgctggcatgcagtgccctcacagagacccaccttcaagcagctggtggaagacctggaccgcatcgtggccttgacctccaaccaggagtacctggacctgtccatgcccctggaccagtactcccccagctttcccgacacccggagctctacgtgctcctcaggggaggattccgtcttctctcatgagccgctgcccgaggagccctgcctgccccgacacccagcccagcttgccaatggcggactcaaacgccgctgactgccacccacacgccctccccagactccaccgtcagctgtaaccctcacccacagccccaaactgggggctctgtatatagctatgaagaaaacacaaagtgtataaatctgagtatatatttacatgtctttttaaaagggtcgttaccagagatttacccatcgggtaagatgctcctggtggctgggaggcatcagttgctatatattaaaaacaaaaaagaaaaaaaaggaaaatgtttttaaaaaggtcatatattttttgctacttttgctgttttatttttttaaattatgttctaaacctattttcagtttaggtccctcaataaaaattgctgctgcttcatttatctatgggctgtatgaaaagggtgggaatgtccactggaaagaagggacacccacgggccctggggctaggtctgtcccgagggcaccgcatgctcccggcgcaggttccttgtaacctcttcttcctaggtcctgcacccagacctcacgacgcacctcctgcctctccgctgcttttggaaagtcagaaaaagaagatgtctgcttcgagggcaggaaccccatccatgcagtagaggcgctgggcagagagtcaaggcccagcagccatcgaccatggatggtttcctccaaggaaaccggtggggttgggctggggagggggcacctacctaggaatagccacggggtagagctacagtgatttaagaggaaagcaagggcgcggttgctcacgcctgtaatcccagcactttgggacaccgaggtgggcagatcacttcaggtcaggagtttgagaccagcctggccaacttagtgaaaccccatctctactaaaaatgcaaaaattatccaggcatggtggcacacgcctgtaatcccagctccacaggaggctgaggcagaatcccttgaagctgggaggcggaggttgcagtgagccgagattgcgccattgcactccagcctgggcaacagagaaaacaaaaaggaaaacaaatgatgaaggtctgcagaaactgaaacccagacatgtgtctgccccctctatgtgggcatggttttgccagtgcttctaagtgcaggagaacatgtcacctgaggctagttttgcattcaggtccctggcttcgtttcttgttggtatgcctccccagatcgtccttcctgtatccatgtgaccagactgtatttgttgggactgtcgcagatcttggcttcttacagttcttcctgtccaaactccatcctgtccctcaggaacggggggaaaattctccgaatgtttttggttttttggctgcttggaatttacttctgccacctgctggtcatcactgtcctcactaagtggattctggctcccccgtacctcatggctcaaactaccactcctcagtcgctatattaaagcttatattttgctggattactgctaaatacaaaagaaagttcaatatgttttcatttctgtagggaaaatgggattgctgctttaaatttctgagctagggattttttggcagctgcagtgttggcgactattgtaaaattctctttgtttctctctgtaaatagcacctgctaacattacaatttgtatttatgtttaaagaaggcatcatttggtgaacagaactaggaaatgaatttttagctcttaaaagcatttgctttgagaccgcacaggagtgtctttccttgtaaaacagtgatgataatttctgccttggccctaccttgaagcaatgttgtgtgaagggatgaagaatctaaaagtcttcataagtccttgggagaggtgctagaaaaatataaggcactatcataattacagtgatgtccttgctgttactactcaaatcacccacaaatttccccaaagactgcgctagctgtcaaataaaagacagtgaaattgacctgagag

SEQ ID NO: 305711 - DNA, 3162 bp, Homo sapiens
cctatttccaattgaagctactatcatgggcgtttagagttatacaaatgacacttacaaaaaataaaagaccaagacacccaggcagtacgcccgtcgggcgtactgccgggctatgcaatatgcagacatgaaagaaatgctacgggcgtctgcactgaggaaggaggaagggaggagcgcttgctgtgatgagaagcctggagctggcagagaatgttagaagagggaaagcaaaggttcggggggcagagcagtgtggcagaagttctatgagacaagtcggggcggctccccataccccggtgtgcctgtggaggaacttttcaagctgctgaaggagggtcaccgcatggacaagcccagtaactgcaccaacgagctgtacatgatgatgcgggactgctggcatgcagtgccctcacagagacccaccttcaagcagctggtggaagacctggaccgcatcgtggccttgacctccaaccaggagtacctggacctgtccatgcccctggaccagtactcccccagctttcccgacacccggagctctacgtgctcctcaggggaggattccgtcttctctcatgagccgctgcccgaggagccctgcctgccccgacacccagcccagcttgccaatggcggactcaaacgccgctgactgccacccacacgccctccccagactccaccgtcagctgtaaccctcacccacagcccctgctgggcccaccacctgtccgtccctgtcccctttcctgctggcaggagccggctgcctaccaggggccttcctgtgtggcctgccttcaccccactcagctcacctctccctccacctcctctccacctgctggtgagaggtgcaaagaggcagatctttgctgccagccacttcatcccctcccagatgttggaccaacaccccttccctgccaccaggcactgcctggagggcagggagtgggagccaatgaacaggcatgcaagtgagagcttcctgagctttctcctgtcggtttggtctgttttgccttcacccataagcccctcgcactctggtggcaggtgccttgtcctcagggctacagcagtagggaggtcagtgcttcgtgcctcgattgaaggtgacctctgccccagataggtggtgccagtggcttattaattccgatactagtttgctttgctgaccaaatgcctggtaccagaggatggtgaggcgaaggccaggttgggggcagtgttgtggccctggggcccagccccaaactgggggctctgtatatagctatgaagaaaacacaaagtgtataaatctgagtatatatttacatgtctttttaaaagggtcgttaccagagatttacccatcgggtaagatgctcctggtggctgggaggcatcagttgctatatattaaaaacaaaaaagaaaaaaaaggaaaatgtttttaaaaaggtcatatattttttgctacttttgctgttttatttttttaaattatgttctaaacctattttcagtttaggtccctcaataaaaattgctgctgcttcatttatctatgggctgtatgaaaagggtgggaatgtccactggaaagaagggacacccacgggccctggggctaggtctgtcccgagggcaccgcatgctcccggcgcaggttccttgtaacctcttcttcctaggtcctgcacccagacctcacgacgcacctcctgcctctccgctgcttttggaaagtcagaaaaagaagatgtctgcttcgagggcaggaaccccatccatgcagtagaggcgctgggcagagagtcaaggcccagcagccatcgaccatggatggtttcctccaaggaaaccggtggggttgggctggggagggggcacctacctaggaatagccacggggtagagctacagtgatttaagaggaaagcaagggcgcggttgctcacgcctgtaatcccagcactttgggacaccgaggtgggcagatcacttcaggtcaggagtttgagaccagcctggccaacttagtgaaaccccatctctactaaaaatgcaaaaattatccaggcatggtggcacacgcctgtaatcccagctccacaggaggctgaggcagaatcccttgaagctgggaggcggaggttgcagtgagccgagattgcgccattgcactccagcctgggcaacagagaaaacaaaaaggaaaacaaatgatgaaggtctgcagaaactgaaacccagacatgtgtctgccccctctatgtgggcatggttttgccagtgcttctaagtgcaggagaacatgtcacctgaggctagttttgcattcaggtccctggcttcgtttcttgttggtatgcctccccagatcgtccttcctgtatccatgtgaccagactgtatttgttgggactgtcgcagatcttggcttcttacagttcttcctgtccaaactccatcctgtccctcaggaacggggggaaaattctccgaatgtttttggttttttggctgcttggaatttacttctgccacctgctggtcatcactgtcctcactaagtggattctggctcccccgtacctcatggctcaaactaccactcctcagtcgctatattaaagcttatattttgctggattactgctaaatacaaaagaaagttcaatatgttttcatttctgtagggaaaatgggattgctgctttaaatttctgagctagggattttttggcagctgcagtgttggcgactattgtaaaattctctttgtttctctctgtaaatagcacctgctaacattacaatttgtatttatgtttaaagaaggcatcatttggtgaacagaactaggaaatgaatttttagctcttaaaagcatttgctttgagaccgcacaggagtgtctttccttgtaaaacagtgatgataatttctgccttggccctaccttgaagcaatgttgtgtgaagggatgaagaatctaaaagtcttcataagtccttgggagaggtgctagaaaaatataaggcactatcataattacagtgatgtccttgctgttactactcaaatcacccacaaatttccccaaagactgcgctagctgtcaaataaaagacagtgaaattgacctgagag

SEQ ID NO: 305712 - DNA, 3295 bp, Homo sapiens
gcatagcgctcggagcctcttgcggccacaggcgcggcgtcctcggcggcgggcggcagctagcgggagccgggacgccggtgcagccgcagcgcgcggaggaacccgggtgtgccgggagctgggcggccacgtccggacgggaccgagacccctcgtagcgcattgcggcgacctcgccttccccggccgcgagcgcgccgctgcttgaaaagccgcggaacccaaggacttttctccggtccgagctcggggcgccccgcaggcgcacggtacccgtgctgcagtcgggcacgccgcggcgccgggggcctccgcagggcgatggagcccggtctgcaaggaaagtgaggcgccgccgctgcgttctggaggaggggggcacaaggtctggagaccccgggtggcggacgggagccctccccccgccccgcctccggggcaccagctccggctccattgttcccgcccgggctggaggcgccgagcaccgagcgccgccgggagtcgagcgccggccgcggagctcttgcgaccccgccaggacccgaacagagcccgggggcggcgggccggagccggggacgcgggcacacgcccgctcgcacaagccacggcggactctcccgaggcggaacctccacgccgagcgagggtcagtttgaaaaggaggatcgagctcactgtggagtatccatggagatgtggagccttgtcaccaacctctaactgcagaactgggatgtggagctggaagtgcctcctcttctgggctgtgctggtcacagccacactctgcaccgctaggccgtccccgaccttgcctgaacaagatgctctcccctcctcggaggatgatgatgatgatgatgactcctcttcagaggagaaagaaacagataacaccaaaccaaaccgtatgcccgtagctccatattggacatccccagaaaagatggaaaagaaattgcatgcagtgccggctgccaagacagtgaagttcaaatgcccttccagtgggaccccaaaccccacactgcgctggttgaaaaatggcaaagaattcaaacctgaccacagaattggaggctacaaggtccgttatgccacctggagcatcataatggactctgtggtgccctctgacaagggcaactacacctgcattgtggagaatgagtacggcagcatcaaccacacataccagctggatgtcgtggagcggtcccctcaccggcccatcctgcaagcagggttgcccgccaacaaaacagtggccctgggtagcaacgtggagttcatgtgtaaggtgtacagtgacccgcagccgcacatccagtggctaaagcacatcgaggtgaatgggagcaagattggcccagacaacctgccttatgtccagatcttgaagactgctggagttaataccaccgacaaagagatggaggtgcttcacttaagaaatgtctcctttgaggacgcaggggagtatacgtgcttggcgggtaactctatcggactctcccatcactctgcatggttgaccgttctggaagccctggaagagaggccggcagtgatgacctcgcccctgtacctggagatcatcatctattgcacaggggccttcctcatctcctgcatggtggggtcggtcatcgtctacaagatgaagagtggtaccaagaagagtgacttccacagccagatggctgtgcacaagctggccaagagcatccctctgcgcagacaggtaacagtgtctgctgactccagtgcatccatgaactctggggttcttctggttcggccatcacggctctcctccagtgggactcccatgctagcaggggtctctgagtatgagcttcccgaagaccctcgctgggagctgcctcgggacagactggtcttaggcaaacccctgggagagggctgctttgggcaggtggtgttggcagaggctatcgggctggacaaggacaaacccaaccgtgtgaccaaagtggctgtgaagatgttgaagtcggacgcaacagagaaagacttgtcagacctgatctcagaaatggagatgatgaagatgatcgggaagcataagaatatcatcaacctgctgggggcctgcacgcaggatggtcccttgtatgtcatcgtggagtatgcctccaagggcaacctgcgggagtacctgcaggcccggaggcccccagggctggaatactgctacaaccccagccacaacccagaggagcagctctcctccaaggacctggtgtcctgcgcctaccaggtggcccgaggcatggagtatctggcctccaagaagtgcatacaccgagacctggcagccaggaatgtcctggtgacagaggacaatgtgatgaagatagcagactttggcctcgcacgggacattcaccacatcgactactataaaaagacaaccaacggccgactgcctgtgaagtggatggcacccgaggcattatttgaccggatctacacccaccagagtgatgtgtggtctttcggggtgctcctgtgggagatcttcactctgggcggctccccataccccggtgtgcctgtggaggaacttttcaagctgctgaaggagggtcaccgcatggacaagcccagtaactgcaccaacgagctgtacatgatgatgcgggactgctggcatgcagtgccctcacagagacccaccttcaagcagctggtggaagacctggaccgcatcgtggccttgacctccaaccaggagtacctggacctgtccatgcccctggaccagtactcccccagctttcccgacacccggagctctacgtgctcctcaggggaggattccgtcttctctcatgagccgctgcccgaggagccctgcctgccccgacacccagcccagcttgccaatggcggactcaaacgccgctgactgccacccacacgccctccccagactccaccgtcagctgtaaccctcacccacagccccaaactgggggctctgtatatagctatgaagaaaacacaaagtgtataaatctgagtatatatttacatgtctttttaaaagggtcgttaccagagatttacccatcgggtaagatgctcctggtggctgggaggcatcagttgctatatattaaaaacaaaaaagaaaaaaaaggaaaatgtttttaaaaaggtcatatattttttgctacttttgctgttttatttttttaaattatgttctaaacctattttcagtttaggtccctcaataaaaattgctgctgcttca

SEQ ID NO: 305713 - DNA, 3903 bp, Homo sapiens
gcatagcgctcggagcctcttgcggccacaggcgcggcgtcctcggcggcgggcggcagctagcgggagccgggacgccggtgcagccgcagcgcgcggaggaacccgggtgtgccgggagctgggcggccacgtccggacgggaccgagacccctcgtagcgcattgcggcgacctcgccttccccggccgcgagcgcgccgctgcttgaaaagccgcggaacccaaggacttttctccggtccgagctcggggcgccccgcaggcgcacggtacccgtgctgcagtcgggcacgccgcggcgccgggggcctccgcagggcgatggagcccggtctgcaaggaaagtgaggcgccgccgctgcgttctggaggaggggggcacaaggtctggagaccccgggtggcggacgggagccctccccccgccccgcctccggggcaccagctccggctccattgttcccgcccgggctggaggcgccgagcaccgagcgccgccgggagtcgagcgccggccgcggagctcttgcgaccccgccaggacccgaacagagcccgggggcggcgggccggagccggggacgcgggcacacgcccgctcgcacaagccacggcggactctcccgaggcggaacctccacgccgagcgagggtcagtttgaaaaggaggatcgagctcactgtggagtatccatggagatgtggagccttgtcaccaacctctaactgcagaactgggatgtggagctggaagtgcctcctcttctgggctgtgctggtcacagccacactctgcaccgctaggccgtccccgaccttgcctgaacaagatgctctcccctcctcggaggatgatgatgatgatgatgactcctcttcagaggagaaagaaacagataacaccaaaccaaaccgtatgcccgtagctccatattggacatccccagaaaagatggaaaagaaattgcatgcagtgccggctgccaagacagtgaagttcaaatgcccttccagtgggaccccaaaccccacactgcgctggttgaaaaatggcaaagaattcaaacctgaccacagaattggaggctacaaggtccgttatgccacctggagcatcataatggactctgtggtgccctctgacaagggcaactacacctgcattgtggagaatgagtacggcagcatcaaccacacataccagctggatgtcgtggagcggtcccctcaccggcccatcctgcaagcagggttgcccgccaacaaaacagtggccctgggtagcaacgtggagttcatgtgtaaggtgtacagtgacccgcagccgcacatccagtggctaaagcacatcgaggtgaatgggagcaagattggcccagacaacctgccttatgtccagatcttgaagactgctggagttaataccaccgacaaagagatggaggtgcttcacttaagaaatgtctcctttgaggacgcaggggagtatacgtgcttggcgggtaactctatcggactctcccatcactctgcatggttgaccgttctggaagccctggaagagaggccggcagtgatgacctcgcccctgtacctggagatcatcatctattgcacaggggccttcctcatctcctgcatggtggggtcggtcatcgtctacaagatgaagagtggtaccaagaagagtgacttccacagccagatggctgtgcacaagctggccaagagcatccctctgcgcagacaggtaacagtgtctgctgactccagtgcatccatgaactctggggttcttctggttcggccatcacggctctcctccagtgggactcccatgctagcaggggtctctgagtatgagcttcccgaagaccctcgctgggagctgcctcgggacagactggtcttaggcaaacccctgggagagggctgctttgggcaggtggtgttggcagaggctatcgggctggacaaggacaaacccaaccgtgtgaccaaagtggctgtgaagatgttgaagtcggacgcaacagagaaagacttgtcagacctgatctcagaaatggagatgatgaagatgatcgggaagcataagaatatcatcaacctgctgggggcctgcacgcaggatggtgggtgccggccagactggctttccctgcccagcggggagaagatctgagctggggtatcagtcccaaggcctctctcagccacagctagggaagggggttaagagaggctgctttggcagaggtttaaaatgtgttatctcgggatctgggctccgctcattggtgttcattcaggaatacagatacctagattcacacacgtggtgtgttaacagaggcagctgagtaattatggtctaagagcgctcaggctgggtgcagtggctcatgcctgtaatcccagcaatttgggaggccgaggcaggaagatcacttgagatcaggagttcgagaccagtctggtcaaaatggtgaaaccccatctctactaaaaaatacaaaagttagccaggcatggtcacgcatgcctataatcccagctactcaggaggctgacgcataagacttgcttgaacccgggaggtggaggttgcagtgagccaagatcacgccattgtactccagcttgggagatactcccgctgtctcaaaaataaaataaataaataggccaggcacagtggctcacgcctgtaatcccagcaccttgggagggtgaggcgggtggatcacttgaggtcaggagttggagaccagcctggccaacaggtgaaaccccatctctactaaaaatacaaaaagtagccgggcatggtggcacacgcctgtaatcccagctccacaggaggctgaggcagaatcccttgaagctgggaggcggaggttgcagtgagccgagattgcgccattgcactccagcctgggcaacagagaaaacaaaaaggaaaacaaatgatgaaggtctgcagaaactgaaacccagacatgtgtctgccccctctatgtgggcatggttttgccagtgcttctaagtgcaggagaacatgtcacctgaggctagttttgcattcaggtccctggcttcgtttcttgttggtatgcctccccagatcgtccttcctgtatccatgtgaccagactgtatttgttgggactgtcgcagatcttggcttcttacagttcttcctgtccaaactccatcctgtccctcaggaacggggggaaaattctccgaatgtttttggttttttggctgcttggaatttacttctgccacctgctggtcatcactgtcctcactaagtggattctggctcccccgtacctcatggctcaaactaccactcctcagtcgctatattaaagcttatattttgctggattactgctaaatacaaaagaaagttcaatatgttttcatttctgtagggaaaatgggattgctgctttaaatttctgagctagggattttttggcagctgcagtgttggcgactattgtaaaattctctttgtttctctctgtaaatagcacctgctaacattacaatttgtatttatgtttaaagaaggcatcatttggtgaacagaactaggaaatgaatttttagctcttaaaagcatttgctttgagaccgcacaggagtgtctttccttgtaaaacagtgatgataatttctgccttggccctaccttgaagcaatgttgtgtgaagggatgaagaatctaaaagtcttcataagtccttgggagaggtgctagaaaaatataaggcactatcataattacagtgatgtccttgctgttactactcaaatcacccacaaatttccccaaagactgcgctagctgtcaaataaaagacagtgaaattgacctgagag

SEQ ID NO: 305714 - DNA, 3121 bp, Homo sapiens
gcatagcgctcggagcctcttgcggccacaggcgcggcgtcctcggcggcgggcggcagctagcgggagccgggacgccggtgcagccgcagcgcgcggaggaacccgggtgtgccgggagctgggcggccacgtccggacgggaccgagacccctcgtagcgcattgcggcgacctcgccttccccggccgcgagcgcgccgctgcttgaaaagccgcggaacccaaggacttttctccggtccgagctcggggcgccccgcaggcgcacggtacccgtgctgcagtcgggcacgccgcggcgccgggggcctccgcagggcgatggagcccggtctgcaaggaaagtgaggcgccgccgctgcgttctggaggaggggggcacaaggtctggagaccccgggtggcggacgggagccctccccccgccccgcctccggggcaccagctccggctccattgttcccgcccgggctggaggcgccgagcaccgagcgccgccgggagtcgagcgccggccgcggagctcttgcgaccccgccaggacccgaacagagcccgggggcggcgggccggagccggggacgcgggcacacgcccgctcgcacaagccacggcggactctcccgaggcggaacctccacgccgagcgagggtcagtttgaaaaggaggatcgagctcactgtggagtatccatggagatgtggagccttgtcaccaacctctaactgcagaactgggatgtggagctggaagtgcctcctcttctgggctgtgctggtcacagccacactctgcaccgctaggccgtccccgaccttgcctgaacaagatgctctcccctcctcggaggatgatgatgatgatgatgactcctcttcagaggagaaagaaacagataacaccaaaccaaaccgtatgcccgtagctccatattggacatccccagaaaagatggaaaagaaattgcatgcagtgccggctgccaagacagtgaagttcaaatgcccttccagtgggaccccaaaccccacactgcgctggttgaaaaatggcaaagaattcaaacctgaccacagaattggaggctacaaggtccgttatgccacctggagcatcataatggactctgtggtgccctctgacaagggcaactacacctgcattgtggagaatgagtacggcagcatcaaccacacataccagctggatgtcgtggagcggtcccctcaccggcccatcctgcaagcagggttgcccgccaacaaaacagtggccctgggtagcaacgtggagttcatgtgtaaggtgtacagtgacccgcagccgcacatccagtggctaaagcacatcgaggtgaatgggagcaagattggcccagacaacctgccttatgtccagatcttgaagactgctggagttaataccaccgacaaagagatggaggtgcttcacttaagaaatgtctcctttgaggacgcaggggagtatacgtgcttggcgggtaactctatcggactctcccatcactctgcatggttgaccgttctggaagccctggaagagaggccggcagtgatgacctcgcccctgtacctggagatcatcatctattgcacaggggccttcctcatctcctgcatggtggggtcggtcatcgtctacaagatgaagagtggtaccaagaagagtgacttccacagccagatggctgtgcacaagctggccaagagcatccctctgcgcagacaggtaacagaaagtagatgggggatttgcacactcagcaccacctctctctctgggcctctaatgccctgccctctccattgtccctaatttatagctttgggccttattttctggcttctgggcaaggcacagaggaatatcatgaactaagtgctctagagtctgtttcaagctagtgtagcccgtgaatttcctgcaccctccatatcacactgcaagtcctccggactcctgggacatggattgggaggaagtcctatttggacagaatgtgcagccaatagcatgaatttgaactgtccccaagggctgcttagaagtgcagagatgcagggtagagaagagaactgtttgtattagtccattttcacactgctgagaaagacatacccaagaccgggcaatttacaaaagaaagaggtttaatggactcacagttccacgtggctggggaggcctcacaattgcagaaggcaaaaggcacgtctcacatggcggcagacgagaagagagcttgtacagggaaactcccctttataaaatcatcagatctcgtgagatttattcactatcacaagaacagcacagggaagacctgcccccatgagtcaatgacctcctaccaggtccctcccataacacgtgggaattcaagatgagatttgggtggggacacagccaaaccatctcagccataccatacccttgtcccctgtgtgcccacccttccccacgggaggaaatggtacagatggcacaggtgtgtgcaagaatgaccgttccctcagaagcctgtgctcattctggaaggtgctttgggagttaggaatccataagctaaggcaaagtatttgcaaagagtcaggagaacagagttgttactgcaatgatcagttataaaatgtcaagctggaagaggtgcatttggtctgcttattttaaaggtgagtgaagtccagaaaggccagcttgtggcagaaataggtcagtcctagaagttgggcctcctggcctaccatggtctttggaccactctgtgttgaggaaagaacatcagatacacagacatgtgcctctgccattgttgggaagccctgactaagaatgggaaggagtcaccccgtcccccttccttgctctagggtgaccccacacttccttgcaggtgtctgctgactccagtgcatccatgaactctggggttcttctggttcggccatcacggctctcctccagtgggactcccatgctagcaggggtctctgagtatgagcttcccgaagaccctcgctgggagctgcctcgggacagactggtcttagcaaacacctgggagaggctgctttggcacacaatatgagggtacca

SEQ ID NO: 305715 - DNA, 1889 bp, Homo sapiens
  misc_feature (1807)..(1807): n is a, c, g, or t
  misc_feature (1839)..(1840): n is a, c, g, or t
  misc_feature (1870)..(1870): n is a, c, g, or t
  misc_feature (1873)..(1873): n is a, c, g, or t
gcatagcgctcggagcctcttgcggccacaggcgcggcgtcctcggcggcgggcggcagctagcgggagccgggacgccggtgcagccgcagcgcgcggaggaacccgggtgtgccgggagctgggcggccacgtccggacgggaccgagacccctcgtagcgcattgcggcgacctcgccttccccggccgcgagcgcgccgctgcttgaaaagccgcggaacccaaggacttttctccggtccgagctcggggcgccccgcaggcgcacggtacccgtgctgcagtcgggcacgccgcggcgccgggggcctccgcagggcgatggagcccggtctgcaaggaaagtgaggcgccgccgctgcgttctggaggaggggggcacaaggtctggagaccccgggtggcggacgggagccctccccccgccccgcctccggggcaccagctccggctccattgttcccgcccgggctggaggcgccgagcaccgagcgccgccgggagtcgagcgccggccgcggagctcttgcgaccccgccaggacccgaacagagcccgggggcggcgggccggagccggggacgcgggcacacgcccgctcgcacaagccacggcggactctcccgaggcggaacctccacgccgagcgagggtcagtttgaaaaggaggatcgagctcactgtggagtatccatggagatgtggagccttgtcaccaacctctaactgcagaactgggatgtggagctggaagtgcctcctcttctgggctgtgctggtcacagccacactctgcaccgctaggccgtccccgaccttgcctgaacaagatgctctcccctcctcggaggatgatgatgatgatgatgactcctcttcagaggagaaagaaacagataacaccaaaccaaaccgtatgcccgtagctccatattggacatccccagaaaagatggaaaagaaattgcatgcagtgccggctgccaagacagtgaagttcaaatgcccttccagtgggaccccaaaccccacactgcgctggttgaaaaatggcaaagaattcaaacctgaccacagaattggaggctacaaggtccgttatgccacctggagcatcataatggactctgtggtgccctctgacaagggcaactacacctgcattgtggagaatgagtacggcagcatcaaccacacataccagctggatgtcgtggagcggtcccctcaccggcccatcctgcaagcagggttgcccgccaacaaaacagtggccctgggtagcaacgtggagttcatgtgtaaggtgtacagtgacccgcagccgcacatccagtggctaaagcacatcgaggtgaatgggagcaagattggcccagacaacctgccttatgtccagatcttgaagactgctggagttaataccaccgacaaagagatggaggtgcttcacttaagaaatgtctcctttgaggacgcaggggagtatacgtgcttggcgggtaactctatcggactctcccatcactctgcatggttgaccgttctggaagccctggaagagaggccggcagtgatgacctcgcccctgtacctggagatcatcatctattgcacaggggccttcctcatctcctgcatggtggggtcggtcatcgtctacaagatgaagagtggtaccaagaagagtgacttccacagccagatggctgtgcacaagctggccaagagcatccctctgcgcagacaggtaacaagtttcctggctgactccaagtgcaatccaatgaaactcctggggggnttccttctgggtttccgggccaatcaacgggnntctcctccaagtgggggactccccatcctnacnaaggggtccccctgaa

SEQ ID NO: 305716 - DNA, 407 bp, Homo sapiens
atttcccaggtcccctaagaggaggcaggagatgggaggttggccggggtgtgctgctgggggtggggtttctttgaggtgaagccaaacctgctcacctgctgctggccccatggcctcttctcctgtgcctgcaggtcccttgtatgtcatcgtggagtatgcctccaagggcaacctgcgggagtacctgcaggcccggaggcccccagggctggaatactgctacaaccccagccacaacccagaggagcagctctcctccaaggacctggtgtcctgcgcctaccaggtggcccgaggcatggagtatctggcctccaagaaggtgtggaacctgaaggctcccctgggtaatgccagggtgggaacagagcccccctagtcttccagcctgtgacttatca

SEQ ID NO: 305717 - DNA, 602 bp, Homo sapiens
accaagagatcatcactaagggagcagtgggactgggatccccatggggagggtgtccgtgttcatctggaactgcactagccttggtgaaatctaggggtccctaggaggaacctcagtgccccttcttcttcccatagatgctctcccctcctcggaggatgatgatgatgatgatgactcctcttcagaggagaaagaaacagataacaccaaaccaaaccgtatgcgtgagacactgtttcctatcttactgccctttgggtctgggcattgggtttaagaggggaggggaaggctgaaaggggaggaagaggagggcacatggggtcacggtgcctgttctgctaagtgccaggcactgctcacaggtgttgggcagatgggcaagacacctccaggtcctggcctgggccctgctcctgagcctgaccagctgctcctctccaccctgcctgtctctcttggctttccccgggcagccgtagctccatattggacatccccagaaaagatggaaaagaaattgcatgcagtgccggctgccaagacagtgaagttcaaatgcccttccagtgggaccccaaaccccacactgcgct

SEQ ID NO: 305718 - DNA, 562 bp, Homo sapiens
ccagccagtccacaagacaggcagaaaaaagttaaattaactggggcaaatagaactcatataacatccaaaacatgcaagattctgcagcaaactaggagtacttcagggttggtttgctatcttctttagaactaattttatcctaacagtttaagaaggtggacatttcaacaccatcttttaggtgacatgtttcttttgtgttaatttgactcccctgaatgacctagttagtaaactagtcactagtaattcagtcaccaggcaaatcaagcctgcaagaaagaaggccagtattcacaatgccgtgttatcagctgaacccactcaaatagtttattttaatcattaatatgtagcttcaataatgagatgtggacgcggtggctcatgcctgtaatcccagcactttgggaggccgaggtgggtggatcacttgaggttaggagtacaagaccaacctggctaatatggtgaaaccccgtctctactaaaaaaaaaatacaaaaattagctgggcgtggtggcgatcacctgtaatcctagctactcaggaggc

SEQ ID NO: 305719 - DNA, 1040 bp, Homo sapiens
tgagacggaggttcactctttttatccaggctggagtgcaatggcatgatctcggctcactgcaacccctgcctccccagcaggaacaatagtcataaatgcacttttcacactaaaggtttctttattagttctccagttaaacctagatccctccctggtagattgcgaactcaaagttttgtgatcccaaagccattccactgcaaatgcccagcagtgaagatggcctcaaattgggttcttgcctgcagtgtgtgtggcagcagcccatgtgcctttacctgttgtcaaacttgcaagcatttatttgtctttatgactgtcatggggactgaggttcttcagagaaagagtgtgagctgatgacacagtggttttacacccaccccctgggcagggagtttgcacgtagttgtgagctgtgagtggttagtgcattgctggtattgctgaaggcagggttgatccctcacttgactgatacttggattcaagagaatctagattgtgttgggggagggactgactgtactcatggctaacttaaagtattaaaataaggctgtcccctacaaccttcttagtcacacaggatccctgtagccaaaacagtatatgatccagctgcagagagcagactgctctcagcttgcacagcaccttaggcgagggaagaatatacggatagggaatggggtggagaaaggatgggaatgttgtcatccaggtggctttagggtcctaaggagtggagaaggatggcactggggaggtctggatggatctgtgtaggagttccctgtagataaattactgatcccccatctactatccccagtatgtaatggctgaattaatatgtaatcaactgcattgtatctaaagccttagaactagtcaggtgctccctccacccaataccatttcttaccctctaatcctacctgatctttaacaaagcattaataattctaaggataatctctattttgttgtgcttttttgtaactgttttaaataaatcaatttgtactgta

SEQ ID NO: 305720 - DNA, 556 bp, Homo sapiens
ttggctgtgtgtgacctcaggcaagctagtgaaccctgatgtggctccgttcacagatttctatgatggggataatatgttcccatctaggcaatatcatgaggatgtacgcactgatatatttaagggctcagaagagtacctgacacacagtgagcactatgaaatgcccccctgcatgacccgcagcatgcctggggcggaaggaggagaggtgttgcggtttgccctgctgcctccccagcaggaacaatagtcataaatgcacttttcacactaaaggtttctttattagttctccagttaaacctagatccctcccagtatgacaccccgaatgcccccccgaatgcatgcttcggggggaaaaaacaagatctgtcatttgtcatcagatggacgaagacagctacttgactcaaagagaacctgccgcgagtcttagtctttggaaggtcagacagctgcagtgttcggtcacatggagatggtgtcttcatgtctcagagaccgcacttctgtaggccagacgtgtgctcacctaacctacacacgc

SEQ ID NO: 305721 - DNA, 5370 bp, Homo sapiens
aggcaggatctgttgttcattaccccatggcatcctttcaggacaaccccagagggtgttgtgatggggagcagcaggcctggggcaaggaaggaagggggtgcacacaggagaagaaacattccaaaatcagggcctccctgttctttcctccccatccctagctcctgcaagagaaagtccaggctttgggagcagatggcagagggagggagtaaagaaagagccaaaaatgatgatccacagcttatagtagcagttaaactgtcagaagttttttttcttttttgtggtagaagggcaggaggccccaaggttggaaataagagggttcccacccagaacccttcttgtgagagatgcgcactttaaagggtgattttgttccagatgtctatggctgggtgtgtgggggaggagcactctcatctgcaggactctgcttgatcctctgcttcatagcccttccccatctctcctcaccattctgcctacaaggcttctagcagcacgggggcccggagggagagccccttcagggttcagagtgaagtactaccttgccagggactcagtcaggggactttgggagaaagacttgatagccaggctgactgggttctaggcaggccctctggaaagggtagctcacctaacaaagctcctccaactcagcatgccagacccactttgaaatctcacagaatcttgctggtaatggtgactttagaactagtagaccctttttcctaggcactgaccccccacctttgtctgtgttgtgcccaagtgcctgcgccacccccaccctcctgctgcgctgaccgctgcatggtgtcgtgacctgggcctcatttgtagctgcactgcctttccttgtctgcaaagttggttttgtccactctgaccaagacctctagtttttggtgggtagggggtctctctggtttccccttcagctataatctctatttttaaaatctcaaaatcatgtcccctccacttccactgccaaacagcttggtgaagaaacaagaagggaactatgccctgggccagggcgaatgcgtggctgggcagtgcccatcatggcattttcacatgtcccatatgcccctcctgtcttattccactgcttctcccagcattctggtgcctccaagccatcccctcccaccaccagctctaagattctaggatagtcttgataacatttcagtacctgaatagatgtcattttgtgttggtatattcctctgcaaaaagtattttcaatcttggttgcattggcaccccccctaccccccaccaatgtcttaatcccacattttcttcacaacttttagcatcagctcagaccgtggggttccactgggtattgggaattaggctcccccactagctttcaggtgggtaagtttttttgtttgtttttgggggtctttagactcttgaaggcaactcagggtattgtccacgcagctctctggttagacttctcccaggctatgatcctggcatgtcctttataaggtatacttggattggccgagacctggcctggcatcaggagtccaaacctctgaggtctgatctctgctctgtcaaggactttcggcaagtctcgtgacctctggctctttcacttcctccccacctgccaaatggggataaataatcttacctacctcctggggggaggggaagttctgagaatggagtcattcttagtgttcaggtgctaaaggttgttctcctgggggaacagagtgactgaaactggcttgtttgctacaagccctaccctccactctttcattccttgaaagcagtttgcctggtcagtcagcttttgggggtccatcaaaggaggttgctgacctgaccgtgagtgcttcagtatctggtttgtgtcagaaccagacgccaactttgtactgcatttgggatcatatctttccccttctctgtcccccattctctgaatgctgctttctctggcttgtttcctacagtgggggcctgtggggttgagtcttgaggaatcccctcaaatgagaaggccttgggagaaggcctcatctctggctgtttcatgagcaactcattcctagagttcattgtttgcatgggtttctcacaagcgtccttcctcataggaaggctcatcaactgaatttagtgacatgtacacagtagatgctcaagcagtgtctgcaaggacacaagctgagctttctccttatggggcaaacctatgtctaaccagatacagaccaattagtttagatcaaatcaccttccacttgggctacttgtgactttccaacctggtaacttccactgaattctggaaagagaaattcttgaggaccctggcaagttgggccctgacctttctgttgctgtctcttgctggtgaagcaataccagcagttcctgtaataccacaatatcgttccatgcatatataacatattaatacttgattttgctgagctgcaaaggtatctgtcataaaatatggtccccaggaaaagaatctctgtgctctaaatctcggtcagagctgtggcctcccccttgcctttaacctctagtttagtcttttcctccaggcatgaaaaatatgactaacctgtggtgtgtccattcttccttataggaatttcctgagtttgcaggagacatgagagcagtttttagcgagtattttagtgggaagttgccaactttttaagaatgagcagttgacaagggccagagcctgtcccttgtcagcagtaggacatttccagctcttaggaatagaaaggaggactgctgactgtctggcgctgtataaaaatgtgtataccaatttgggaataggggaacccagtcatggatggataataagccaagtcttgaatcattcctatcaagattagtatacatgaggaagaggtggcatggggggaaggggctctgggagttcagagctgagtacttgtacctgagggagggcccccagccaatctgggctggtccttctatattcttggtcccagttggtcataacaccaagggctttgccctgcgctgctttgccactgctgctgtccgctcactgtcctgcctgctgtcctctacagctccctatccttccatgtctttggccatgtagattaagtgtaggcgtccggttcattcttacctgtgttaggccatgttattttatagcgaagtcatgttcgatagggatggtatgaaatgctgctggtgggctggtaaatccaaagggataaggcttcagtgctgttgggagccctttggctccaaatgtctgactatcttgagggagaaacaagcaggtttctactagtggtgtcttctgttgtattaacttctttcctttgtggtatcttgtatcctgttttaaaaactaaatgaagggaaccacattagggcccatgccagcatcccagtgaagttcgtccagctccagttaggtggattctggagttcggagagggtttaaagtttggctgaaatagcacctcaagtggggtttagttttatttttacctgcgggcatcatgggcgatttagggggaagcacaggatggtggtgtggtttaaacctgcagcaagcaggcatgttgaagagttgagtgatcacgctggagatgaagggttggacatggattgactgggaaaaggcctgggtccattggagtaaagataacctagtcgattgaattggccatgggaagttaggtcacagtcttataaacaaagtaaataggacagagactaagttttagggagacatcttggcctcctaggctaagtttactaaaccacactgaagctatagtaccttccagatgggcaaaagtgtacactacagttgaggagctgaaccttattaggttggatgtcgatcaggaacctgtttgccctttgctgggaagccttcactctccagctttcctggggtagggaaggtctcccacattatgcaataataaaataagcatctgggtctttgcagctgtcagttgctctttcaactctaggatccatctttggaccagaagcctggtctgtgcctaggatgacactggccccagagatgctagagtcgactgcactctctccttagctgcagaccatgcacagtgcctggggcggaaggaggagaggtgttgcggtttgccctgctgcctccccagcaggaacaatagtcataaatgcacttttcacactaaaggtttctttattagttctccagttaaacctagatccctccctggtagattgcgaactcaaagttttgtgatcccaaagccattccactgcaaatgcccagcagtgaagatggcctcaaattgggttcttgcctgcagtgtgtgtggcagcagcccatgtgcctttacctgttgtcaaacttgcaagcatttatttgtctttatgactgtcatggggactgaggttcttcagagaaagagtgtgagctgatgacacagtggttttacacccaccccctgggcagggagtttgcacgtagttgtgagctgtgagtggttagtgcattgctggtattgctgaaggcagggttgatccctcacttgactgatacttggattcaagagaatctagattgtgttgggggagggactgactgtactcatggctaacttaaagtattaaaataaggctgtcccctacaaccttcttagtcacacaggatccctgtagccaaaacagtatatgatccagctgcagagagcagactgctctcagcttgcacagcaccttaggcgagggaagaatatacggatagggaatggggtggagaaaggatgggaatgttgtcatccaggtggctttagggtcctaaggagtggagaaggatggcactggggaggtctggatggatctgtgtaggagttccctgtagataaattactgatcccccatctactatccccagtatgtaatggctgaattaatatgtaatcaactgcattgtatctaaagccttagaactagtcaggtgctccctccacccaataccatttcttaccctctaatcctacctgatctttaacaaagcattaataattctaaggataatctctattttgttgtgcttttttgtaactgttttaaataaatcaatttgtactgtatatttgtacttttgtgagatcctttttgctgttttaccattttaagtctctgtacttggctacacacagattgtatttttattgttaatgctcttcttatggatacctgcatttaacttgtggactatgtaaacacaatatctatcaatatctatatatctatatatctatctatataaactactagcttttc

SEQ ID NO: 305722 - DNA, 5177 bp, Homo sapiens
aggcaggatctgttgttcattaccccatggcatcctttcaggacaaccccagagggtgttgtgatggggagcagcaggcctggggcaaggaaggaagggggtgcacacaggagaagaaacattccaaaatcagggcctccctgttctttcctccccatccctagctcctgcaagagaaagtccaggctttgggagcagatggcagagggagggagtaaagaaagagccaaaaatgatgatccacagcttatagtagcagttaaactgtcagaagttttttttcttttttgtggtagaagggcaggaggccccaaggttggaaataagagggttcccacccagaacccttcttgtgagagatgcgcactttaaagggtgattttgttccagatgtctatggctgggtgtgtgggggaggagcactctcatctgcaggactctgcttgatcctctgcttcatagcccttccccatctctcctcaccattctgcctacaaggcttctagcagcacgggggcccggagggagagccccttcagggttcagagtgaagtactaccttgccagggactcagtcaggggactttgggagaaagacttgatagccaggctgactgggttctaggcaggccctctggaaagggtagctcacctaacaaagctcctccaactcagcatgccagacccactttgaaatctcacagaatcttgctggtaatggtgactttagaactagtagaccctttttcctaggcactgaccccccacctttgtctgtgttgtgcccaagtgcctgcgccacccccaccctcctgctgcgctgaccgctgcatggtgtcgtgacctgggcctcatttgtagctgcactgcctttccttgtctgcaaagttggttttgtccactctgaccaagacctctagtttttggtgggtagggggtctctctggtttccccttcagctataatctctatttttaaaatctcaaaatcatgtcccctccacttccactgccaaacagcttggtgaagaaacaagaagggaactatgccctgggccagggcgaatgcgtggctgggcagtgcccatcatggcattttcacatgtcccatatgcccctcctgtcttattccactgcttctcccagcattctggtgcctccaagccatcccctcccaccaccagctctaagattctaggatagtcttgataacatttcagtacctgaatagatgtcattttgtgttggtatattcctctgcaaaaagtattttcaatcttggttgcattggcaccccccctaccccccaccaatgtcttaatcccacattttcttcacaacttttagcatcagctcagaccgtggggttccactgggtattgggaattaggctcccccactagctttcaggtgggtaagtttttttgtttgtttttgggggtctttagactcttgaaggcaactcagggtattgtccacgcagctctctggttagacttctcccaggctatgatcctggcatgtcctttataaggtatacttggattggccgagacctggcctggcatcaggagtccaaacctctgaggtctgatctctgctctgtcaaggactttcggcaagtctcgtgacctctggctctttcacttcctccccacctgccaaatggggataaataatcttacctacctcctggggggaggggaagttctgagaatggagtcattcttagtgttcaggtgctaaaggttgttctcctgggggaacagagtgactgaaactggcttgtttgctacaagccctaccctccactctttcattccttgaaagcagtttgcctggtcagtcagcttttgggggtccatcaaaggaggttgctgacctgaccgtgagtgcttcagtatctggtttgtgtcagaaccagacgccaactttgtactgcatttgggatcatatctttccccttctctgtcccccattctctgaatgctgctttctctggcttgtttcctacagtgggggcctgtggggttgagtcttgaggaatcccctcaaatgagaaggccttgggagaaggcctcatctctggctgtttcatgagcaactcattcctagagttcattgtttgcatgggtttctcacaagcgtccttcctcataggaaggctcatcaactgaatttagtgacatgtacacagtagatgctcaagcagtgtctgcaaggacacaagctgagctttctccttatggggcaaacctatgtctaaccagatacagaccaattagtttagatcaaatcaccttccacttgggctacttgtgactttccaacctggtaacttccactgaattctggaaagagaaattcttgaggaccctggcaagttgggccctgacctttctgttgctgtctcttgctggtgaagcaataccagcagttcctgtaataccacaatatcgttccatgcatatataacatattaatacttgattttgctgagctgcaaaggtatctgtcataaaatatggtccccaggaaaagaatctctgtgctctaaatctcggtcagagctgtggcctcccccttgcctttaacctctagtttagtcttttcctccaggcatgaaaaatatgactaacctgtggtgtgtccattcttccttataggaatttcctgagtttgcaggagacatgagagcagtttttagcgagtattttagtgggaagttgccaactttttaagaatgagcagttgacaagggccagagcctgtcccttgtcagcagtaggacatttccagctcttaggaatagaaaggaggactgctgactgtctggcgctgtataaaaatgtgtataccaatttgggaataggggaacccagtcatggatggataataagccaagtcttgaatcattcctatcaagattagtatacatgaggaagaggtggcatggggggaaggggctctgggagttcagagctgagtacttgtacctgagggagggcccccagccaatctgggctggtccttctatattcttggtcccagttggtcataacaccaagggctttgccctgcgctgctttgccactgctgctgtccgctcactgtcctgcctgctgtcctctacagctccctatccttccatgtctttggccatgtagattaagtgtaggcgtccggttcattcttacctgtgttaggccatgttattttatagcgaagtcatgttcgatagggatggtatgaaatgctgctggtgggctggtaaatccaaagggataaggcttcagtgctgttgggagccctttggctccaaatgtctgactatcttgagggagaaacaagcaggtttctactagtggtgtcttctgttgtattaacttctttcctttgtggtatcttgtatcctgttttaaaaactaaatgaagggaaccacattagggcccatgccagcatcccagtgaagttcgtccagctccagttaggtggattctggagttcggagagggtttaaagtttggctgaaatagcacctcaagtggggtttagttttatttttacctgcgggcatcatgggcgatttagggggaagcacaggatggtggtgtggtttaaacctgcagcaagcaggcatgttgaagagttgagtgatcacgctggagatgaagggttggacatggattgactgggaaaaggcctgggtccattggagtaaagataacctagtcgattgaattggccatgggaagttaggtcacagtcttataaacaaagtaaataggacagagactaagttttagggagacatcttggcctcctaggctaagtttactaaaccacactgaagctatagtaccttccagatgggcaaaagtgtacactacagttgaggagctgaaccttattaggttggatgtcgatcaggaacctgtttgccctttgctgggaagccttcactctccagctttcctggggtagggaaggtctcccacattatgcaataataaaataagcatctgggtctttgcagctgtcagttgctctttcaactctaggatccatctttggaccagaagcctggtctgtgcctaggatgacactggccccagagatgctagagtcgactgcactctctccttagctgcagaccatgcacagtgcctggggcggaaggaggagaggtgttgcggtttgccctgctgcctccccagcaggaacaatagtcataaatgcacttttcacactaaaggtttctttattagttctccagttaaacctagatccctccctggtagattgcgaactcaaagttttgtgatcccaaagccattccactgcaaatgcccagcagtgaagatggcctcaaattgggttcttgcctgcagtgtgtgtggcagcagcccatgtgcctttacctgttgtcaaacttgcaagcatttatttgtctttatgactgtcatggggactgaggttcttcagagaaagagtgtgagctgatgacacagtggttttacacccaccccctgggcagggagtttgcacgtagttgtgagctgtgagtggttagtgcattgctggtattgctgaaggcagggttgatccctcacttgactgatacttggattcaagagaatctagattgtgttgggggagggactgactgtactcatggctaacttaaagtattaaaataaggctgtcccctacaaccttcttagtcacacaggatccctgtagccaaaacagtatatgatccagctgcagagagcagactgctctcagcttgcacagcaccttaggcgagggaagaatatacggatagggaatggggtggagaaaggatgggaatgttgtcatccaggtggctttagggtcctaaggagtggagaaggatggcactggggaggtctggatggatctgtgtaggagttccctgtagataaattactgatcccccatctactatccccagtatgtaatggctgaattaatatgtaatcaactgcattgtatctaaagccttagaactagtcaggtgctccctccacccaataccatttcttaccctctaatcctacctgatctttaacaaagcattaataattctaaggataatctctattttgttgtgcttttttgtaactgttttaaataaatcaatttgtactgta

SEQ ID NO: 305723 - DNA, 4054 bp, Homo sapiens
cctcactcccactccacaccaccactaggcagagagctggtttaaataggagaggctgggtattgggaattaggctcccccactagctttcaggtgggtaagtttttttgtttgtttttgggggtctttagactcttgaaggcaactcagggtattgtccacgcagctctctggttagacttctcccaggctatgatcctggcatgtcctttataaggtatacttggattggccgagacctggcctggcatcaggagtccaaacctctgaggtctgatctctgctctgtcaaggactttcggcaagtctcgtgacctctggctctttcacttcctccccacctgccaaatggggataaataatcttacctacctcctggggggaggggaagttctgagaatggagtcattcttagtgttcaggtgctaaaggttgttctcctgggggaacagagtgactgaaactggcttgtttgctacaagccctaccctccactctttcattccttgaaagcagtttgcctggtcagtcagcttttgggggtccatcaaaggaggttgctgacctgaccgtgagtgcttcagtatctggtttgtgtcagaaccagacgccaactttgtactgcatttgggatcatatctttccccttctctgtcccccattctctgaatgctgctttctctggcttgtttcctacagtgggggcctgtggggttgagtcttgaggaatcccctcaaatgagaaggccttgggagaaggcctcatctctggctgtttcatgagcaactcattcctagagttcattgtttgcatgggtttctcacaagcgtccttcctcataggaaggctcatcaactgaatttagtgacatgtacacagtagatgctcaagcagtgtctgcaaggacacaagctgagctttctccttatggggcaaacctatgtctaaccagatacagaccaattagtttagatcaaatcaccttccacttgggctacttgtgactttccaacctggtaacttccactgaattctggaaagagaaattcttgaggaccctggcaagttgggccctgacctttctgttgctgtctcttgctggtgaagcaataccagcagttcctgtaataccacaatatcgttccatgcatatataacatattaatacttgattttgctgagctgcaaaggtatctgtcataaaatatggtccccaggaaaagaatctctgtgctctaaatctcggtcagagctgtggcctcccccttgcctttaacctctagtttagtcttttcctccaggcatgaaaaatatgactaacctgtggtgtgtccattcttccttataggaatttcctgagtttgcaggagacatgagagcagtttttagcgagtattttagtgggaagttgccaactttttaagaatgagcagttgacaagggccagagcctgtcccttgtcagcagtaggacatttccagctcttaggaatagaaaggaggactgctgactgtctggcgctgtataaaaatgtgtataccaatttgggaataggggaacccagtcatggatggataataagccaagtcttgaatcattcctatcaagattagtatacatgaggaagaggtggcatggggggaaggggctctgggagttcagagctgagtacttgtacctgagggagggcccccagccaatctgggctggtccttctatattcttggtcccagttggtcataacaccaagggctttgccctgcgctgctttgccactgctgctgtccgctcactgtcctgcctgctgtcctctacagctccctatccttccatgtctttggccatgtagattaagtgtaggcgtccggttcattcttacctgtgttaggccatgttattttatagcgaagtcatgttcgatagggatggtatgaaatgctgctggtgggctggtaaatccaaagggataaggcttcagtgctgttgggagccctttggctccaaatgtctgactatcttgagggagaaacaagcaggtttctactagtggtgtcttctgttgtattaacttctttcctttgtggtatcttgtatcctgttttaaaaactaaatgaagggaaccacattagggcccatgccagcatcccagtgaagttcgtccagctccagttaggtggattctggagttcggagagggtttaaagtttggctgaaatagcacctcaagtggggtttagttttatttttacctgcgggcatcatgggcgatttagggggaagcacaggatggtggtgtggtttaaacctgcagcaagcaggcatgttgaagagttgagtgatcacgctggagatgaagggttggacatggattgactgggaaaaggcctgggtccattggagtaaagataacctagtcgattgaattggccatgggaagttaggtcacagtcttataaacaaagtaaataggacagagactaagttttagggagacatcttggcctcctaggctaagtttactaaaccacactgaagctatagtaccttccagatgggcaaaagtgtacactacagttgaggagctgaaccttattaggttggatgtcgatcaggaacctgtttgccctttgctgggaagccttcactctccagctttcctggggtagggaaggtctcccacattatgcaataataaaataagcatctgggtctttgcagctgtcagttgctctttcaactctaggatccatctttggaccagaagcctggtctgtgcctaggatgacactggccccagagatgctagagtcgactgcactctctccttagctgcagaccatgcacagtgcctggggcggaaggaggagaggtgttgcggtttgccctgctgcctccccagcaggaacaatagtcataaatgcacttttcacactaaaggtttctttattagttctccagttaaacctagatccctccctggtagattgcgaactcaaagttttgtgatcccaaagccattccactgcaaatgcccagcagtgaagatggcctcaaattgggttcttgcctgcagtgtgtgtggcagcagcccatgtgcctttacctgttgtcaaacttgcaagcatttatttgtctttatgactgtcatggggactgaggttcttcagagaaagagtgtgagctgatgacacagtggttttacacccaccccctgggcagggagtttgcacgtagttgtgagctgtgagtggttagtgcattgctggtattgctgaaggcagggttgatccctcacttgactgatacttggattcaagagaatctagattgtgttgggggagggactgactgtactcatggctaacttaaagtattaaaataaggctgtcccctacaaccttcttagtcacacaggatccctgtagccaaaacagtatatgatccagctgcagagagcagactgctctcagcttgcacagcaccttaggcgagggaagaatatacggatagggaatggggtggagaaaggatgggaatgttgtcatccaggtggctttagggtcctaaggagtggagaaggatggcactggggaggtctggatggatctgtgtaggagttccctgtagataaattactgatcccccatctactatccccagtatgtaatggctgaattaatatgtaatcaactgcattgtatctaaagccttagaactagtcaggtgctccctccacccaataccatttcttaccctctaatcctacctgatctttaacaaagcattaataattctaaggataatctctattttgttgtgcttttttgtaactgttttaaataaatcaatttgtactgtatatttgtacttttgtgagatcctttttgctgttttaccattttaagtctctgtacttggctacacacagattgtatttttattgttaatgctcttcttatggatacctgcatttaacttgtggactatgtaaacacaatatctatcaatatctatatatctatatatctatctatataaactactagcttttc

SEQ ID NO: 305724 - DNA, 1233 bp, Homo sapiens
tgagacggaggttcactctttttatccaggctggagtgcaatggcatgatctcggctcactgcaacccctgcctccccagcaggaacaatagtcataaatgcacttttcacactaaaggtttctttattagttctccagttaaacctagatccctccctggtagattgcgaactcaaagttttgtgatcccaaagccattccactgcaaatgcccagcagtgaagatggcctcaaattgggttcttgcctgcagtgtgtgtggcagcagcccatgtgcctttacctgttgtcaaacttgcaagcatttatttgtctttatgactgtcatggggactgaggttcttcagagaaagagtgtgagctgatgacacagtggttttacacccaccccctgggcagggagtttgcacgtagttgtgagctgtgagtggttagtgcattgctggtattgctgaaggcagggttgatccctcacttgactgatacttggattcaagagaatctagattgtgttgggggagggactgactgtactcatggctaacttaaagtattaaaataaggctgtcccctacaaccttcttagtcacacaggatccctgtagccaaaacagtatatgatccagctgcagagagcagactgctctcagcttgcacagcaccttaggcgagggaagaatatacggatagggaatggggtggagaaaggatgggaatgttgtcatccaggtggctttagggtcctaaggagtggagaaggatggcactggggaggtctggatggatctgtgtaggagttccctgtagataaattactgatcccccatctactatccccagtatgtaatggctgaattaatatgtaatcaactgcattgtatctaaagccttagaactagtcaggtgctccctccacccaataccatttcttaccctctaatcctacctgatctttaacaaagcattaataattctaaggataatctctattttgttgtgcttttttgtaactgttttaaataaatcaatttgtactgtatatttgtacttttgtgagatcctttttgctgttttaccattttaagtctctgtacttggctacacacagattgtatttttattgttaatgctcttcttatggatacctgcatttaacttgtggactatgtaaacacaatatctatcaatatctatatatctatatatctatctatataaactactagcttttc

SEQ ID NO: 305725 - DNA, 498 bp, Homo sapiens
ttaattcgcggccttgtcgactaatgatggcactggggaggtctggatggatctgtgtaggagttccctgtagataaattactgatcccccatctactatccccagtatgtaatggctgaattaatatgtaatcaactgcattgtatctaaagccttagaactagtcaggtgctccctccacccaataccatttcttaccctctaatcctacctgatctttaacaaagcattaataattctaaggataatctctattttgttgtgcttttttgtaactgttttaaataaatcaatttgtactgtatatttgtacttttgtgagatcctttttgctgttttaccattttaagtctctgtacttggctacacacagattgtatttttattgttaatgctcttcttatggatacctgcatttaacttgtggactatgtaaacacaatatctatcaatatctatatatctatatatctatctatataaactactagcttttc

SEQ ID NO: 305726 - DNA, 3875 bp, Homo sapiens
cagtttgcaaaagccagaggtgcaagaagcagcgactgcagcagcagcagcagcagcggcggtggcagcagcagcagcagcggcggcagcagcagcagcagcggaggcaccggtggcagcagcagcatcaccagcaacaacaacaaaaaaaaatcctcatcaaatcctcacctaagctttcagtgtatccagatccacatcttcactcaagccaggagagggaaagaggaaaggggggcaggaaaaaaaaaaaacccaacaacttagcggaaacttctcagagaatgctccaaaactcagcagtgcttctggtgctggtgatcagtgcttctgcaacccatgaggcggagcagaatgactctgtgagccccaggaaatcccgagtggcggctcaaaactcagctgaagtggttcgttgcctcaacagtgctctacaggtcggctgcggggcttttgcatgcctggaaaactccacctgtgacacagatgggatgtatgacatctgtaaatccttcttgtacagcgctgctaaatttgacactcagggaaaagcattcgtcaaagagagcttaaaatgcatcgccaacggggtcacctccaaggtcttcctcgccattcggaggtgctccactttccaaaggatgattgctgaggtgcaggaagagtgctacagcaagctgaatgtgtgcagcatcgccaagcggaaccctgaagccatcactgaggtcgtccagctgcccaatcacttctccaacagatactataacagacttgtccgaagcctgctggaatgtgatgaagacacagtcagcacaatcagagacagcctgatggagaaaattgggcctaacatggccagcctcttccacatcctgcagacagaccactgtgcccaaacacacccacgagctgacttcaacaggagacgcaccaatgagccgcagaagctgaaagtcctcctcaggaacctccgaggtgaggaggactctccctcccacatcaaacgcacatcccatgagagtgcataaccagggagaggttattcacaacctcaccaaactagtatcattttaggggtgttgacacaccaattttgagtgtactgtgcctggtttgatttttttaaagtagttcctattttctatcccccttaaagaaaattgcatgaaactaggcttctgtaatcaatatcccaacattctgcaatggcagcattcccaccaacaaaatccatgtgatcattctgcctctcctcaggagaaagtaccctcttttaccaacttcctctgccatgtttttcccctgctcccctgagaccacccccaaacacaaaacattcatgtaactctccagccattgtaatttgaagatgtggatccctttagaacggttgccccagtagagttagctgataaggaaactttatttaaatgcatgtcttaaatgctcataaagatgttaaatggaattcgtgttatgaatctgtgctggccatggacgaatatgaatgtcacatttgaattcttgatctctaatgagctagtgtcttatggtcttgatcctccaatgtctaattttctttccgacacatttaccaaattgcttgagcctggctgtccaaccagactttgagcctgcatcttcttgcatctaatgaaaaacaaaaagctaacatctttacgtactgtaactgctcagagctttaaaagtatctttaacaattgtcttaaaaccagagaatcttaaggtctaactgtggaatataaatagctgaaaactaatgtactgtacataaattccagaggactctgcttaaacaaagcagtatataataactttattgcatatagatttagttttgtaacttagctttatttttcttttcctgggaatggaataactatctcacttccagatatccacataaatgctccttgtggccttttttataactaagggggtagaagtagttttaattcaacatcaaaacttaagatgggcctgtatgagacaggaaaaaccaacaggtttatctgaaggaccccaggtaagatgttaatctcccagcccacctcaacccagaggctactcttgacttagacctatactgaaagatctctgtcacatccaactggaaattccaggaaccaaaaagagcatccctatgggcttggaccacttacagtgtgataaggcctactatacattaggaagtggcagttctttactcgtcccctttcatcggtgcctggtactctggcaaatgatgatggggtgggagactttccattaaatcaatcaggaatgagtcaatcagcctttaggtctttagtccgggggacttggggctgagagagtataaataaccctgggctgtccagccttaatagacttctcttacattttcgtcctgtagcacgctgcctgccaaagtagtcctggcagctggaccatctctgtaggatcgtaaaaaaatagaaaaaaagaaaaaaaaaagaaagaaagagggaaaaagagctggtggtttgatcatttctgccatgatgtttacaagatggcgaccaccaaagtcaaacgactaacctatctatgaacaacagtagtttctcagggtcactgtccttgaacccaacagtcccttatgagcgtcactgcccaccaaaggtcaatgtcaagagaggaagagagggaggaggggtaggactgcaggggccactccaaactcgcttaggtagaaactattggtgcttgactctcactaggctaaactcaagatttgaccaaatcgagtgatagggatcctggtgggaggagagagggcacatctccagaaaaatgaaaagcaatacaactttaccataaagcctttaaaaccagtaacgtgctgctcaaggaccaagagcaattgcagcagacccagcagcagcagcagcagcacaaacattgctgcctttgtccccacacagcctctaagcgtgctgacatcagattgttaagggcatttttatactcagaactgtcccatccccaggtccccaaacttatggacactgccttagcctcttggaaatcaggtagaccatattctaagttagactcttcccctccctcccacacttcccacccccaggcaaggctgacttctctgaatcagaaaagctattaaagtttgtgtgttgtgtccattttgcaaacccaactaagccaggaccccaatgcgacaagtagttcatgagtattcctagcaaatttctctctttcttcagttcagtagatttccttttttcttttcttttttttttttttttttttttggctgtgacctcttcaaaccgtggtacccccccttttctccccacgatgatatctatatatgtatctacaatacatatatctacacatacagaaagaagcagttctcacaatgttgctagttttttgcttctctttcccccaccctactccctccaattcccccttaaacttccaaagcttcgtcttgtgtttgctgcagagtgattcgggggctgacctagaccagtttgcatgattcttctcttgtgatttggttgcactttagacatttttgtgccattatatttgcattatgtatttataatttaaatgatatttaggtttttggctgagtactggaataaacagtgagcatatctggtatatgtcattatttattgttaaattacatttttaagctccatgtgcatataaaggttatgaaacatatcatggtaatgacagatgcaagttattttatttgcttatttttataattaaagatgccatagcataatatgaagcctttggtgaattccttctaagataaaaataataataaagtgttacgttttattggt

SEQ ID NO: 305727 - DNA, 4363 bp, Homo sapiens
acccctgtcctgcatactttctttgctgaggttgggccatacctctccctggttatgcactctcatgtgattctgccttccgatgtcggtacgtgagagtcctcctcaccttcggaggttcctgaggaggacttctcagctttctgcggctccttgctgcgttctcctgctgaacgttcagcttcgtggttgtcatttggacacactggtctgtccgcaggatgttggaagaggactgcccatgttaggcccaattttctcccattcacggctgtctctgaattgtgctgaccgtgtcttcatcacagttccagcagcgcttcggacaagtcctgttatagtatctgttcggagaagtgatctgggcagcttggcacgacctcagtgactggcttcacgggcttccgcttgcacgatgctgcacacaattcagcattgctgtagcactcttcctgcacctcagcaatcatcctttggcaaagtggagcacctccgaatggacgaggaagaccttggaggtgaccccgttggcgatgcattttaagctctctttgacgtaatgcttttccctgagtgtcacatttagcagcgctgtaccacgaaggatttacagatgtcatacatcccatctgtgtcacatgctggagttttccaggcatgcaaaagccccgcagcctgacctgtagagcactagtttgacggcaacgtaaccactctcatgctcgaagttcttgatgccgccatctcgggatcttcctggggttctcagagaatgctccaaaactcagcagtgcttctggtgctggtgatcagtgcttctgcaacccatgaggcggagcagaatgactctgtgagccccaggaaatcccgagtggcggctcaaaactcagctgaagtggttcgttgcctcaacagtgctctacaggtcggctgcggggcttttgcatgcctggaaaactccacctgtgacacagatgggatgtatgacatctgtaaatccttcttgtacagcgctgctaaatttgacactcagggaaaagcattcgtcaaagagagcttaaaatgcatcgccaacggggtcacctccaaggtcttcctcgccattcggaggtgctccactttccaaaggatgattgctgaggtgcaggaagagtgctacagcaagctgaatgtgtgcagcatcgccaagcggaaccctgaagccatcactgaggtcgtccagctgcccaatcacttctccaacagatactataacagacttgtccgaagcctgctggaatgtgatgaagacacagtcagcacaatcagagacagcctgatggagaaaattgggcctaacatggccagcctcttccacatcctgcagacagaccactgtgcccaaacacacccacgagctgacttcaacaggagacgcaccaatgagccgcagaagctgaaagtcctcctcaggaacctccgaggtgaggaggactctccctcccacatcaaacgcacatcccatgagagtgcataaccagggagaggttattcacaacctcaccaaactagtatcattttaggggtgttgacacaccaattttgagtgtactgtgcctggtttgatttttttaaagtagttcctattttctatcccccttaaagaaaattgcatgaaactaggcttctgtaatcaatatcccaacattctgcaatggcagcattcccaccaacaaaatccatgtgatcattctgcctctcctcaggagaaagtaccctcttttaccaacttcctctgccatgtttttcccctgctcccctgagaccacccccaaacacaaaacattcatgtaactctccagccattgtaatttgaagatgtggatccctttagaacggttgccccagtagagttagctgataaggaaactttatttaaatgcatgtcttaaatgctcataaagatgttaaatggaattcgtgttatgaatctgtgctggccatggacgaatatgaatgtcacatttgaattcttgatctctaatgagctagtgtcttatggtcttgatcctccaatgtctaattttctttccgacacatttaccaaattgcttgagcctggctgtccaaccagactttgagcctgcatcttcttgcatctaatgaaaaacaaaaagctaacatctttacgtactgtaactgctcagagctttaaaagtatctttaacaattgtcttaaaaccagagaatcttaaggtctaactgtggaatataaatagctgaaaactaatgtactgtacataaattccagaggactctgcttaaacaaagcagtatataataactttattgcatatagatttagttttgtaacttagctttatttttcttttcctgggaatggaataactatctcacttccagatatccacataaatgctccttgtggccttttttataactaagggggtagaagtagttttaattcaacatcaaaacttaagatgggcctgtatgagacaggaaaaaccaacaggtttatctgaaggaccccaggtaagatgttaatctcccagcccacctcaacccagaggctactcttgacttagacctatactgaaagatctctgtcacatccaactggaaattccaggaaccaaaaagagcatccctatgggcttggaccacttacagtgtgataaggcctactatacattaggaagtggcagttctttactcgtcccctttcatcggtgcctggtactctggcaaatgatgatggggtgggagactttccattaaatcaatcaggaatgagtcaatcagcctttaggtctttagtccgggggacttggggctgagagagtataaataaccctgggctgtccagccttaatagacttctcttacattttcgtcctgtagcacgctgcctgccaaagtagtcctggcagctggaccatctctgtaggatcgtaaaaaaatagaaaaaaagaaaaaaaaaagaaagaaagagggaaaaagagctggtggtttgatcatttctgccatgatgtttacaagatggcgaccaccaaagtcaaacgactaacctatctatgaacaacagtagtttctcagggtcactgtccttgaacccaacagtcccttatgagcgtcactgcccaccaaaggtcaatgtcaagagaggaagagagggaggaggggtaggactgcaggggccactccaaactcgcttaggtagaaactattggtgcttgactctcactaggctaaactcaagatttgaccaaatcgagtgatagggatcctggtgggaggagagagggcacatctccagaaaaatgaaaagcaatacaactttaccataaagcctttaaaaccagtaacgtgctgctcaaggaccaagagcaattgcagcagacccagcagcagcagcagcagcacaaacattgctgcctttgtccccacacagcctctaagcgtgctgacatcagattgttaagggcatttttatactcagaactgtcccatccccaggtccccaaacttatggacactgccttagcctcttggaaatcaggtagaccatattctaagttagactcttcccctccctcccacacttcccacccccaggcaaggctgacttctctgaatcagaaaagctattaaagtttgtgtgttgtgtccattttgcaaacccaactaagccaggaccccaatgcgacaagtagttcatgagtattcctagcaaatttctctctttcttcagttcagtagatttccttttttcttttcttttttttttttttttttttttggctgtgacctcttcaaaccgtggtacccccccttttctccccacgatgatatctatatatgtatctacaatacatatatctacacatacagaaagaagcagttctcacaatgttgctagttttttgcttctctttcccccaccctactccctccaattcccccttaaacttccaaagcttcgtcttgtgtttgctgcagagtgattcgggggctgacctagaccagtttgcatgattcttctcttgtgatttggttgcactttagacatttttgtgccattatatttgcattatgtatttataatttaaatgatatttaggtttttggctgagtactggaataaacagtgagcatatctggtatatgtcattatttattgttaaattacatttttaagctccatgtgcatataaaggttatgaaacatatcatggtaatgacagatgcaagttattttatttgcttatttttataattaaagatgccatagcataatatgaagcctttggtgaattccttctaagataaaaataataataaagtgttacgttttattggt

SEQ ID NO: 305728 - DNA, 3857 bp, Homo sapiens
cagtttgcaaaagccagaggtgcaagaagcagcgactgcagcagcagcagcagcagcggcggtggcagcagcagcagcagcggcggcagcagcagcagcagcggaggcaccggtggcagcagcagcatcaccagcaacaacaacaaaaaaaaatcctcatcaaatcctcacctaagctttcagtgtatccagatccacatcttcactcaagccaggagagggaaagaggaaaggggggcaggaaaaaaaaaaaacccaacaacttagcggaaacttctcagagaatgctccaaaactcagcagtgcttctggtgctggtgatcagtgcttctgcaacccatgaggcggagcagaatgactctgtgagccccaggaaatcccgagtggcggctcaaaactcagctgaagtggttcgttgcctcaacagtgctctacaggtcggctgcggggcttttgcatgcctggaaaactccacctgtgacacagatgggatgtatgacatctgtaaatccttcttgtacagcgctgctaaatttgacactcagggaaaagcattcgtcaaagagagcttaaaatgcatcgccaacggggtcacctccaaggtcttcctcgccattcggaggtgctccactttccaaaggatgattgctgaggtgcaggaagagtgctacagcaagctgaatgtgtgcagcatcgccaagcggaaccctgaagccatcactgaggtcgtccagctgcccaatcacttctccaacagatactataacagacttgtccgaagcctgctggaatgtgatgaagacacagtcagcacaatcagagacagcctgatggagaaaattgggcctaacatggccagcctcttccacatcctgcagacagaccactgtgcccaaacacacccacgagctgacttcaacaggagacgcaccaatgagccgcagaagctgaaagtcctcctcaggaacctccgaggtgaggaggactctccctcccacatcaaacgcacatcccatgagagtgcataaccagggagaggttattcacaacctcaccaaactagtatcattttaggggtgttgacacaccaattttgagtgtactgtgcctggtttgatttttttaaagtagttcctattttctatcccccttaaagaaaattgcatgaaactaggcttctgtaatcaatatcccaacattctgcaatggcagcattcccaccaacaaaatccatgtgatcattctgcctctcctcaggagaaagtaccctcttttaccaacttcctctgccatgtttttcccctgctcccctgagaccacccccaaacacaaaacattcatgtaactctccagccattgtaatttgaagatgtggatccctttagaacggttgccccagtagagttagctgataaggaaactttatttaaatgcatgtcttaaatgctcataaagatgttaaatggaattcgtgttatgaatctgtgctggccatggacgaatatgaatgtcacatttgaattcttgatctctaatgagctagtgtcttatggtcttgatcctccaatgtctaattttctttccgacacatttaccaaattgcttgagcctggctgtccaaccagactttgagcctgcatcttcttgcatctaatgaaaaacaaaaagctaacatctttacgtactgtaactgctcagagctttaaaagtatctttaacaattgtcttaaaaccagagaatcttaaggtctaactgtggaatataaatagctgaaaactaatgtactgtacataaattccagaggactctgcttaaacaaagcagtatataataactttattgcatatagatttagttttgtaacttagctttatttttcttttcctgggaatggaataactatctcacttccagatatccacataaatgctccttgtggccttttttataactaagggggtagaagtagttttaattcaacatcaaaacttaagatgggcctgtatgagacaggaaaaaccaacaggtttatctgaaggaccccaggtaagatgttaatctcccagcccacctcaacccagaggctacttgaaagatctctgtcacatccaactggaaattccaggaaccaaaaagagcatccctatgggcttggaccacttacagtgtgataaggcctactatacattaggaagtggcagttctttactcgtcccctttcatcggtgcctggtactctggcaaatgatgatggggtgggagactttccattaaatcaatcaggaatgagtcaatcagcctttaggtctttagtccgggggacttggggctgagagagtataaataaccctgggctgtccagccttaatagacttctcttacattttcgtcctgtagcacgctgcctgccaaagtagtcctggcagctggaccatctctgtaggatcgtaaaaaaatagaaaaaaagaaaaaaaaaagaaagaaagagggaaaaagagctggtggtttgatcatttctgccatgatgtttacaagatggcgaccaccaaagtcaaacgactaacctatctatgaacaacagtagtttctcagggtcactgtccttgaacccaacagtcccttatgagcgtcactgcccaccaaaggtcaatgtcaagagaggaagagagggaggaggggtaggactgcaggggccactccaaactcgcttaggtagaaactattggtgcttgactctcactaggctaaactcaagatttgaccaaatcgagtgatagggatcctggtgggaggagagagggcacatctccagaaaaatgaaaagcaatacaactttaccataaagcctttaaaaccagtaacgtgctgctcaaggaccaagagcaattgcagcagacccagcagcagcagcagcagcacaaacattgctgcctttgtccccacacagcctctaagcgtgctgacatcagattgttaagggcatttttatactcagaactgtcccatccccaggtccccaaacttatggacactgccttagcctcttggaaatcaggtagaccatattctaagttagactcttcccctccctcccacacttcccacccccaggcaaggctgacttctctgaatcagaaaagctattaaagtttgtgtgttgtgtccattttgcaaacccaactaagccaggaccccaatgcgacaagtagttcatgagtattcctagcaaatttctctctttcttcagttcagtagatttccttttttcttttcttttttttttttttttttttttggctgtgacctcttcaaaccgtggtacccccccttttctccccacgatgatatctatatatgtatctacaatacatatatctacacatacagaaagaagcagttctcacaatgttgctagttttttgcttctctttcccccaccctactccctccaattcccccttaaacttccaaagcttcgtcttgtgtttgctgcagagtgattcgggggctgacctagaccagtttgcatgattcttctcttgtgatttggttgcactttagacatttttgtgccattatatttgcattatgtatttataatttaaatgatatttaggtttttggctgagtactggaataaacagtgagcatatctggtatatgtcattatttattgttaaattacatttttaagctccatgtgcatataaaggttatgaaacatatcatggtaatgacagatgcaagttattttatttgcttatttttataattaaagatgccatagcataatatgaagcctttggtgaattccttctaagataaaaataataataaagtgttacgttttattggt

SEQ ID NO: 305729 - DNA, 413 bp, Homo sapiens
gcaagaagcagcgactgcagcagcagcagcagcagcggcggtggcagcagcagcagcagcggcggcagcagcagcagcagcggaggcaccggtggcagcagcagcatcaccagcaacaacaacaaaaaaaaatcctcatcaaatcctcacctaagctttcagtgtatccagatccacatcttcactcaagccaggagagggaaagaggaaaggggggcaggaaaaaaaaaaaacccaacaacttagcggaaacttctcagagaatgctccaaaactcagcagtgcttctggtgctggtgatcagtgcttctgcaacccatgaggcggagcagaatgactctgtgagccccaggaaatcccgagtggcggctcaaaactcaggtaagcagcaaacccaagagcggtttctcccc

SEQ ID NO: 305730 - DNA, 1395 bp, Homo sapiens
tccggggcagactaagttgttcttccggggtgactgcctcttccagggcgggcggtgtggtgcacgcattgctgtgctccaactccctcagggcctgtgttgccgcactctgctgctatgagcttcctcaaaagtttcccgccgcctgggccagcggaggggctcctgcggcagcagccagacactgaggctgtgctgaacgggaagggcctcggcactggtaccctttacatcgctgagagccgcctgtcttggttagatggctctggattaggattctcactggaataccccaccattagtttacatgcattatccagggaccgaagtgactgtctaggagagcatttgtatgttatggtgaatgccaaatttgaagaagaatcaaaagaacctgttgctgatgaagaagaggaagacagtgatgatgatgttgaacctattactgaatttagatttgtgcctagtgataaatcagcgttggaggcaatgttcactgcaatgtgcgaatgccaggccttgcatccagatcctgaggatgaggattcagatgactacgatggagaagaatatgatgtggaagcacatgaacaaggacagggggacatccctacattttacacctatgaagaaggattatcccatctaacagcagaaggccaagccacactggagagattagaaggaatgctttctcagtctgtgagcagccagtataatatggctggggtcaggacagaagattcaataagagattatgaagatgggatggaggtggataccacaccaacagttgctggacagtttgaggatgcagatgttgatcactgaaaatgatttatgcaagtttaagattctgctcctaagtgtaggagagaacttggtgcctcttccactctggagtgaagttaatgaaagtctttttccttttccaaaacccaacctgaaccagttctttcttgagacagactatactgagacaacaagttgtcaccagcagaagatagataatatgacctttattaacttgatgaattaacttaaccaagagggtatttgtagtttactatttaccctaaaactttctgtgtctgggtaccctctgagtaggcctataattcctaccttgactgtgtgcatcatttgtaagctagcagatctatgtggtgaaaatgcacaggagcttggtagactgcgggggaaagagagagctcctttcgccatgttttaccagtctgctgttataacctcttaggttgtatcctttaatttccagccttttaggttagtttctgtaacagaacaagtgagtctgggatgaagtcctcaaagtacttcaaatggtaattgttttgtttttgtaatagcttaacaaataaacctaggttttctata

SEQ ID NO: 305731 - DNA, 1358 bp, Homo sapiens
ggtcgtagctcatgccggcgggcggcggccgggcctgtgctccaactccctcagggcctgtgttgccgcactctgctgctatgagcttcctcaaaagtttcccgccgcctgggccagcggaggggctcctgcggcagcagccagacactgaggctgtgctgaacgggaagggcctcggcactggtaccctttacatcgctgagagccgcctgtcttggttagatggctctggattaggattctcactggaataccccaccattagtttacatgcattatccagggaccgaagtgactgtctaggagagcatttgtatgttatggtgaatgccaaatttgaagaagaatcaaaagaacctgttgctgatgaagaagaggaagacagtgatgatgatgttgaacctattactgaatttagatttgtgcctagtgataaatcagcgttggaggcaatgttcactgcaatgtgcgaatgccaggccttgcatccagatcctgaggatgaggattcagatgactacgatggagaagaatatgatgtggaagcacatgaacaaggacagggggacatccctacattttacacctatgaagaaggattatcccatctaacagcagaaggccaagccacactggagagattagaaggaatgctttctcagtctgtgagcagccagtataatatggctggggtcaggacagaagattcaataagagattatgaagatgggatggaggtggataccacaccaacagttgctggacagtttgaggatgcagatgttgatcactgaaaatgatttatgcaagtttaagattctgctcctaagtgtaggagagaacttggtgcctcttccactctggagtgaagttaatgaaagtctttttccttttccaaaacccaacctgaaccagttctttcttgagacagactatactgagacaacaagttgtcaccagcagaagatagataatatgacctttattaacttgatgaattaacttaaccaagagggtatttgtagtttactatttaccctaaaactttctgtgtctgggtaccctctgagtaggcctataattcctaccttgactgtgtgcatcatttgtaagctagcagatctatgtggtgaaaatgcacaggagcttggtagactgcgggggaaagagagagctcctttcgccatgttttaccagtctgctgttataacctcttaggttgtatcctttaatttccagccttttaggttagtttctgtaacagaacaagtgagtctgggatgaagtcctcaaagtacttcaaatggtaattgttttgtttttgtaatagcttaacaaataaacctaggttttctata

SEQ ID NO: 305732 - DNA, 1545 bp, Homo sapiens
cacaagaaataaagaccatagttggaggttaatggacagccagaactttagatcttgtggtaggtttcccagctctggagggtcattatggtgaaacgttctttatagtactgggctggaataaataaatagcagttgaggaattttaccttgtaactgtaatataatgtaaaaagaaagcacacttttaataaccctggtatgtgaagaggaaagaaaaaaaatccaaaacaatttggtggtactgaaaatcttacggagagttaaaaataatactaatcctcgcccggctgaactggaattcttgcagttacaaagttaaaatttcaagtaaacactgtatttttcactttttgtagacagacacagtgcagatacaaacagctgccatatctcacctcagatgaagctatgtgtcaatgcttagggaaaatgatcttagataatttcccaattttatagagcttaaatctttgaaaacagcactaatactgctggttgactggctatctacaacagcaaagtgaacataaagttttgacgatgagaggtttcccaaagaaactaatatagagtttttagttgaacagatacagttactttagttttgtgcctagtgataaatcagcgttggaggcaatgttcactgcaatgtgcgaatgccaggccttgcatccagatcctgaggatgaggattcagatgactacgatggagaagaatatgatgtggaagcacatgaacaaggacagggggacatccctacattttacacctatgaagaaggattatcccatctaacagcagaaggccaagccacactggagagattagaaggaatgctttctcagtctgtgagcagccagtataatatggctggggtcaggacagaagattcaataagagattatgaagatgggatggaggtggataccacaccaacagttgctggacagtttgaggatgcagatgttgatcactgaaaatgatttatgcaagtttaagattctgctcctaagtgtaggagagaacttggtgcctcttccactctggagtgaagttaatgaaagtctttttccttttccaaaacccaacctgaaccagttctttcttgagacagactatactgagacaacaagttgtcaccagcagaagatagataatatgacctttattaacttgatgaattaacttaaccaagagggtatttgtagtttactatttaccctaaaactttctgtgtctgggtaccctctgagtaggcctataattcctaccttgactgtgtgcatcatttgtaagctagcagatctatgtggtgaaaatgcacaggagcttggtagactgcgggggaaagagagagctcctttcgccatgttttaccagtctgctgttataacctcttaggttgtatcctttaatttccagccttttaggttagtttctgtaacagaacaagtgagtctgggatgaagtcctcaaagtacttcaaatggtaattgttttgtttttgtaatagcttaacaaataaacctaggttttctata

SEQ ID NO: 305733 - DNA, 1899 bp, Homo sapiens
  misc_feature (1400)..(1400): n is a, c, g, or t
tccggggcagactaagttgttcttccggggtgactgcctcttccagggcgggcggtgtggtgcacgcattgctgtgctccaactccctcagggcctgtgttgccgcactctgctgctatgagcttcctcaaaagtttcccgccgcctgggccagcggaggggctcctgcggcagcagccagacactgaggctgtgctgaacgggaagggcctcggcactggtaccctttacatcgctgagagccgcctgtcttggttagatggctctggattaggattctcactggaataccccaccattagtttacatgcattatccagggaccgaagtgactgtctaggagagcatttgtatgttatggtgaatgccaaatttgaagaagaatcaaaagaacctgttgctgatgaagaagaggaagacagtgatgatgatgttgaacctattactgaatttagatttgtgcctagtgataaatcagcgttggaggcaatgttcactgcaatgtgcgaatgccaggccttgcatccagatcctgaggatgaggattcagatgactacgatggagaagaatatgatgtggaagcacatgaacaaggacagggggacatccctacattttacacctatgaagaaggattatcccatctaacagcagaaggccaagccacactggagagattagaaggaatgctttctcagtctgtgagcagccagtataatatggctggggtcaggacagaagattcaataagagattatgaagatgggatggaggtggataccacaccaacagttgctggacagtttgaggatgcagatgttgatcactgaaaatgatttatgcaagtttaagattctgctcctaagtgtaggagagaacttggtgcctcttccactctggagtgaagttaatgaaagtctttttccttttccaaaacccaacctgaaccagttctttcttgagacagactatactgagacaacaagttgtcaccagcagaagatagataatatgacctttattaacttgatgaattaacttaaccaagagggtatttgtagtttactatttaccctaaaactttctgtgtctgggtaccctctgagtaggcctataattcctaccttgactgtgtgcatcatttgtaagctagcagatctatgtggtgaaaatgcacaggagcttggtagactgcgggggaaagagagagctcctttcgccatgttttaccagtctgctgttataacctcttaggttgtatcctttaatttccagccttttaggttagtttctgtaacagaacaagtgagtctgggatgaagtcctcaaagtacttcaaatggtaattgttttgtttttgtaatagcttaacaaataaacctaggttttctataaaaanaacacaaacaaacacaaacaacaaaaaaaaaacaaaacaaaaaacaaaacaacaaacaacacaaaaacacaaaacaaggggggcgcccaccaaaaactaccccccgggggagacgacataagaagcacacgccaacgagcttatattatgacaaaaagagggctccacataacgagaacgaacaaataaaagccacaaccaaccaggccgagataaaaaaaacagcgtcgagcgagcaacacaccacacctatgcgtgcactatagtaagagagagaccccccacaaacgccgggcgggaggggaaaaacaaaggataaagcaaacacaaccacaccacgaacaaaaaataacaacccgacacgaagaaccaccaaaagacaacaaccaaaaaaaaaaacaaagaccgagaaaaaaccagagcacaaaaaatctgccgcgcaaacacaaacaaaccgacctctcacacgacacccacacacgccacaaactgaattccg

SEQ ID NO: 305734 - DNA, 1636 bp, Homo sapiens
tccggggcagactaagttgttcttccggggtgactgcctcttccagggcgggcggtgtggtgcacgcattgctgtgctccaactccctcagggcctgtgttgccgcactctgctgctatgagcttcctcaaaagtttcccgccgcctgggccagcggaggggctcctgcggcagcagccagacactgaggctgtgctgaacgggaagggcctcggcactggtaccctttacatcgctgagagccgcctgtcttggttagatggctctggattaggattctcactggaataccccaccattagtttacatgcattatccagggaccgaagtgactgtctaggagagcatttgtatgttatggtgaatgccaaatttgaagaagaatcaaaagaacctgttgctgatgaagaagaggaagacagtgatgatgatgttgaacctattactgaatttagatttgtgcctagtgataaatcagcgttggaggcaatgttcactgcaatgtgcgaatgccaggccttgcatccagatcctgaggatgaggattcagatgactacgatggagaagaatatgatgtggaagcacatgaacaaggacagggggacatccctacattttacacctatgaagaaggattatcccatctaacagcagaaggccaagccacactggagagattagaaggaatgctttctcagtctgtgagcagccagtataatatggctggggtcaggacagaagattcaataagagattatgaagatgggatggaggtggataccacaccaacagttgctggacagtttgaggatgcagatgttgatcactgaaaatgatttatgcaagtttaagattctgctcctaagtgtaggagagaacttggtgcctcttccactctggagtgaagttaatgaaagtctttttccttttccaaaacccaacctgaaccagttctttcttgagacagactatactgagacaacaagttgtcaccagcagaagatagataatatgacctttattaacttgatgaattaacttaaccaagagggtatttgtagtttactatttaccctaaaactttctgtgtctgggtaccctctgagtaggcctataattcctaccttgactgtgtgcatcatttgtaagctagcagatctatgtggtgaaaatgcacaggagcttggtagactgcgggggaaagagagagctcctttcgccatgttttaccagtctgctgttataacctcttaggttgtatcctttaatttccagccttttaggttagtttctgtaacagaacaagtgagtctgggatgaagtcctcaaagtacttcaaatggtaattgttttgtttttgtaatagcttaacaaataaacctaggttttctataaaaaaaagaacgaaattaaaataaataaaaaaaaaaaaaagaggggggggggaaaaagaattcccaggggggcgaaatttaggggcgaccggttttttttacaagggggcccctatgggggtgtttaaaaaaagcagggaaggataaaaaggaaggaaaacggggcgtgatttgtgggaggcactttgtgtgtgtgtaattggaaacaccaaattggcggaaataatgttgttgtacaggt

SEQ ID NO: 305735 - DNA, 1582 bp, Homo sapiens
tccggggcagactaagttgttcttccggggtgactgcctcttccagggcgggcggtgtggtgcacgcattgctgtgctccaactccctcagggcctgtgttgccgcactctgctgctatgagcttcctcaaaagtttcccgccgcctgggccagcggaggggctcctgcggcagcagccagacactgaggctgtgctgaacgggaagggcctcggcactggtaccctttacatcgctgagagccgcctgtcttggttagatggctctggattaggattctcactggaataccccaccattagtttacatgcattatccagggaccgaagtgactgtctaggagagcatttgtatgttatggtgaatgccaaatttgaagaagaatcaaaagaacctgttgctgatgaagaagaggaagacagtgatgatgatgttgaacctattactgaatttagatttgtgcctagtgataaatcagcgttggaggcaatgttcactgcaatgtgcgaatgccaggccttgcatccagatcctgaggatgaggattcagatgactacgatggagaagaatatgatgtggaagcacatgaacaaggacagggggacatccctacattttacacctatgaagaaggattatcccatctaacagcagaaggccaagccacactggagagattagaaggaatgctttctcagtctgtgagcagccagtataatatggctggggtcaggacagaagattcaataagagattatgaagatgggatggaggtggataccacaccaacagttgctggacagtttgaggatgcagatgttgatcactgaaaatgatttatgcaagtttaagattctgctcctaagtgtaggagagaacttggtgcctcttccactctggagtgaagttaatgaaagtctttttccttttccaaaacccaacctgaaccagttctttcttgagacagactatactgagacaacaagttgtcaccagcagaagatagataatatgacctttattaacttgatgaattaacttaaccaagagggtatttgtagtttactatttaccctaaaactttctgtgtctgggtaccctctgagtaggcctataattcctaccttgactgtgtgcatcatttgtaagctagcagatctatgtggtgaaaatgcacaggagcttggtagactgcgggggaaagagagagctcctttcgccatgttttaccagtctgctgttataacctcttaggttgtatcctttaatttccagccttttaggttagtttctgtaacagaacaagtgagtctgggatgaagtcctcaaagtacttcaaatggtaattgttttgtttttgtaatagcttaacaaataaacctaggttttctatattttaaaagaaaaaagagttgtaaaccaaaaaaatagcattatgtgaaaacccttcggggggggcccggtacccaaatccccttataaggggaccctgttcccccccgctcaatgggcggttgtttaaaaaacaatcttaactggggaaaaacccgggggggttacccaaaaattaattgcccttgg

SEQ ID NO: 305736 - DNA, 1520 bp, Homo sapiens
tccggggcagactaagttgttcttccggggtgactgcctcttccagggcgggcggtgtggtgcacgcattgctgtgctccaactccctcagggcctgtgttgccgcactctgctgctatgagcttcctcaaaagtttcccgccgcctgggccagcggaggggctcctgcggcagcagccagacactgaggctgtgctgaacgggaagggcctcggcactggtaccctttacatcgctgagagccgcctgtcttggttagatggctctggattaggattctcactggaataccccaccattagtttacatgcattatccagggaccgaagtgactgtctaggagagcatttgtatgttatggtgaatgccaaatttgaagaagaatcaaaagaacctgttgctgatgaagaagaggaagacagtgatgatgatgttgaacctattactgaatttagatttgtgcctagtgataaatcagcgttggaggcaatgttcactgcaatgtgcgaatgccaggccttgcatccagatcctgaggatgaggattcagatgactacgatggagaagaatatgatgtggaagcacatgaacaaggacagggggacatccctacattttacacctatgaagaaggattatcccatctaacagcagaaggccaagccacactggagagattagaaggaatgctttctcagtctgtgagcagccagtataatatggctggggtcaggacagaagattcaataagagattatgaagatgggatggaggtggataccacaccaacagttgctggacagtttgaggatgcagatgttgatcactgaaaatgatttatgcaagtttaagattctgctcctaagtgtaggagagaacttggtgcctcttccactctggagtgaagttaatgaaagtctttttccttttccaaaacccaacctgaaccagttctttcttgagacagactatactgagacaacaagttgtcaccagcagaagatagataatatgacctttattaacttgatgaattaacttaaccaagagggtatttgtagtttactatttaccctaaaactttctgtgtctgggtaccctctgagtaggcctataattcctaccttgactgtgtgcatcatttgtaagctagcagatctatgtggtgaaaatgcacaggagcttggtagactgcgggggaaagagagagctcctttcgccatgttttaccagtctgctgttataacctcttaggttgtatcctttaatttccagccttttaggttagtttctgtaacagaacaagtgagtctgggatgaagtcctcaaagtacttcaaatggtaattgttttgttggaatagttacaataactaggttttcaaaaaaaaaaagaaaaaaaaattgggggggcacgaaagtttaacattggggggggcagtaaaaaggaaggcaagaagggggaagggggttcacaaaaacggagggggacaaggtgggttggtaagtatttgtggggg

SEQ ID NO: 305737 - DNA, 1227 bp, Homo sapiens
tccggggcagactaagttgttcttccggggtgactgcctcttccagggcgggcggtgtggtgcacgcattgctgtgctccaactccctcagggcctgtgttgccgcactctgctgctatgagcttcctcaaaagtttcccgccgcctgggccagcggaggggctcctgcggcagcagccagacactgaggctgtgctgaacgggaagggcctcggcactggtaccctttacatcgctgagagccgcctgtcttggttagatggctctggattaggattctcactggaataccccaccattagtttacatgcattatccagggaccgaagtgactgtctaggagagcatttgtatgttatggtgaatgccaaatttgaagaagaatcaaaagaacctgttgctgatgaagaagaggaagacagtgatgatgatgttgaacctattactgaatttagatttgtgcctagtgataaatcagcgttggaggcaatgttcactgcaatgtgcgaatgccaggccttgcatccagatcctgaggatgaggattcagatgactacgatggagaagaatatgatgtggaagcacatgaacaaggacagggggacatccctacattttacacctatgaagaaggattatcccatctaacagcagaaggccaagccacactggagagattagaaggaatgctttctcagtctgtgagcagccagtataatatggctggggtcaggacagaagattcaataagagattatgaagatgggatggaggtggataccacaccaacagttgctggacagtttgaggatgcagatgttgatcactgaaaatgatttatgcaagtttaagattctgctcctaagtgtaggagagaacttggtgcctcttccactctggagtgaagttaatgaaagtctttttccttttccaaaacccaacctgaaccagttctttcttgagacagactatactgagacaacaagttgtcaccagcagaagatagataatatgacctttattaacttgatgaattaacttaaccaagagggtatttgtagtttactatttaccctaaaactttctgtgtctgggtaccctctgagtaggcctataattcctaccttgactgtgtgcatcatttgtaagctagcagatctatgtggtgaaaatgcacaggagcttggtagactgcggtgagattgcggtgtttgaggatcctctag

SEQ ID NO: 305738 - DNA, 1380 bp, Homo sapiens
tccggggcagactaagttgttcttccggggtgactgcctcttccagggcgggcggtgtggtgcacgcattgctgtgctccaactccctcagggcctgtgttgccgcactctgctgctatgagcttcctcaaaagtttcccgccgcctgggccagcggaggggctcctgcggcagcagccagacactgaggctgtgctgaacgggaagggcctcggcactggtaccctttacatcgctgagagccgcctgtcttggttagatggctctggattaggattctcactggaataccccaccattagtttacatgcattatccagggaccgaagtgactgtctaggagagcatttgtatgttatggtgaatgccaaatttgaagaagaatcaaaagaacctgttgctgatgaagaagaggaagacagtgatgatgatgttgaacctattactgaatttagatttgtgcctagtgataaatcagcgttggaggcaatgttcactgcaatgtgcgaatgccaggccttgcatccagatcctgaggatgaggattcagatgactacgatggagaagaatatgatgtggaagcacatgaacaaggacagggggacatccctacattttacacctatgaagaaggattatcccatctaacagcagaaggccaagccacactggagagattagaaggaatgctttctcagtctgtgagcagccagtataatatggctggggtcaggacagaagattcaataagagattatgaagatgggatggaggtggataccacaccaacagttgctggacagtttgaggatgcagatgttgatcactgaaaatgatttatgcaagtttaagattctgctcctaagtgtaggagagaacttggtgcctcttccactctggagtgaagttaatgaaagtctttttccttttccaaaacccaacctgaaccagttctttcttgagacagactatactgagacaacaagttgtcaccagcagaagatagataatatgacctttattaacttgatgaattaacttaaccaagagggtatttgtagtttactatttaccctaaaactttctgtgtctgggtaccctctgagtaggcctataattcctaccttgactgtgtgcatcatttgtaagctagcagatctatgtggtgaaaatgcacaggagcttggtagactgcggtgtttgcaaacaccgcaatctcctgcttggtgttgcgcagtcgtccccatgtctgctgctgtgacctgcagctcctcgtactttgtctgtaccaggactcagcctcagcctgctcctctgagcatctcctcatattggcctgacctagcgataatgctgtgcagtccagattgcgtgttttg

SEQ ID NO: 305739 - DNA, 1293 bp, Homo sapiens
tccggggcagactaagttgttcttccggggtgactgcctcttccagggcgggcggtgtggtgcacgcattgctgtgctccaactccctcagggcctgtgttgccgcactctgctgctatgagcttcctcaaaagtttcccgccgcctgggccagcggaggggctcctgcggcagcagccagacactgaggctgtgctgaacgggaagggcctcggcactggtaccctttacatcgctgagagccgcctgtcttggttagatggctctggattaggattctcactggaataccccaccattagtttacatgcattatccagggaccgaagtgactgtctaggagagcatttgtatgttatggtgaatgccaaatttgaagtggaggcaatgttcactgcaatgtgcgaatgccaggccttgcatccagatcctgaggatgaggattcagatgactacgatggagaagaatatgatgtggaagcacatgaacaaggacagggggacatccctacattttacacctatgaagaaggattatcccatctaacagcagaaggccaagccacactggagagattagaaggaatgctttctcagtctgtgagcagccagtataatatggctggggtcaggacagaagattcaataagagattatgaagatgggatggaggtggataccacaccaacagttgctggacagtttgaggatgcagatgttgatcactgaaaatgatttatgcaagtttaagattctgctcctaagtgtaggagagaacttggtgcctcttccactctggagtgaagttaatgaaagtctttttccttttccaaaacccaacctgaaccagttctttcttgagacagactatactgagacaacaagttgtcaccagcagaagatagataatatgacctttattaacttgatgaattaacttaaccaagagggtatttgtagtttactatttaccctaaaactttctgtgtctgggtaccctctgagtaggcctataattcctaccttgactgtgtgcatcatttgtaagctagcagatctatgtggtgaaaatgcacaggagcttggtagactgcgggggaaagagagagctcctttcgccatgttttaccagtctgctgttataacctcttaggttgtatcctttaatttccagccttttaggttagtttctgtaacagaacaagtgagtctgggatgaagtcctcaaagtacttcaaatggtaattgttttgtttttgtaatagcttaacaaataaacctaggttttctata

SEQ ID NO: 305740 - DNA, 1425 bp, Homo sapiens
tagcattggtaatatcattaaggaccaaatacctattaatatcaaaggttgtgaatgtagtgagaatattgtagacactctgtcatctgggtatattttgtgagtggactctggttagttttactgattggtgctgttgacttaatctcacctgctggatggcagaggagttatggcagttttaaagtggaagatctcaggatggctggaaagagccctatcagctgagagcagtcttcacccttcaccctgatgccagcagtcttaccaggactctgacccttttttcttggaaaatcccacgagccatgaagagattgcaatgatctctcataatggacttttttttttttatgacttgtcttttgcttcaaccgctttcaagattgatcttacaatttggcagattttgtaaatactgtggcgttttgtgtacccattaaatttatttgcactgatggttacttttattacaaaaaaagattggttacagtttaatttccttgttcagtggaggcaatgttcactgcaatgtgcgaatgccaggccttgcatccagatcctgaggatgaggattcagatgactacgatggagaagaatatgatgtggaagcacatgaacaaggacagggggacatccctacattttacacctatgaagaaggattatcccatctaacagcagaaggccaagccacactggagagattagaaggaatgctttctcagtctgtgagcagccagtataatatggctggggtcaggacagaagattcaataagagattatgaagatgggatggaggtggataccacaccaacagttgctggacagtttgaggatgcagatgttgatcactgaaaatgatttatgcaagtttaagattctgctcctaagtgtaggagagaacttggtgcctcttccactctggagtgaagttaatgaaagtctttttccttttccaaaacccaacctgaaccagttctttcttgagacagactatactgagacaacaagttgtcaccagcagaagatagataatatgacctttattaacttgatgaattaacttaaccaagagggtatttgtagtttactatttaccctaaaactttctgtgtctgggtaccctctgagtaggcctataattcctaccttgactgtgtgcatcatttgtaagctagcagatctatgtggtgaaaatgcacaggagcttggtagactgcgggggaaagagagagctcctttcgccatgttttaccagtctgctgttataacctcttaggttgtatcctttaatttccagccttttaggttagtttctgtaacagaacaagtgagtctgggatgaagtcctcaaagtacttcaaatggtaattgttttgtttttgtaatagcttaacaaataaacctaggttttctata

SEQ ID NO: 305741 - DNA, 1126 bp, Homo sapiens
tccggggcagactaagttgttcttccggggtgactgcctcttccagggcgggcggtgtggtgcacgcattgctgtgctccaactccctcagggcctgtgttgccgcactctgctgctatgagcttcctcaaaagtttcccgccgcctgggccagcggaggggctcctgcggcagcagccagacactgaggctgtgctgaacgggaagggcctcggcactggtaccctttacatcgctgagagccgcctgtcttggttagatggctctggattaggattctcactggaataccccaccattagtttacatgcattatccagggaccgaagtgactgtctaggagagcatttgtatgttatggtgaatgccaaatttgaagaagaatcaaaagaacctgttgctgatgaagaagaggaagacagtgatgatgatgttgaacctattactgaatttagatttgtgcctagtgataaatcagcgttggaggcaatgttcactgcaatgtgcgaatgccaggccttgcatccagatcctgaggatgaggattcagatgactacgatggagaagaatatgatgtggaagcacatgaacaaggacagggggacatccctacattttacacctatgaagaaggattatcccatctaacagcagaaggccaagccacactggagagattagaaggaatgctttctcagtctgtgagcagccagtataatatggctggggtcaggacagaagattcaataagagattatgaagatgggatggaggtggataccacaccaacagttgctggacagtttgaggatgcagatgttgatcactgaaaatgatttatgcaagtttaagattctgctcctaagtgtaggagagaacttggtgcctcttccactctggagtgaagttaatgaaagtctttttccttttccaaaacccaacctgaaccagttctttcttgagacagactatactgagacaacaagttgtcaccagcagaagatagataatatgacctttattaacttgatgaattaacttaaccaagagggtatttgtagtttactatttaccctaaaactttctgtgtctggatattcggcgtgtgcaggggatgctctagag

SEQ ID NO: 305742 - DNA, 1574 bp, Homo sapiens
tccggggcagactaagttgttcttccggggtgactgcctcttccagggcgggcggtgtggtgcacgcattgctgtgctccaactccctcagggcctgtgttgccgcactctgctgctatgagcttcctcaaaagtttcccgccgcctgggccagcggaggggctcctgcggcagcagccagacactgaggctgtgctgaacgggaagggcctcggcactggtaccctttacatcgctgagagccgcctgtcttggttagatggctctggattaggattctcactggaataccccaccattagtttacatgcattatccagggaccgaagtgactgtctaggagagcatttgtatgttatggtgaatgccaaatttgaagaagaatcaaaagaacctgttgctgatgaagaagaggaagacagtgatgatgatgttgaacctattactgaatttagatttgtgcctagtgataaatcagcgttggaggcaatgttcactgcaatgtgcgaatgccaggccttgcatccagatcctgaggatgaggattcagatgactacgatggagaagaatatgatgtggaagcacatgaacaaggacagggggacatccctacattttacacctatgaagaaggattatcccatctaacagcagaaggccaagccacactggagagattagaaggaatgctttctcagtctgtgagcagccagtataatatggctggggtcaggacagaagattcaataagagattatgaaggtatacacacacccaccaaagcaagagagagattttaagaaattggcccacgtgactgaaggctggcaagtccaaaatctgcatggtaagccggcagactggagacccagagaagagtttatgttgcattctgctgcctcagaagttctgctggcagaatttcttcttgctcaggggagatgggatggaggtggataccacaccaacagttgctggacagtttgaggatgcagatgttgatcactgaaaatgatttatgcaagtttaagattctgctcctaagtgtaggagagaacttggtgcctcttccactctggagtgaagttaatgaaagtctttttccttttccaaaacccaacctgaaccagttctttcttgagacagactatactgagacaacaagttgtcaccagcagaagatagataatatgacctttattaacttgatgaattaacttaaccaagagggtatttgtagtttactatttaccctaaaactttctgtgtctgggtaccctctgagtaggcctataattcctaccttgactgtgtgcatcatttgtaagctagcagatctatgtggtgaaaatgcacaggagcttggtagactgcgggggaaagagagagctcctttcgccatgttttaccagtctgctgttataacctcttaggttgtatcctttaatttccagccttttaggttagtttctgtaacagaacaagtgagtctgggatgaagtcctcaaagtacttcaaatggtaattgttttgtttttgtaatagcttaacaaataaacctaggttttctata

SEQ ID NO: 305743 - DNA, 1221 bp, Homo sapiens
tccggggcagactaagttgttcttccggggtgactgcctcttccagggcgggcggtgtggtgcacgcattgctgtgctccaactccctcagggcctgtgttgccgcactctgctgctatgagcttcctcaaaagtttcccgccgcctgggccagcggaggggctcctgcggcagcagccagacactgaggctgtgctgaacgggaagggcctcggcactggtaccctttacatcgctgagagccgcctgtcttggttagatggctctggattaggattctcactggaataccccaccattagtttacatgcattatccagggaccgaagtgactgtctaggagagcatttgtatgttatggtgaatgccaaatttgaagaagaatcaaaagaacctgttgctgatgaagaagaggaagacagtgatgatgatgttgaacctattactgaatttagatttgtgcctagtgataaatcagcgttggaggcaatgttcactgcaatgtgcgaatgccaggccttgcatccagatcctgaggatgaggattcagatgactacgatggagaagaatatgatgtggaagcacatgatgggatggaggtggataccacaccaacagttgctggacagtttgaggatgcagatgttgatcactgaaaatgatttatgcaagtttaagattctgctcctaagtgtaggagagaacttggtgcctcttccactctggagtgaagttaatgaaagtctttttccttttccaaaacccaacctgaaccagttctttcttgagacagactatactgagacaacaagttgtcaccagcagaagatagataatatgacctttattaacttgatgaattaacttaaccaagagggtatttgtagtttactatttaccctaaaactttctgtgtctgggtaccctctgagtaggcctataattcctaccttgactgtgtgcatcatttgtaagctagcagatctatgtggtgaaaatgcacaggagcttggtagactgcgggggaaagagagagctcctttcgccatgttttaccagtctgctgttataacctcttaggttgtatcctttaatttccagccttttaggttagtttctgtaacagaacaagtgagtctgggatgaagtcctcaaagtacttcaaatggtaattgttttgtttttgtaatagcttaacaaataaacctaggttttctata

SEQ ID NO: 305744 - DNA, 974 bp, Homo sapiens
tccggggcagactaagttgttcttccggggtgactgcctcttccagggcgggcggtgtggtgcacgcattgctgtgctccaactccctcagggcctgtgttgccgcactctgctgctatgagcttcctcaaaagtttcccgccgcctgggccagcggaggggctcctgcggcagcagccagacactgaggctgtgctgaacgggaagggcctcggcactggtaccctttacatcgctgagagccgcctgtcttggttagatggctctggattaggattctcactggaataccccaccattagtttacatgcattatccagggaccgaagtgactgtctaggagagcatttgtatgttatggtgaatgccaaatttgaagaagaatcaaaagaacctgttgctgatgaagaagaggaagacagtgatgatgatgttgaacctattactgaatttagatttgtgcctagtgataaatcagcgttggaggcaatgttcactgcaatgtgcgaatgccaggccttgcatccagatcctgaggatgaggattcagatgactacgatggagaagaatatgatgtggaagcacatgaacaaggacagggggacatccctacattttacacctatgaagaaggattatcccatctaacagcagaaggccaagccacactggagagattagaaggaatgctttctcagtctgtgagcagccagtataatatggctggggtcaggacagaagattcaataagagattatgaagatgggatggaggtggataccacaccaacagttgctggacagtttgaggatgcagatgttgatcactgaaaatgatttatgcaagtttaagattctgctcctaagtgtaggagagaacttggtgcctcttccactctggagttcagtggcgcgatctcggctcactgtaagcgccgcctcccggttcacgccgttctcctgctatgatgggt

SEQ ID NO: 305745 - DNA, 1152 bp, Homo sapiens
cacgccgcaccgccggttcaaatgattctcctgcctcatcctcccgagtagctgggattacaggcatgtgccaccacgcctggctaattttgtaattttagtagagacagtgtttctccatgtttggtaaggctggtcttgaacttctgacctcaggttatccgcctgccttggcctcccaaagtgctgggattacaggtgtgagccaccacacctggctgtgtaaatttttaatcatttaaaattgtacatgctttaaaagaatgaataaggaataaataattaagagtagtttatgcaactgttaataatttcaggataatggaactaggacttctcagtgcatgaggtggggtggagacggcacgttaatcgtggaatcacaactctgccacatacttgtgtacacctttggacaaggcatataacttatttaatcctcacttcccccatctgtaaaatggggaggataatacctaccttgcagggttgttgcagaggctaagataaaatgtacctaagtcctctggcactcgtgactaggcattcaataagtagtagctattattattatcactactgtaaacactgtaaaccttttgtttttcagattctgctcctaagtgtaggagagaacttggtgcctcttccactctggagtgaagttaatgaaagtctttttccttttccaaaacccaacctgaaccagttctttcttgagacagactatactgagacaacaagttgtcaccagcagaagatagataatatgacctttattaacttgatgaattaacttaaccaagagggtatttgtagtttactatttaccctaaaactttctgtgtctgggtaccctctgagtaggcctataattcctaccttgactgtgtgcatcatttgtaagctagcagatctatgtggtgaaaatgcacaggagcttggtagactgcgggggaaagagagagctcctttcgccatgttttaccagtctgctgttataacctcttaggttgtatcctttaatttccagccttttaggttagtttctgtaacagaacaagtgagtctgggatgaagtcctcaaagtacttcaaatggtaattgttttgtttttgtaatagcttaacaaataaacctaggttttctata

SEQ ID NO: 305746 - DNA, 975 bp, Homo sapiens
tccggggcagactaagttgttcttccggggtgactgcctcttccagggcgggcggtgtggtgcacgcattgctgtgctccaactccctcagggcctgtgttgccgcactctgctgctatgagcttcctcaaaagtttcccgccgcctgggccagcggaggggctcctgcggcagcagccagacactgaggctgtgctgaacgggaagggcctcggcactggtaccctttacatcgctgagagccgcctgtcttggttagatggctctggattaggattctcactggaataccccaccattagtttacatgcattatccagggaccgaagtgactgtctaggagagcatttgtatgttatggtgaatgccaaatttgaagaagaatcaaaagaacctgttgctgatgaagaagaggaagacagtgatgatgatgttgaacctattactgaatttagatttgtgcctagtgataaatcagcgttggaggcaatgttcactgcaatgtgcgaatgccaggccttgcatccagatcctgaggatgaggattcagatgactacgatggagaagaatatgatgtggaagcacatgaacaaggacagggggacatccctacattttacacctatgaagaaggattatcccatctaacagcagaaggccaagccacactggagagattagaaggaatgctttctcagtctgtgagcagccagtataatatggctggggtcaggacagaagattcaataagagattatgaagatgggatggaggtggataccacaccaacagttgctggacagtttgaggatgcagatgttgatcactgaaaatgatttatgcaagtttaaggtgagtagttcattttctcccttgtcgctgatcatgaaaatcatatgaaatgattactttctactttttaaaattctttcttgagacagggtcttactctgtcacccaggctagagtgcagt

SEQ ID NO: 305747 - DNA, 1130 bp, Homo sapiens
tccggggcagactaagttgttcttccggggtgactgcctcttccagggcgggcggtgtggtgcacgcattgctgtgctccaactccctcagggcctgtgttgccgcactctgctgctatgagcttcctcaaaagtttcccgccgcctgggccagcggaggggctcctgcggcagcagccagacactgaggctgtgctgaacgggaagggcctcggcactggtaccctttacatcgctgagagccgcctgtcttggttagatggctctggattaggattctcactggaataccccaccattagtttacatgcattatccagggaccgaagtgactgtctaggagagcatttgtatgttatggtgaatgccaaatttgaagaagaatcaaaagaacctgttgctgatgaagaagaggaagacagtgatgatgatgttgaacctattactgaatttagatttgtgcctagtgataaatcagcgttggaggcaatgttcactgcaatgtgcgaatgccaggccttgcatccagatcctgaggatgaggattcagatgactacgatggagaagaatatgatgtggaagcacatgaacaaggacagggggacatccctacattttacacctatgaagaaggattatcccatctaacagcagaaggccaagccacactggagagattagaaggaatgctttctcagtctgtgagcagccagtataatatggctggggtcaggacagaagattcaataagagattatgaaggtgagtgtccttttgcagtgtgaacagtcagatgagcacttgggcaataagttatggatagtcaatagaagttcttttaataactaagagaaagaattgactctctatagtataggaagcagatacagaattacatagtataggaatgcttatgtcatttgtttttagtgattttttttcctcattaccaaaaaagtctttgttcatagtcaaaaaaatttttttaatgtgcgcaagaaagtagaagtgaaaaagaaacaagtgtaattctaactgagagatatccactattaatttactgttgcatctgtgtattagtttgctagggctattataacaaagtgtcatacaggcggtggctcaaaca

SEQ ID NO: 305748 - DNA, 447 bp, Homo sapiens
tacttgtttgcagcggtactgtttgcagcggtactggtttgcagcggttactggtttgcagcgatactggtttgcacgcggtactggttcgcagcggcaagagggtatttgtagtttactatttaccctaaaactttctgtgtctgggtaccctctgagtaggcctataattcctaccttgactgtgtgcatcatttgtaagctagcagatctatgtggtgaaaatgcacaggagcttggtagactgcgggggaaagagagagctcctttcgccatgttttaccagtctgctgttataacctcttaggttgtatcctttaatttccagccttttaggttagtttctgtaacagaacaagtgagtctgggatgaagtcctcaaagtacttcaaatggtaattgttttgtttttgtaatagcttaacaaataaacctaggttttctata

SEQ ID NO: 305749 - DNA, 534 bp, Homo sapiens
  misc_feature (500)..(500): n is a, c, g, or t
tccggggcagactaagttgttcttccggggtgactgcctcttccagggcgggcggtgtggtgcacgcattgctgtgctccaactccctcagggcctgtgttgccgcactctgctgctatgagcttcctcaaaagtttcccgccgcctgggccagcggaggggctcctgcggcagcagccagacactgaggctgtgctgaacgggaagggcctcggcactggtaccctttacatcgctgagagccgcctgtcttggttagatggctctggattaggattctcactggaataccccaccattagtttacatgcattatccagggaccgaagtgactgtctaggagagcatttgtatgttatggtgaatgccaaatttgaagaagaatcaaaagaacctgttgctgatgaagaagaggaagacagtgatgatgatgttgaacctattactgaatttagatttgtgcctagtgataaatcagcgttggagacagaactgttcanagtcccaaatccaaataaactagttttgttctta

SEQ ID NO: 305750 - DNA, 371 bp, Homo sapiens
aagagtttatgttgcattctgctgcctcagaagttctgctggcagaatttcttcttgctcaggggaggtgagtctttttcctattgaggcctccagctgattaaatgagacccaccacactatgcagggtaatctccttcacccaattttcaccagtttacaaggctaatctcatctaaaaaataacctccacagaaacatctagaataatgtttgaccaactatctggacaccattgcctagccaagttgatgcataaatttaactatcacacccttctttttttcttaagatggagtttcgctcttgttgccgaggctggagtgcaatggcacgatcttggctcactacaacctccgcctcctgggttc

SEQ ID NO: 305751 - DNA, 444 bp, Homo sapiens
atttattgctgtttttcggtgagggtttgatggcagagttcctgaatccatctttgcttttcttttacagaacgcaatattcattataacatgtcttcttttaatgaatcagtcggtcttggctacttgaagacacatgcaattgaatttgtcaattataacaaacggcaaatgagtcgcatttaccccaagggaggccgagtcgattccagtaattacatgcctcagattttctggaacgctggctgccagatggtttcactgaactatcaaaccccaggtaggagctgatgtccagtgaccccaaattccatgagaacactttgacaggatggtgccagcacttcccatcagttggctgtgggcattttttaaaggaagcagacatatggcaaagcaatgtgttattggatttatataatggtgagaaataaaaaaaaaaaa

SEQ ID NO: 305752 - DNA, 715 bp, Homo sapiens
agatcaatcatacacaacttcagggccaacaacgtcagtccaatgacatgcctcaagaaacactggatgaaattggcatttatgaccaacacaaatggtaaaattccagttaggagtattactagaacatttgcatcgggaaaaacagaaaaggtgatctttcaagcactcaaggagttaggtcttcccagtggaaagaatgatgaaattgagcccacagcattttcttatgaaaagttctatgaactgacacaaaagatttgtcctcggacagatatagaagatcttttcaaaaaaatcatcaacgagatcctcgattgaatgaaattttatttccattttatgatgccaaaagggcaatgcagatcattgagatgtatgaacctgatgaagatttgaagaaaaaaggtaataaacatgaaaaaaggacttaaaaaaaaaaacaagaaaagatgcaacttttaaagccttggtttatttaaaggtatctgtaaatgctttgcaactccctgagccatggattgatgactatttttttttcctgctcttaagttcgtataaattttacctttcatcagaattagtcaatcctgactgaagtatactgttacatttattgtattattaaatacattatagtgatgtttccccatgtactttcttgtattagattttagtattgcatattgcttgaaatattaaaacaaccaataca

SEQ ID NO: 305753 - DNA, 5118 bp, Homo sapiens
gtgtgtccctccagtgccgcttgccccttgttctcccaagcaccagggggacccctgtcttagattcaagttgcatcactagactaacagctctgggaacagaggacactgaggactagtttgggaaatgaaaaacatctgcaatgagaggtaattttattctcctcttccttttaccctagtctcactctccatagtaggacctggatctttgcatcagagaaaacataatgaacaataactggaatgtgtgtttctttcttttctgccctagtattactagaacatttgcatcgggaaaaacagaaaaggtgatctttcaagcactcaaggagttaggtcttcccagtggaaagaatgatgaaattgagcccacagcattttcttatgaaaagttctatgaactgacacaaaagatttgtcctcggacagatatagaagatcttttcaaaaaaatcaatggagacaaaactgattatttaacggtagaccaattagtgagctttctaaatgaacatcaacgagatcctcgattgaatgaaattttatttccattttatgatgccaaaagggcaatgcagatcattgagatgtatgaacctgatgaagatttgaagaaaaaaggccttatatcaagtgatgggttttgcagatatctgatgtcagatgaaaacgccccagtcttcctagatcgtttagaactttaccaagaaatggaccatcctctggctcactacttcatcagttcttcccataacacttatctcactggcagacagttcggcgggaagtcttcggtagaaatgtacagacaggttctcctggctggttgcagatgtgttgaacttgactgctgggatggaaaaggtgaagaccaagaaccaataataactcatggaaaagcaatgtgtacagatatcctttttaaggatgtaattcaagccatcaaggaaactgcatttgtcacatcagaatatcctgtaattctctcctttgaaaatcactgcagcaaatatcaacagtacaagatgtccaaatattgcgaagatctatttggggatctcctgttgaaacaagcacttgaatcacatccacttgaaccaggcagggctttgccatcccccaatgacctcaaaagaaaaatactcataaaaaacaagcggctgaaacctgaagttgaaaaaaaacagctggaagctttgagaagcatgatggaagctggagaatctgcctccccagcaaacatcttagaggacgataatgaagaggagatcgaaagtgctgaccaagaggaggaagctcaccccgaattcaaatttggaaatgaactttctgctgatgacttgggtcacaaggaagctgttgcaaatagcgtcaagaagggcctggtcactgtagaagatgagcaggcgtggatggcatcttataaatatgtaggtgctaccactaatatccatccatatttgtccacaatgatcaactacgcccagcctgtaaagtttcaaggtttccatgtggcagaagaacgcaatattcattataacatgtcttcttttaatgaatcagtcggtcttggctacttgaagacacatgcaattgaatttgtcaattataacaaacggcaaatgagtcgcatttaccccaagggaggccgagtcgattccagtaattacatgcctcagattttctggaacgctggctgccagatggtttcactgaactatcaaaccccagatttagcgatgcaattgaatcagggaaaatttgagtataatggatcgtgcgggtaccttctcaaaccagatttcatgaggcggcctgatcgaacatttgaccccttctctgaaactcctgttgatggtgttattgcagccacttgctcagtgcaggttatatcaggtcaattcttatcagataagaaaattggcacctacgtagaggtggatatgtatgggttgcccactgacaccatacgtaaggaattccgaactcgcatggttatgaataatggactcaatccagtttacaatgaagagtcatttgtatttcggaaggtgatcctgccggacctggctgtcttgagaatagctgtgtatgatgataacaacaagctgattggccagaggatcctcccgcttgatggcctccaagccggatatcgacacatttcccttcgaaatgagggaaataaaccattatcactaccaacaattttctgcaatattgttcttaaaacatatgtgcctgatggatttggagatatcgtggatgctttatcagatccaaagaaatttctctcaattacagaaaagagagcagaccaaatgagagctatgggcattgaaactagtgacatagccgacgtgcccagtgacacttccaaaaatgacaagaaaggaaaggccaacaccgccaaagcaaatgtgacccctcagagtagctctgagctcagaccaaccaccacggctgccctggcctctggtgtggaagccaagaaaggtattgaacttatccctcaagtaaggatagaagacttaaagcagatgaaggcttacttgaagcatttaaagaaacagcagaaggagctaaattctttaaagaagaaacatgcaaaggaacacagtaccatgcagaagttacactgcacgcaagttgacaaaattgtggcacagtatgacaaagagaagtcgactcatgagaaaatcctagagaaggcaatgaagaagaaggggggaagtaattgtctcgaaatgaaaaaagaaacagaaatcaaaattcagacgctgacatcagatcacaaatctaaggtcaaagagattgtagcacagcacacaaaggaatggtcagaaatgatcaatacccacagtgctgaggagcaagaaatccgagacctgcacctcagccagcagtgtgagctgctgaaaaagctactcatcaatgcccacgagcagcaaacccagcagctgaaactgtcccatgacagggaaagcaaggaaatgcgagcacaccaggctaagatttctatggaaaatagcaaagccatcagccaagataaatctatcaagaataaagcagaacgggaaaggcgagtcagggagttaaacagcagcaacactaaaaagtttctggaagaaagaaagagacttgccatgaagcagtccaaagaaatggatcagttgaaaaaagtccagcttgaacatctagaattcctagagaaacagaatgagcaggcgaaggagatgcagcagatggtgaaattggaagccgagatggaccgcagaccagcaacagtagtatgaaactccaaaatgcaaactgaagcagcaaacccacaaagcatcaaaagactcactcacaaacttctgaacacaaactccatggatgaaagctgtttattttgtttcctttatgtgtaaacaagatgatatctgaaaccagagagacttggaatgtctgactgacttctatttaacagcttgagtattgcatttccttggccaaacaaaaatagctacaaatccacaaaaatttactattccagtaaggcagagtccaaccattgataatacaacttaaacatgtttgctataaaataccatcacaagtaaatgagcttggtgtgaacaactctcctttgtgatgccttaggacatgtttgaactgcagcaaaaaacaaaaacaaaaaacagtgcattagcaatttcatagcaagtgcatgcactaggaaaagaaaactctgtctacaagtttattagcagaagtggtggtctgctagacaaataattttgcaaaatttttctacatctaagttacctcatcagtaagtgccatgtctctaccatgccatcagaggctaatttcctgtaaaagttgtggaaattgttagaacaatagaaaaatagagcagtgtatgtgtgccaaaactcatcattactcaaaggagaactgtgttaggcacatttaagaaagtttacatctgacattgctttataggaattgtttctgcagattccggatattataattcacaccataaagattgtgaagtggttattggcaaacgtttgtaaatgtgaccatgtataaagtatttatactctttaattcacactgttagagagcaaaatcatctaagtattgccacatgacaagattagtaaacaggaatactagaactatgtttgcatgatacacaagcaccaataaagactaatccatacacagttaacctaatgccaaataaatactggttaaataaatgtatggcacagaatataatttgactatcaagacttttagcataatgaaaaaccctctctctatatatatatgtgtatatgaattatgtgggcattcttgatacttcaagttctagtttgaaaaaaatacataactaatttaattttacacaaaaatatttatgcagattttcagaatttcatatcaggaaatgacctttttatgtctgttaaatatcaaaacaatttgctacagtgttaatctgcatggtctttaagcctgctgtagttgagttgcagacagtgcatgaaaaagtattccgctgggaattgagccatgccaccaaagccaagaggagcgcatggaaacccggtagtctagaactaatcagattactgattttagggcacagcaccagatgaattgttgtatatgcttgtaaaaattgattctgtgtgttcctctgaacaaagcggagaaaatgatgataccatcaatattgaaattaaacttccaacttctctaataaaaaattaaaacacgcataacactcgtcaagagtatttgctcccaagacacattctagcaaatgttttgcctttttcatatacatgatatcatcgttattttcaaagggggcttattaataccctcagcatgtttttcacccaaatgatgcaaaacatgcagattctagttgacttcagttgtaatagacttgtttttctcctatttatgatttgaagtggattctgtaaaatatctcttgttcttagtttccttatctgtaaaacagtggagttagactacatatcttttggcactaacatctcatgaaaaattatggttaataaaatatcaccacatttggattgccaa

SEQ ID NO: 305754 - DNA, 5555 bp, Homo sapiens
  misc_feature (5362)..(5362): n is a, c, g, or t
gtgtgtccctccagtgccgcttgccccttgttctcccaagcaccagggggacccctgtcttagattcaagttgcatcactagactaacagctctgggaacagaggacactgaggactagtttgggaaatgaaaaacatctgcaatgagaggtaattttattctcctcttccttttaccctagtctcactctccatagtaggacctggatctttgcatcagagaaaacataatgaacaataactggaatgtgtgtttctttcttttctgccctagtattactagaacatttgcatcgggaaaaacagaaaaggtgatctttcaagcactcaaggagttaggtcttcccagtggaaagaatgatgaaattgagcccacagcattttcttatgaaaagttctatgaactgacacaaaagatttgtcctcggacagatatagaagatcttttcaaaaaaatcaatggagacaaaactgattatttaacggtagaccaattagtgagctttctaaatgaacatcaacgagatcctcgattgaatgaaattttatttccattttatgatgccaaaagggcaatgcagatcattgagatgtatgaacctgatgaagatttgaagaaaaaaggccttatatcaagtgatgggttttgcagatatctgatgtcagatgaaaacgccccagtcttcctagatcgtttagaactttaccaagaaatggaccatcctctggctcactacttcatcagttcttcccataacacttatctcactggcagacagttcggcgggaagtcttcggtagaaatgtacagacaggttctcctggctggttgcagatgtgttgaacttgactgctgggatggaaaaggtgaagaccaagaaccaataataactcatggaaaagcaatgtgtacagatatcctttttaaggatgtaattcaagccatcaaggaaactgcatttgtcacatcagaatatcctgtaattctctcctttgaaaatcactgcagcaaatatcaacagtacaagatgtccaaatattgcgaagatctatttggggatctcctgttgaaacaagcacttgaatcacatccacttgaaccaggcagggctttgccatcccccaatgacctcaaaagaaaaatactcataaaaaacaagcggctgaaacctgaagttgaaaaaaaacagctggaagctttgagaagcatgatggaagctggagaatctgcctccccagcaaacatcttagaggacgataatgaagaggagatcgaaagtgctgaccaagaggaggaagctcaccccgaattcaaatttggaaatgaactttctgctgatgacttgggtcacaaggaagctgttgcaaatagcgtcaagaagggcctggtcactgtagaagatgagcaggcgtggatggcatcttataaatatgtaggtgctaccactaatatccatccatatttgtccacaatgatcaactacgcccagcctgtaaagtttcaaggtttccatgtggcagaagaacgcaatattcattataacatgtcttcttttaatgaatcagtcggtcttggctacttgaagacacatgcaattgaatttgtcaattataacaaacggcaaatgagtcgcatttaccccaagggaggccgagtcgattccagtaattacatgcctcagattttctggaacgctggctgccagatggtttcactgaactatcaaaccccagatttagcgatgcaattgaatcagggaaaatttgagtataatggatcgtgcgggtaccttctcaaaccagatttcatgaggcggcctgatcgaacatttgaccccttctctgaaactcctgttgatggtgttattgcagccacttgctcagtgcaggttatatcaggtcaattcttatcagataagaaaattggcacctacgtagaggtggatatgtatgggttgcccactgacaccatacgtaaggaattccgaactcgcatggttatgaataatggactcaatccagtttacaatgaagagtcatttgtatttcggaaggtgatcctgccggacctggctgtcttgagaatagctgtgtatgatgataacaacaagctgattggccagaggatcctcccgcttgatggcctccaagccggatatcgacacatttcccttcgaaatgagggaaataaaccattatcactaccaacaattttctgcaatattgttcttaaaacatatgtgcctgatggatttggagatatcgtggatgctttatcagatccaaagaaatttctctcaattacagaaaagagagcagaccaaatgagagctatgggcattgaaactagtgacatagccgacgtgcccagtgacacttccaaaaatgacaagaaaggaaaggccaacaccgccaaagcaaatgtgacccctcagagtagctctgagctcagaccaaccaccacggctgccctggcctctggtgtggaagccaagaaaggtattgaacttatccctcaagtaaggatagaagacttaaagcagatgaaggcttacttgaagcatttaaagaaacagcagaaggagctaaattctttaaagaagaaacatgcaaaggaacacagtaccatgcagaagttacactgcacgcaagttgacaaaattgtggcacagtatgacaaagagaagtcgactcatgagaaaatcctagagaaggcaatgaagaagaaggggggaagtaattgtctcgaaatgaaaaaagaaacagaaatcaaaattcagacgctgacatcagatcacaaatctaaggtcaaagagattgtagcacagcacacaaaggaatggtcagaaatgatcaatacccacagtgctgaggagcaagaaatccgagacctgcacctcagccagcagtgtgagctgctgaaaaagctactcatcaatgcccacgagcagcaaacccagcagctgaaactgtcccatgacagggaaagcaaggaaatgcgagcacaccaggctaagatttctatggaaaatagcaaagccatcagccaagataaatctatcaagaataaagcagaacgggaaaggcgagtcagggagttaaacagcagcaacactaaaaagtttctggaagaaagaaagagacttgccatgaagcagtccaaagaaatggatcagttgaaaaaagtccagcttgaacatctagaattcctagagaaacagaatgagcaggcgaaggagatgcagcagatggtgaaattggaagccgagatggaccgcagaccagcaacagtagtatgaaactccaaaatgcaaactgaagcagcaaacccacaaagcatcaaaagactcactcacaaacttctgaacacaaactccatggatgaaagctgtttattttgtttcctttatgtgtaaacaagatgatatctgaaaccagagagacttggaatgtctgactgacttctatttaacagcttgagtattgcatttccttggccaaacaaaaatagctacaaatccacaaaaatttactattccagtaaggcagagtccaaccattgataatacaacttaaacatgtttgctataaaataccatcacaagtaaatgagcttggtgtgaacaactctcctttgtgatgccttaggacatgtttgaactgcagcaaaaaacaaaaacaaaaaacagtgcattagcaatttcatagcaagtgcatgcactaggaaaagaaaactctgtctacaagtttattagcagaagtggtggtctgctagacaaataattttgcaaaatttttctacatctaagttacctcatcagtaagtgccatgtctctaccatgccatcagaggctaatttcctgtaaaagttgtggaaattgttagaacaatagaaaaatagagcagtgtatgtgtgccaaaactcatcattactcaaaggagaactgtgttaggcacatttaagaaagtttacatctgacattgctttataggaattgtttctgcagattccggatattataattcacaccataaagattgtgaagtggttattggcaaacgtttgtaaatgtgaccatgtataaagtatttatactctttaattcacactgttagagagcaaaatcatctaagtattgccacatgacaagattagtaaacaggaatactagaactatgtttgcatgatacacaagcaccaataaagactaatccatacacagttaacctaatgccaaataaatactggttaaataaatgtatggcacagaatataatttgactatcaagacttttagcataatgaaaaaccctctctctatatatatatgtgtatatgaattatgtgggcattcttgatacttcaagttctagtttgaaaaaaatacataactaatttaattttacacaaaaatatttatgcagattttcagaatttcatatcaggaaatgacctttttatgtctgttaaatatcaaaacaatttgctacagtgttaatctgcatggtctttaagcctgctgtagttgagttgcagacagtgcatgaaaaagtattccgctgggaattgagccatgccaccaaagccaagaggagcgcatggaaacccggtagtctagaactaatcagattactgattttagggcacagcaccagatgaattgttgtatatgcttgtaaaaattgattctgtgtgttcctctgaacaaagcggagaaaatgatgataccatcaatattgaaattaaacttccaacttctctaataaaaaattaaaacacgcataacactcgtcaagagtatttgctcccaagacacattctagcaaatgttttgcctttttcatatacatgatatcatcgttattttcaaagggggcttattaataccctcagcatgtttttcacccaaatgatgcaaaacatgcagattctagttgacttcagttgtaatagacttgtttttctcctatttatgatttgaagtggattctgtaaaatatctcttgttcttagtttccttatctgtaaaacagtggagttagactacatatcttttggcactaacatctcatgaaaaattatggttaataaaatatcaccacatttggattgccaattttcaaagattctgagtggcttctcatcatcaaatcaaatcaaatccaagagctcaactatgctcaccattctgtaacacttgactgaattcatcacttgcctcctcttgtttctgctttggagaggtactactagtttttccatttttcttatttcttccctcttttcatcctcctaggccaccataagcatttatattttcccagtgttatacatggaaccagtttgtttttcctttgatnccaggttacttttagtatttgagacatcataccattaatccattgtagtaggattaaaatgtacacacaactcaaatgtgcaacaaaagcatgtgttacctgctattgtcagttcatattgcactcaaaccttgcattatcccttattatgaagaaaaattaatagccaattaaagtaactcagtgtcttcca

SEQ ID NO: 305755 - DNA, 4997 bp, Homo sapiens
agatcaatcatacacaacttcagggccaacaacgtcagtccaatgacatgcctcaagaaacactggatgaaattggcatttatgaccaacacaaatggtaaaattccagttaggagtattactagaacatttgcatcgggaaaaacagaaaaggtgatctttcaagcactcaaggagttaggtcttcccagtggaaagaatgatgaaattgagcccacagcattttcttatgaaaagttctatgaactgacacaaaagatttgtcctcggacagatatagaagatcttttcaaaaaaatcaatggagacaaaactgattatttaacggtagaccaattagtgagctttctaaatgaacatcaacgagatcctcgattgaatgaaattttatttccattttatgatgccaaaagggcaatgcagatcattgagatgtatgaacctgatgaagatttgaagaaaaaaggccttatatcaagtgatgggttttgcagatatctgatgtcagatgaaaacgccccagtcttcctagatcgtttagaactttaccaagaaatggaccatcctctggctcactacttcatcagttcttcccataacacttatctcactggcagacagttcggcgggaagtcttcggtagaaatgtacagacaggttctcctggctggttgcagatgtgttgaacttgactgctgggatggaaaaggtgaagaccaagaaccaataataactcatggaaaagcaatgtgtacagatatcctttttaaggatgtaattcaagccatcaaggaaactgcatttgtcacatcagaatatcctgtaattctctcctttgaaaatcactgcagcaaatatcaacagtacaagatgtccaaatattgcgaagatctatttggggatctcctgttgaaacaagcacttgaatcacatccacttgaaccaggcagggctttgccatcccccaatgacctcaaaagaaaaatactcataaaaaacaagcggctgaaacctgaagttgaaaaaaaacagctggaagctttgagaagcatgatggaagctggagaatctgcctccccagcaaacatcttagaggacgataatgaagaggagatcgaaagtgctgaccaagaggaggaagctcaccccgaattcaaatttggaaatgaactttctgctgatgacttgggtcacaaggaagctgttgcaaatagcgtcaagaagggcctggtcactgtagaagatgagcaggcgtggatggcatcttataaatatgtaggtgctaccactaatatccatccatatttgtccacaatgatcaactacgcccagcctgtaaagtttcaaggtttccatgtggcagaagaacgcaatattcattataacatgtcttcttttaatgaatcagtcggtcttggctacttgaagacacatgcaattgaatttgtcaattataacaaacggcaaatgagtcgcatttaccccaagggaggccgagtcgattccagtaattacatgcctcagattttctggaacgctggctgccagatggtttcactgaactatcaaaccccagatttagcgatgcaattgaatcagggaaaatttgagtataatggatcgtgcgggtaccttctcaaaccagatttcatgaggcggcctgatcgaacatttgaccccttctctgaaactcctgttgatggtgttattgcagccacttgctcagtgcaggttatatcaggtcaattcttatcagataagaaaattggcacctacgtagaggtggatatgtatgggttgcccactgacaccatacgtaaggaattccgaactcgcatggttatgaataatggactcaatccagtttacaatgaagagtcatttgtatttcggaaggtgatcctgccggacctggctgtcttgagaatagctgtgtatgatgataacaacaagctgattggccagaggatcctcccgcttgatggcctccaagccggatatcgacacatttcccttcgaaatgagggaaataaaccattatcactaccaacaattttctgcaatattgttcttaaaacatatgtgcctgatggatttggagatatcgtggatgctttatcagatccaaagaaatttctctcaattacagaaaagagagcagaccaaatgagagctatgggcattgaaactagtgacatagccgacgtgcccagtgacacttccaaaaatgacaagaaaggaaaggccaacaccgccaaagcaaatgtgacccctcagagtagctctgagctcagaccaaccaccacggctgccctggcctctggtgtggaagccaagaaaggtattgaacttatccctcaagtaaggatagaagacttaaagcagatgaaggcttacttgaagcatttaaagaaacagcagaaggagctaaattctttaaagaagaaacatgcaaaggaacacagtaccatgcagaagttacactgcacgcaagttgacaaaattgtggcacagtatgacaaagagaagtcgactcatgagaaaatcctagagaaggcaatgaagaagaaggggggaagtaattgtctcgaaatgaaaaaagaaacagaaatcaaaattcagacgctgacatcagatcacaaatctaaggtcaaagagattgtagcacagcacacaaaggaatggtcagaaatgatcaatacccacagtgctgaggagcaagaaatccgagacctgcacctcagccagcagtgtgagctgctgaaaaagctactcatcaatgcccacgagcagcaaacccagcagctgaaactgtcccatgacagggaaagcaaggaaatgcgagcacaccaggctaagatttctatggaaaatagcaaagccatcagccaagataaatctatcaagaataaagcagaacgggaaaggcgagtcagggagttaaacagcagcaacactaaaaagtttctggaagaaagaaagagacttgccatgaagcagtccaaagaaatggatcagttgaaaaaagtccagcttgaacatctagaattcctagagaaacagaatgagcagcttttgaaatcctgtcatgcagtgtcccaaacgcaaggcgaaggagatgcagcagatggtgaaattggaagccgagatggaccgcagaccagcaacagtagtatgaaactccaaaatgcaaactgaagcagcaaacccacaaagcatcaaaagactcactcacaaacttctgaacacaaactccatggatgaaagctgtttattttgtttcctttatgtgtaaacaagatgatatctgaaaccagagagacttggaatgtctgactgacttctatttaacagcttgagtattgcatttccttggccaaacaaaaatagctacaaatccacaaaaatttactattccagtaaggcagagtccaaccattgataatacaacttaaacatgtttgctataaaataccatcacaagtaaatgagcttggtgtgaacaactctcctttgtgatgccttaggacatgtttgaactgcagcaaaaaacaaaaacaaaaaacagtgcattagcaatttcatagcaagtgcatgcactaggaaaagaaaactctgtctacaagtttattagcagaagtggtggtctgctagacaaataattttgcaaaatttttctacatctaagttacctcatcagtaagtgccatgtctctaccatgccatcagaggctaatttcctgtaaaagttgtggaaattgttagaacaatagaaaaatagagcagtgtatgtgtgccaaaactcatcattactcaaaggagaactgtgttaggcacatttaagaaagtttacatctgacattgctttataggaattgtttctgcagattccggatattataattcacaccataaagattgtgaagtggttattggcaaacgtttgtaaatgtgaccatgtataaagtatttatactctttaattcacactgttagagagcaaaatcatctaagtattgccacatgacaagattagtaaacaggaatactagaactatgtttgcatgatacacaagcaccaataaagactaatccatacacagttaacctaatgccaaataaatactggttaaataaatgtatggcacagaatataatttgactatcaagacttttagcataatgaaaaaccctctctctatatatatatgtgtatatgaattatgtgggcattcttgatacttcaagttctagtttgaaaaaaatacataactaatttaattttacacaaaaatatttatgcagattttcagaatttcatatcaggaaatgacctttttatgtctgttaaatatcaaaacaatttgctacagtgttaatctgcatggtctttaagcctgctgtagttgagttgcagacagtgcatgaaaaagtattccgctgggaattgagccatgccaccaaagccaagaggagcgcatggaaacccggtagtctagaactaatcagattactgattttagggcacagcaccagatgaattgttgtatatgcttgtaaaaattgattctgtgtgttcctctgaacaaagcggagaaaatgatgataccatcaatattgaaattaaacttccaacttctctaataaaaaattaaaacacgcataacactcgtcaagagtatttgctcccaagacacattctagcaaatgttttgcctttttcatatacatgatatcatcgttattttcaaagggggcttattaataccctcagcatgtttttcacccaaatgatgcaaaacatgcagattctagttgacttcagttgtaatagacttgtttttctcctatttatgatttgaagtggattctgtaaaatatctcttgttcttagtttccttatctgtaaaacagtggagttagactacatatcttttggcactaacatctcatgaaaaattatggttaataaaatatcaccacatttggattgccaa

SEQ ID NO: 305756 - DNA, 4536 bp, Homo sapiens
ccacaatctcaagtgttgagggttgggtcagcctactcagcagacaggcttactatacagcctgacacttggggggatctggggggcctctcacttgggaaagctaattctgaacccagccatcacaattgtcccttgcactttaccagatacttaaaaggtgcaaggccctctggggagcaggaacccctccccggcacatcccaggccagacccctgctccactggggaggttggagcagctctgcacacctctggaaactatgtggatttcaagtttgcagcactagtctaaggaaaagctcaatgggtgtgctaatttgggttggggagtgaaaacagaaggctgtgccgcctgccatctagtgggtgttgggttgcatcactcccaggcctcccaggctcctcctggactgggaaggagaatggagaagcacagcccttccttaattcagctctttctgtttctctctagcttgaaccaggcagggctttgccatcccccaatgacctcaaaagaaaaatactcataaaaaacaagcggctgaaacctgaagttgaaaaaaaacagctggaagctttgagaagcatgatggaagctggagaatctgcctccccagcaaacatcttagaggacgataatgaagaggagatcgaaagtgctgaccaagaggaggaagctcaccccgaattcaaatttggaaatgaactttctgctgatgacttgggtcacaaggaagctgttgcaaatagcgtcaagaagggcctggtcactgtagaagatgagcaggcgtggatggcatcttataaatatgtaggtgctaccactaatatccatccatatttgtccacaatgatcaactacgcccagcctgtaaagtttcaaggtttccatgtggcagaagaacgcaatattcattataacatgtcttcttttaatgaatcagtcggtcttggctacttgaagacacatgcaattgaatttgtcaattataacaaacggcaaatgagtcgcatttaccccaagggaggccgagtcgattccagtaattacatgcctcagattttctggaacgctggctgccagatggtttcactgaactatcaaaccccagatttagcgatgcaattgaatcagggaaaatttgagtataatggatcgtgcgggtaccttctcaaaccagatttcatgaggcggcctgatcgaacatttgaccccttctctgaaactcctgttgatggtgttattgcagccacttgctcagtgcaggttatatcaggtcaattcttatcagataagaaaattggcacctacgtagaggtggatatgtatgggttgcccactgacaccatacgtaaggaattccgaactcgcatggttatgaataatggactcaatccagtttacaatgaagagtcatttgtatttcggaaggtgatcctgccggacctggctgtcttgagaatagctgtgtatgatgataacaacaagctgattggccagaggatcctcccgcttgatggcctccaagccggatatcgacacatttcccttcgaaatgagggaaataaaccattatcactaccaacaattttctgcaatattgttcttaaaacatatgtgcctgatggatttggagatatcgtggatgctttatcagatccaaagaaatttctctcaattacagaaaagagagcagaccaaatgagagctatgggcattgaaactagtgacatagccgacgtgcccagtgacacttccaaaaatgacaagaaaggaaaggccaacaccgccaaagcaaatgtgacccctcagagtagctctgagctcagaccaaccaccacggctgccctggcctctggtgtggaagccaagaaaggtattgaacttatccctcaagtaaggatagaagacttaaagcagatgaaggcttacttgaagcatttaaagaaacagcagaaggagctaaattctttaaagaagaaacatgcaaaggaacacagtaccatgcagaagttacactgcacgcaagttgacaaaattgtggcacagtatgacaaagagaagtcgactcatgagaaaatcctagagaaggcaatgaagaagaaggggggaagtaattgtctcgaaatgaaaaaagaaacagaaatcaaaattcagacgctgacatcagatcacaaatctaaggtcaaagagattgtagcacagcacacaaaggaatggtcagaaatgatcaatacccacagtgctgaggagcaagaaatccgagacctgcacctcagccagcagtgtgagctgctgaaaaagctactcatcaatgcccacgagcagcaaacccagcagctgaaactgtcccatgacagggaaagcaaggaaatgcgagcacaccaggctaagatttctatggaaaatagcaaagccatcagccaagataaatctatcaagaataaagcagaacgggaaaggcgagtcagggagttaaacagcagcaacactaaaaagtttctggaagaaagaaagagacttgccatgaagcagtccaaagaaatggatcagttgaaaaaagtccagcttgaacatctagaattcctagagaaacagaatgagcagcttttgaaatcctgtcatgcagtgtcccaaacgcaaggcgaaggagatgcagcagatggtgaaattggaagccgagatggaccgcagaccagcaacagtagtatgaaactccaaaatgcaaactgaagcagcaaacccacaaagcatcaaaagactcactcacaaacttctgaacacaaactccatggatgaaagctgtttattttgtttcctttatgtgtaaacaagatgatatctgaaaccagagagacttggaatgtctgactgacttctatttaacagcttgagtattgcatttccttggccaaacaaaaatagctacaaatccacaaaaatttactattccagtaaggcagagtccaaccattgataatacaacttaaacatgtttgctataaaataccatcacaagtaaatgagcttggtgtgaacaactctcctttgtgatgccttaggacatgtttgaactgcagcaaaaaacaaaaacaaaaaacagtgcattagcaatttcatagcaagtgcatgcactaggaaaagaaaactctgtctacaagtttattagcagaagtggtggtctgctagacaaataattttgcaaaatttttctacatctaagttacctcatcagtaagtgccatgtctctaccatgccatcagaggctaatttcctgtaaaagttgtggaaattgttagaacaatagaaaaatagagcagtgtatgtgtgccaaaactcatcattactcaaaggagaactgtgttaggcacatttaagaaagtttacatctgacattgctttataggaattgtttctgcagattccggatattataattcacaccataaagattgtgaagtggttattggcaaacgtttgtaaatgtgaccatgtataaagtatttatactctttaattcacactgttagagagcaaaatcatctaagtattgccacatgacaagattagtaaacaggaatactagaactatgtttgcatgatacacaagcaccaataaagactaatccatacacagttaacctaatgccaaataaatactggttaaataaatgtatggcacagaatataatttgactatcaagacttttagcataatgaaaaaccctctctctatatatatatgtgtatatgaattatgtgggcattcttgatacttcaagttctagtttgaaaaaaatacataactaatttaattttacacaaaaatatttatgcagattttcagaatttcatatcaggaaatgacctttttatgtctgttaaatatcaaaacaatttgctacagtgttaatctgcatggtctttaagcctgctgtagttgagttgcagacagtgcatgaaaaagtattccgctgggaattgagccatgccaccaaagccaagaggagcgcatggaaacccggtagtctagaactaatcagattactgattttagggcacagcaccagatgaattgttgtatatgcttgtaaaaattgattctgtgtgttcctctgaacaaagcggagaaaatgatgataccatcaatattgaaattaaacttccaacttctctaataaaaaattaaaacacgcataacactcgtcaagagtatttgctcccaagacacattctagcaaatgttttgcctttttcatatacatgatatcatcgttattttcaaagggggcttattaataccctcagcatgtttttcacccaaatgatgcaaaacatgcagattctagttgacttcagttgtaatagacttgtttttctcctatttatgatttgaagtggattctgtaaaatatctcttgttcttagtttccttatctgtaaaacagtggagttagactacatatcttttggcactaacatctcatgaaaaattatggttaataaaatatcaccacatttggattgccaa

SEQ ID NO: 305757 - DNA, 4099 bp, Homo sapiens
gaactcctggcctcccaaagtgctggattaaaggcatgagccaccgttcccggccagtaatttcttgaataaagtcccttaaaaatctaaaaatgtcctacaaatgtaagataagcttaatattttatgattacctccttttgcattattcagagctacaacagacactaacttcttaaagtatcctttagcataattgaggaagaaaaagcctttacctttcaatttgtgtgtgtgcaattatctttattaaggaaatctgcagcacgtatccgtgggtcctactgaagtcatcaacttatatgttttcttccttgtgcttgtagggcctggtcactgtagaagatgagcaggcgtggatggcatcttataaatatgtaggtgctaccactaatatccatccatatttgtccacaatgatcaactacgcccagcctgtaaagtttcaaggtttccatgtggcagaagaacgcaatattcattataacatgtcttcttttaatgaatcagtcggtcttggctacttgaagacacatgcaattgaatttgtcaattataacaaacggcaaatgagtcgcatttaccccaagggaggccgagtcgattccagtaattacatgcctcagattttctggaacgctggctgccagatggtttcactgaactatcaaaccccagatttagcgatgcaattgaatcagggaaaatttgagtataatggatcgtgcgggtaccttctcaaaccagatttcatgaggcggcctgatcgaacatttgaccccttctctgaaactcctgttgatggtgttattgcagccacttgctcagtgcaggttatatcaggtcaattcttatcagataagaaaattggcacctacgtagaggtggatatgtatgggttgcccactgacaccatacgtaaggaattccgaactcgcatggttatgaataatggactcaatccagtttacaatgaagagtcatttgtatttcggaaggtgatcctgccggacctggctgtcttgagaatagctgtgtatgatgataacaacaagctgattggccagaggatcctcccgcttgatggcctccaagccggatatcgacacatttcccttcgaaatgagggaaataaaccattatcactaccaacaattttctgcaatattgttcttaaaacatatgtgcctgatggatttggagatatcgtggatgctttatcagatccaaagaaatttctctcaattacagaaaagagagcagaccaaatgagagctatgggcattgaaactagtgacatagccgacgtgcccagtgacacttccaaaaatgacaagaaaggaaaggccaacaccgccaaagcaaatgtgacccctcagagtagctctgagctcagaccaaccaccacggctgccctggcctctggtgtggaagccaagaaaggtattgaacttatccctcaagtaaggatagaagacttaaagcagatgaaggcttacttgaagcatttaaagaaacagcagaaggagctaaattctttaaagaagaaacatgcaaaggaacacagtaccatgcagaagttacactgcacgcaagttgacaaaattgtggcacagtatgacaaagagaagtcgactcatgagaaaatcctagagaaggcaatgaagaagaaggggggaagtaattgtctcgaaatgaaaaaagaaacagaaatcaaaattcagacgctgacatcagatcacaaatctaaggtcaaagagattgtagcacagcacacaaaggaatggtcagaaatgatcaatacccacagtgctgaggagcaagaaatccgagacctgcacctcagccagcagtgtgagctgctgaaaaagctactcatcaatgcccacgagcagcaaacccagcagctgaaactgtcccatgacagggaaagcaaggaaatgcgagcacaccaggctaagatttctatggaaaatagcaaagccatcagccaagataaatctatcaagaataaagcagaacgggaaaggcgagtcagggagttaaacagcagcaacactaaaaagtttctggaagaaagaaagagacttgccatgaagcagtccaaagaaatggatcagttgaaaaaagtccagcttgaacatctagaattcctagagaaacagaatgagcagcttttgaaatcctgtcatgcagtgtcccaaacgcaaggcgaaggagatgcagcagatggtgaaattggaagccgagatggaccgcagaccagcaacagtagtatgaaactccaaaatgcaaactgaagcagcaaacccacaaagcatcaaaagactcactcacaaacttctgaacacaaactccatggatgaaagctgtttattttgtttcctttatgtgtaaacaagatgatatctgaaaccagagagacttggaatgtctgactgacttctatttaacagcttgagtattgcatttccttggccaaacaaaaatagctacaaatccacaaaaatttactattccagtaaggcagagtccaaccattgataatacaacttaaacatgtttgctataaaataccatcacaagtaaatgagcttggtgtgaacaactctcctttgtgatgccttaggacatgtttgaactgcagcaaaaaacaaaaacaaaaaacagtgcattagcaatttcatagcaagtgcatgcactaggaaaagaaaactctgtctacaagtttattagcagaagtggtggtctgctagacaaataattttgcaaaatttttctacatctaagttacctcatcagtaagtgccatgtctctaccatgccatcagaggctaatttcctgtaaaagttgtggaaattgttagaacaatagaaaaatagagcagtgtatgtgtgccaaaactcatcattactcaaaggagaactgtgttaggcacatttaagaaagtttacatctgacattgctttataggaattgtttctgcagattccggatattataattcacaccataaagattgtgaagtggttattggcaaacgtttgtaaatgtgaccatgtataaagtatttatactctttaattcacactgttagagagcaaaatcatctaagtattgccacatgacaagattagtaaacaggaatactagaactatgtttgcatgatacacaagcaccaataaagactaatccatacacagttaacctaatgccaaataaatactggttaaataaatgtatggcacagaatataatttgactatcaagacttttagcataatgaaaaaccctctctctatatatatatgtgtatatgaattatgtgggcattcttgatacttcaagttctagtttgaaaaaaatacataactaatttaattttacacaaaaatatttatgcagattttcagaatttcatatcaggaaatgacctttttatgtctgttaaatatcaaaacaatttgctacagtgttaatctgcatggtctttaagcctgctgtagttgagttgcagacagtgcatgaaaaagtattccgctgggaattgagccatgccaccaaagccaagaggagcgcatggaaacccggtagtctagaactaatcagattactgattttagggcacagcaccagatgaattgttgtatatgcttgtaaaaattgattctgtgtgttcctctgaacaaagcggagaaaatgatgataccatcaatattgaaattaaacttccaacttctctaataaaaaattaaaacacgcataacactcgtcaagagtatttgctcccaagacacattctagcaaatgttttgcctttttcatatacatgatatcatcgttattttcaaagggggcttattaataccctcagcatgtttttcacccaaatgatgcaaaacatgcagattctagttgacttcagttgtaatagacttgtttttctcctatttatgatttgaagtggattctgtaaaatatctcttgttcttagtttccttatctgtaaaacagtggagttagactacatatcttttggcactaacatctcatgaaaaattatggttaataaaatatcaccacatttggattgccaa

SEQ ID NO: 305758 - DNA, 2651 bp, Homo sapiens
agatcaatcatacacaacttcagggccaacaacgtcagtccaatgacatgcctcaagaaacactggatgaaattggcatttatgaccaacacaaatggtaaaattccagttaggagtattactagaacatttgcatcgggaaaaacagaaaaggtgatctttcaagcactcaaggagttaggtcttcccagtggaaagaatgatgaaattgagcccacagcattttcttatgaaaagttctatgaactgacacaaaagatttgtcctcggacagatatagaagatcttttcaaaaaaatcaatggagacaaaactgattatttaacggtagaccaattagtgagctttctaaatgaacatcaacgagatcctcgattgaatgaaattttatttccattttatgatgccaaaagggcaatgcagatcattgagatgtatgaacctgatgaagatttgaagaaaaaaggccttatatcaagtgatgggttttgcagatatctgatgtcagatgaaaacgccccagtcttcctagatcgtttagaactttaccaagaaatggaccatcctctggctcactacttcatcagttcttcccataacacttatctcactggcagacagttcggcgggaagtcttcggtagaaatgtacagacaggttctcctggctggttgcagatgtgttgaacttgactgctgggatggaaaaggtgaagaccaagaaccaataataactcatggaaaagcaatgtgtacagatatcctttttaaggatgtaattcaagccatcaaggaaactgcatttgtcacatcagaatatcctgtaattctctcctttgaaaatcactgcagcaaatatcaacagtacaagatgtccaaatattgcgaagatctatttggggatctcctgttgaaacaagcacttgaatcacatccacttgaaccaggcagggctttgccatcccccaatgacctcaaaagaaaaatactcataaaaaacaagcggctgaaacctgaagttgaaaaaaaacagctggaagctttgagaagcatgatggaagctggagaatctgcctccccagcaaacatcttagaggacgataatgaagaggagatcgaaagtgctgaccaagaggaggaagctcaccccgaattcaaatttggaaatgaactttctgctgatgacttgggtcacaaggaagctgttgcaaatagcgtcaagaagggcctggtcactgtagaagatgagcaggcgtggatggcatcttataaatatgtaggtgctaccactaatatccatccatatttgtccacaatgatcaactacgcccagcctgtaaagtttcaaggtttccatgtggcagaagaacgcaatattcattataacatgtcttcttttaatgaatcagtcggtcttggctacttgaagacacatgcaattgaatttgtcaattataacaaacggcaaatgagtcgcatttaccccaagggaggccgagtcgattccagtaattacatgcctcagattttctggaacgctggctgccagatggtttcactgaactatcaaaccccagatttagcgatgcaattgaatcagggaaaatttgagtataatggatcgtgcgggtaccttctcaaaccagatttcatgaggcggcctgatcgaacatttgaccccttctctgaaactcctgttgatggtgttattgcagccacttgctcagtgcaggttatatcaggtcaattcttatcagataagaaaattggcacctacgtagaggtggatatgtatgggttgcccactgacaccatacgtaaggaattccgaactcgcatggttatgaataatggactcaatccagtttacaatgaagagtcatttgtatttcggaaggtgatcctgccggacctggctgtcttgagaatagctgtgtatgatgataacaacaagctgattggccagaggatcctcccgcttgatggcctccaagccggatatcgacacatttcccttcgaaatgagggaaataaaccattatcactaccaacaattttctgcaatattgttcttaaaacatatgtgcctgatggatttggagatatcgtggatgctttatcagatccaaagaaatttctctcaattacagaaaagagagcagaccaaatgagagctatgggcattgaaactagtgacatagccgacgtgcccagtgacacttccaaaaatgacaagaaaggaaaggccaacaccgccaaagcaaatgtgacccctcagagtagctctgagctcagaccaaccaccacggctgccctggcctctggtgtggaagccaagaaaggtattgaacttatccctcaagtaaggatagaagacttaaagcagatgaaggcttacttgaagcatttaaagaaacagcagaaggagctaaattctttaaagaagaaacatgcaaaggaacacagtaccatgcagaagttacactgcacgcaagttgacaaaattgtggcacagtatgacaaagagaagtcgactcatgagaaaatcctagagaaggcaatgaagaagaaggggggaagtaattgtctcgaaatgaaaaaagaaacagaaatcaaaattcagacgacacgcccgggcgtgtgatgtgactt

SEQ ID NO: 305759 - DNA, 2717 bp, Homo sapiens
  misc_feature (2380)..(2380): n is a, c, g, or t
  misc_feature (2389)..(2389): n is a, c, g, or t
  misc_feature (2391)..(2391): n is a, c, g, or t
  misc_feature (2409)..(2409): n is a, c, g, or t
  misc_feature (2671)..(2671): n is a, c, g, or t
agatcaatcatacacaacttcagggccaacaacgtcagtccaatgacatgcctcaagaaacactggatgaaattggcatttatgaccaacacaaatggtaaaattccagttaggagtattactagaacatttgcatcgggaaaaacagaaaaggtgatctttcaagcactcaaggagttaggtcttcccagtggaaagaatgatgaaattgagcccacagcattttcttatgaaaagttctatgaactgacacaaaagatttgtcctcggacagatatagaagatcttttcaaaaaaatcaatggagacaaaactgattatttaacggtagaccaattagtgagctttctaaatgaacatcaacgagatcctcgattgaatgaaattttatttccattttatgatgccaaaagggcaatgcagatcattgagatgtatgaacctgatgaagatttgaagaaaaaaggccttatatcaagtgatgggttttgcagatatctgatgtcagatgaaaacgccccagtcttcctagatcgtttagaactttaccaagaaatggaccatcctctggctcactacttcatcagttcttcccataacacttatctcactggcagacagttcggcgggaagtcttcggtagaaatgtacagacaggttctcctggctggttgcagatgtgttgaacttgactgctgggatggaaaaggtgaagaccaagaaccaataataactcatggaaaagcaatgtgtacagatatcctttttaaggatgtaattcaagccatcaaggaaactgcatttgtcacatcagaatatcctgtaattctctcctttgaaaatcactgcagcaaatatcaacagtacaagatgtccaaatattgcgaagatctatttggggatctcctgttgaaacaagcacttgaatcacatccacttgaaccaggcagggctttgccatcccccaatgacctcaaaagaaaaatactcataaaaaacaagcggctgaaacctgaagttgaaaaaaaacagctggaagctttgagaagcatgatggaagctggagaatctgcctccccagcaaacatcttagaggacgataatgaagaggagatcgaaagtgctgaccaagaggaggaagctcaccccgaattcaaatttggaaatgaactttctgctgatgacttgggtcacaaggaagctgttgcaaatagcgtcaagaagggcctggtcactgtagaagatgagcaggcgtggatggcatcttataaatatgtaggtgctaccactaatatccatccatatttgtccacaatgatcaactacgcccagcctgtaaagtttcaaggtttccatgtggcagaagaacgcaatattcattataacatgtcttcttttaatgaatcagtcggtcttggctacttgaagacacatgcaattgaatttgtcaattataacaaacggcaaatgagtcgcatttaccccaagggaggccgagtcgattccagtaattacatgcctcagattttctggaacgctggctgccagatggtttcactgaactatcaaaccccagatttagcgatgcaattgaatcagggaaaatttgagtataatggatcgtgcgggtaccttctcaaaccagatttcatgaggcggcctgatcgaacatttgaccccttctctgaaactcctgttgatggtgttattgcagccacttgctcagtgcaggttatatcaggtcaattcttatcagataagaaaattggcacctacgtagaggtggatatgtatgggttgcccactgacaccatacgtaaggaattccgaactcgcatggttatgaataatggactcaatccagtttacaatgaagagtcatttgtatttcggaaggtgatcctgccggacctggctgtcttgagaatagctgtgtatgatgataacaacaagctgattggccagaggatcctcccgcttgatggcctccaagccggatatcgacacatttcccttcgaaatgagggaaataaaccattatcactaccaacaattttctgcaatattgttcttaaaacatatgtgcctgatggatttggagatatcgtggatgctttatcagatccaaagaaatttctctcaattacagaaaagagagcagaccaaatgagagctatgggcattgaaactagtgacatagccgacgtgcccagtgacacttccaaaaatgacaagaaaggaaaggccaacaccgccaaagcaaatgtgacccctcagagtagctctgagctcagaccaaccaccacggctgccctggcctctggtgtggaagccaagaaagggcctggtcactgtagaagatgagcaggcgtggatggcntcttataantntgtaggtgctaccactantatccatccatatttgtccacaatgatcaactacgcccagcctgtaaagtttcaaggtttccatgtggcagaagaacgcaatattcattataacatgtcttcttttaatgaatcagtcggtcttggctacttgaagacacatgcaattgaatttgtcaattataacaaacggcaatgagtcgcatttaccccaagggaggccgagtcggttccagtaattacatgcctcagattttctggacgctggctgccagatggtttnactggactatcaaaccccagtaggggctgtttccatgaccccaatt

SEQ ID NO: 305760 - DNA, 1740 bp, Homo sapiens
agatcaatcatacacaacttcagggccaacaacgtcagtccaatgacatgcctcaagaaacactggatgaaattggcatttatgaccaacacaaatggtaaaattccagttaggagtattactagaacatttgcatcgggaaaaacagaaaaggtgatctttcaagcactcaaggagttaggtcttcccagtggaaagaatgatgaaattgagcccacagcattttcttatgaaaagttctatgaactgacacaaaagatttgtcctcggacagatatagaagatcttttcaaaaaaatcaatggagacaaaactgattatttaacggtagaccaattagtgagctttctaaatgaacatcaacgagatcctcgattgaatgaaattttatttccattttatgatgccaaaagggcaatgcagatcattgagatgtatgaacctgatgaagatttgaagaaaaaaggccttatatcaagtgatgggttttgcagatatctgatgtcagatgaaaacgccccagtcttcctagatcgtttagaactttaccaagaaatggaccatcctctggctcactacttcatcagttcttcccataacacttatctcactggcagacagttcggcgggaagtcttcggtagaaatgtacagacaggttctcctggctggttgcagatgtgttgaacttgactgctgggatggaaaaggtgaagaccaagaaccaataataactcatggaaaagcaatgtgtacagatatcctttttaaggatgtaattcaagccatcaaggaaactgcatttgtcacatcagaatatcctgtaattctctcctttgaaaatcactgcagcaaatatcaacagtacaagatgtccaaatattgcgaagatctatttggggatctcctgttgaaacaagcacttgaatcacatccacttgaaccaggcagggctttgccatcccccaatgacctcaaaagaaaaatactcataaaaaacaagcggctgaaacctgaagttgaaaaaaaacagctggaagctttgagaagcatgatggaagctggagaatctgcctccccagcaaacatcttagaggacgataatgaagaggagatcgaaagtgctgaccaagaggaggaagctcaccccgaattcaaatttggaaatgaactttctgctgatgacttgggtcacaaggaagctgttgcaaatagcgtcaagaagggcctggtcactgtagaagatgagcaggcgtggatggcatcttataaatatgtaggtgctaccactaatatccatccatatttgtccacaatgatcaactacgcccagcctgtaaagtttcaaggtttccatgtggcagaagaacgcaatattcattataacatgtcttcttttaatgaatcagtcggtcttggctacttgaagacacatgcaattgaatttgtcaattataacaaacggcaaatgagtcgcatttaccccaagggaggccgagtcgattccagtaattacatgcctcagattttctggaacgctggctgccagatggtttcactgaactatcaaaccccaggtaggagctgatgtccagtgaccccaaattccatgagaacactttgacaggatggtgccagcacttcccatcagttggctgtgggcattttttaaaggaagcagacatatggcaaagcaatgtgttattggatttatataatggtgagaaataaaaaaaaaaaa

SEQ ID NO: 305761 - DNA, 172 bp, Homo sapiens
atcatatacaaaaacttactttttctaataaatttcttttcagcaatggagacaaaactgattatttaacggtagaccaattagtgagctttctaaatgaagtaagctttttcatacattaactccataaagtctgtgtgcagtggcttgccttctctggtgtcctcattgc

SEQ ID NO: 305762 - DNA, 355 bp, Homo sapiens
aaaatactgcatatatcaatgtccccattttcttttagcatcctttttctctaaaagtgcttatgttctacccaagattgtgaacaaggtctgactacttggcagtggtttggtgtcatggattttccatttgtctttcacacagctgaccaagaggaggaagctcaccccgaattcaaatttggaaatgaactttctgctgatgacttgggtcacaaggaagctgttgcaaatagcgtcaagaaggtcagagtcccctttctttcatcactctcaagaggtagcagctgttatttatgaaattttggaaatgtgagaaccacaagagaataaagtaacctataattccccttct

SEQ ID NO: 305763 - DNA, 590 bp, Homo sapiens
tttatttattcagagatactttatttattcagagatactttcgtattcttaaaaacaaacaaatatagatgtcagcaatatgccagatattagatcacaggattagatccccaattcccaggccccactctgtcactgatatgtctaagatcaaggaaagtggctttatttctcatccattatatgggtggggacaaggatcaatcacaagggttgaagtggtaatctttaacattcatttcatctaacatttttcacgagataatttccaggaaacatgttccaattgcttttctcagtgtcttgggcactgtagctcatgcagtacattttggggaatgcagatggatcatggacttactttcaacatcagggaacatttaagaacagcatggatttggtccacactccttagagtcatggttcttgggcgctgcattggaaaaatcagtgaaagtcctgttctgtttgcaggtgatcctgccggacctggctgtcttgagaatagctgtgtatgatgataacaacaagctgattggccagaggatcctcccgcttgatggcctccaagccggatatcgacacatttc

SEQ ID NO: 305764 - DNA, 514 bp, Homo sapiens
cttgccatgaagcagtccaaagaaatggatcagttgaaaaaagtccagcttgaacatctagaattcctagagaaacagaatgagcaggtattttacctaaaatacgtaaaaacatgcaggcagctagccagctttgggatacacatgccatggcccacagtgaccagtggcttgcatattgtaattgaaaggtagatagaagaatttgttgcccattactatattttctccattatatccaaaaagaaaagaaagtaccagtttttggagcaggagcagaatctggctgtgccaaaaaaagaatatttggataaattatggggattatgtgaattctaagaatgaaattactaaaagtgagaggatgaaaaaaagagattacgaagtatttctccattttcatttagagttttataatttgcaaactataggcaagggatatgatgtttaaaagcaaatgagagaaaccacctattttcaaactcaatctgaaaacgaagtttaaaaacctccc

SEQ ID NO: 305765 - DNA, 836 bp, Homo sapiens
caaagtggatcccctgctgcaacggcgagccagatcctctcggcaggaggaatgtgtcaaagctgttcagacccaaggaataacctaaagaaaaatatcttagtttgctaccagcatccagcatgaagttgtaaagtggggattaggcacgtgacagtatagcacccatttgaatttaaataaaagtgaaccatatttatctggttatataaaactaaaaatgggggtgtttatataaaactaaaaactaagaatgatgtaaccttttgtctgtgttatctgaacactctacttcctttgcagccttagtcacacaactgagtcatctcaagtactctttaaggacacacagcccaggctgttctgagtcagaataggcccctacaggtatattttaaaactcttcgtaattctaatgtgtactgctggtatagctgaactactgacctggatcttagtcctagcctttttgcttttgcaatttcagtatcttcatctctaaactagggaaacactgggattctttcttagctgtgggggaaggtatttggttagatgactttgaatgaatagactgctgtgctgaaagagctttatcacactgtctcaaagtatgtaaagatacataggtggatgctcttactgcagcagtcatgaatacatttttagccatttacctaaggaaaaagacagtttttctaggtaccatgaaggaagattgaccctgttggtatgcctgtgggggtgggatgtgagtgggactgataaactgatacttttggttcgtatgtacatactggaagaatcttttcataataaatgagactacacaacaa

SEQ ID NO: 305766 - DNA, 826 bp, Homo sapiens
gggcctgccacccgaccggttgagccccgcccccgcttttgggaacccccctgcgccgtcctgccccgcccgttcctacctcgggccgcgccccaagagggtctaaaactttccggcccgccccccgcattttttgtttttcattggccttgactttctgttgtgtaactcattcttctttgggtttattttcatttgtttctgctgaatattatttgtttcaaactaaaaataacattccacattttaattgatgtgcggactcttaatctacttaaaatgtgggctgaagttccatgattccagctagtctggaataggtcatttaactggatgttaattcacctacattgttccctaagtgacatgtgggtcccattctgctgacatatttgtgggtcctggtaacaaccatttgggtagatttgctgattcctcttttctccttagtggaagagaaagccaatacccacctcctcttgggcatgtgcttagacgcctgtgctcgctaccttctgttctccaagcagccgtcacaggcacaaaggatgtatgaaaaagctctgcagatttctgaagaaatacaaggagaaagacacccacaggtaagggaggaaaacacagaagggggaatataaaacaaaggcttcaaaattgaagggtgtgaaatgtcacactcattggtaacaggatcagcagatggtcctagatcctccttggtccccagtctactcattttcttatcaccagcaccctcaccccaactacttgtttcagaaaggatttgagactagttatcagttactaggtctgcccagaacttttt

SEQ ID NO: 305767 - DNA, 454 bp, Homo sapiens
  misc_feature (417)..(420): n is a, c, g, or t
  misc_feature (427)..(427): n is a, c, g, or t
accccaaacgcagagaggagtattccttggtcaacgcgagaacctctctggtttcctctctgcgtttggcagagaggaggatgcagaaatcattgtcaagatctttgtggagttttccatagcctctgagactcataaggccatccaggccctcaatggccgctggtttgctggccgcaaggtggtggctgaagtgtacgaccaggagcgttttgataacagtgtcctctctgcgtttcaaacgcagagaggacaatgcaataattgaaatttccctaaagctggccagtatctatgctgcgcagaacagacaggaatttgctgttgctggctatgaattctgcatttcaactctagaggaaaaaattgaaagagaaaaggaattagcagaagacattatgtcagtggaagagaaannnnataccantcctctctgcgtttgggggatcgtgat

SEQ ID NO: 305768 - DNA, 2521 bp, Homo sapiens
cgcagggatgtcctgctcagtcgtcagggcccggccaatccggagggcgctcggcgcgtggtcgggggccaggagcgcgtctggcctgcagtgcgcagaggacgcggcgggagcatgttccggctcctgagctggagcctgggccgaggcttcctgcgggccgcggggcggcggtgccggggctgctccgcgcgcctgctcccggggctggcaggaggtccggggcccgaggtgcaggtgccgccatcccgagtcgcgccgcacggccggggcccaggcctgctgccgctgctggcagcgctcgcctggttctcgaggcccgctgcggcagaggaggaggagcagcagggagccgacggggccgctgccgaggacggggcggacgaggccgaggcagagatcatccagctgctgaagcgagccaagttgagcattatgaaagatgagccagaagaggctgagttaattttgcatgacgctcttcgtctcgcctatcagactgataacaagaaggccatcacttacacttatgatttgatggccaacttagcatttatacggggtcagcttgaaaatgctgaacaactttttaaagcaacaatgagttacctccttggagggggcatgaagcaggaggacaatgcaataattgaaatttccctaaagctggccagtatctatgctgcgcagaacagacaggaatttgctgttgctggctatgaattctgcatttcaactctagaggaaaaaattgaaagagaaaaggaattagcagaagacattatgtcagtggaagagaaagccaatacccacctcctcttgggcatgtgcttagacgcctgtgctcgctaccttctgttctccaagcagccgtcacaggcacaaaggatgtatgaaaaagctctgcagatttctgaagaaatacaaggagaaagacacccacagaccattgtgctgatgagtgacctggctactaccctggatgcacagggccgctttgatgaggcctatatttatatgcaaagggcatcagatctggcaagacagataaatcatcctgagctacacatggtactcagtaatctagctgcagttttgatgcacagagaacgatatacacaagcaaaagagatctaccaggaagcactgaagcaagcaaagctgaaaaaagatgaaatttctgtacaacacatcagggaagagttggctgagctgtcaaagaaaagtagacctttgacaaattctgtcaagctctaaatccatttttgtgtagggagaataatgtctagtaatgtggaagaatagctatcattcctgtctctgtggcacccgatcaatggcttaaatctgtcgtttttgatattcaggtttcctcaatttagccttagtgaaggaggggttgtacacactgccatttttgtattttaaaggaaaaatgactttcattcccaactgattatgacctttcaggatgtcgtcaagtgatgctttcagttgtaacacgtgacttggtgctgtccctgctggtctaagtagaactgtagattcatatgggctggtgttcctgtgcgctgtgggtgtggtgattcagcctggcatttctaccataagtttttggtctgctgatttgctgccctgtcttctcttactttactttatcaatacctggcaaactgaccagaattaccttcctcatggcaaagggggattatggtgaattgttgttcttatagtctgtttcatgaagcacaagtggaatttaatacataaaagagaaaaatatcttagtttgctaccagcatccagcatgaagttgtaaagtggggattaggcacgtgacagtatagcacccatttgaatttaaataaaagtgaaccatatttatctggttatataaaactaaaaatgggggtgtttatataaaactaaaaactaagaatgatgtaaccttttgtctgtgttatctgaacactctacttcctttgcagccttagtcacacaactgagtcatctcaagtactctttaaggacacacagcccaggctgttctgagtcagaataggcccctacaggtatattttaaaactcttcgtaattctaatgtgtactgctggtatagctgaactactgacctggatcttagtcctagcctttttgcttttgcaatttcagtatcttcatctctaaactagggaaacactgggattctttcttagctgtgggggaaggtatttggttagatgactttgaatgaatagactgctgtgctgaaagagctttatcacactgtctcaaagtatgtaaagatacataggtggatgctcttactgcagcagtcatgaatacatttttagccatttacctaaggaaaaagacagtttttctaggtaccatgaaggaagattgaccctgttggtatgcctgtgggggtgggatgtgagtgggactgataaactgatacttttggttcgtatgtacatactggaagaatcttttcataataaatgagactacacaacaa

SEQ ID NO: 305769 - DNA, 2562 bp, Homo sapiens
cgcagggatgtcctgctcagtcgtcagggcccggccaatccggagggcgctcggcgcgtggtcgggggccaggagcgcgtctggcctgcagtgcgcagaggacgcggcgggagcatgttccggctcctgagctggagcctgggccgaggcttcctgcgggccgcggggcggcggtgccggggctgctccgcgcgcctgctcccggggctggcaggaggtccggggcccgaggtgcaggtgccgccatcccgagtcgcgccgcacggccggggcccaggcctgctgccgctgctggcagcgctcgcctggttctcgaggcccgctgcggcagaggaggaggagcagcagggagccgacggggccgctgccgaggacggggcggacgaggccgaggcagagatcatccagctgctgaagcgagccaagttgagcattatgaaagatgagccagaagaggctgagttaattttgcatgacgctcttcgtctcgcctatcagactgataacaagaaggccatcacttacacttatgatttgatggccaacttagcatttatacggggtcagcttgaaaatgctgaacaactttttaaagcaacaatgagttacctccttggagggggcatgaagcaggaggacaatgcaataattgaaatttccctaaagctggccagtatctatgctgcgcagaacagacaggaatttgctgttgctggctatgaattctgcatttcaactctagaggaaaaaattgaaagagaaaaggaattagcagaagacattatgtcagtggaagagaaagccaatacccacctcctcttgggcatgtgcttagacgcctgtgctcgctaccttctgttctccaagcagccgtcacaggcacaaaggatgtatgaaaaagctctgcagatttctgaagaaatacaaggagaaagacacccacagaccattgtgctgatgagtgacctggctactaccctggatgcacagggccgctttgatgaggcctatatttatatgcaaagggcatcagatctggcaagacagataaatcatcctgagctacacatggtactcagtaatctagctgcagttttgatgcacagagaacgatatacacaagcaaaagagatctaccaggaagcactgaagcaagcaaagctgaaaaaagatgaaatttctgtacaacacatcagggaagagttggctgagctgtcaaagaaaagtagacctttgacaaattctgtcaagctctaaatccatttttgtgtagggagaataatgtctagtaatgtggaagaatagctatcattcctgtctctgtggcacccgatcaatggcttaaatctgtcgtttttgatattcaggtttcctcaatttagccttagtgaaggaggggttgtacacactgccatttttgtattttaaaggaaaaatgactttcattcccaactgattatgacctttcaggatgtcgtcaagtgatgctttcagttgtaacacgtgacttggtgctgtccctgctggtctaagtagaactgtagattcatatgggctggtgttcctgtgcgctgtgggtgtggtgattcagcctggcatttctaccataagtttttggtctgctgatttgctgccctgtcttctcttactttactttatcaatacctggcaaactgaccagaattaccttcctcatggcaaagggggattatggtgaattgttgttcttatagtctgtttcatgaagcacaagtggaatttaatacataaaagagaaaaatatcttagtttgctaccagcatccagcatgaagttgtaaagtggggattaggcacgtgacagtatagcacccatttgaatttaaataaaagtgaaccatatttatctggttatataaaactaaaaatgggggtgtttatataaaactaaaaactaagaatgatgtaaccttttgtctgtgttatctgaacactctacttcctttgcagccttagtcacacaactgagtcatctcaagtactctttaaggacacacagcccaggctgttctgagtcagaataggcccctacaggtatattttaaaactcttcgtaattctaatgtgtactgctggtatagctgaactactgacctggatcttagtcctagcctttttgcttttgcaatttcagtatcttcatctctaaactagggaaacactgggattctttcttagctgtgggggaaggtatttggttagatgactttgaatgaatagactgctgtgctgaaagagctttatcacactgtctcaaagtatgtaaagatacataggtggatgctcttactgcagcagtcatgaatacatttttagccatttacctaaggaaaaagacagtttttctaggtaccatgaaggaagattgaccctgttggtatgcctgtgggggtgggatgtgagtgggactgataaactgatacttttggttcgtatgtacatactggaagaatcttttcataataaatgagactacacaacaatattgtatgtatcccagtaatctttgcatttctcaaaaaaa

SEQ ID NO: 305770 - DNA, 2828 bp, Homo sapiens
  misc_feature (2528)..(2528): n is a, c, g, or t
  misc_feature (2530)..(2530): n is a, c, g, or t
  misc_feature (2536)..(2536): n is a, c, g, or t
  misc_feature (2545)..(2545): n is a, c, g, or t
cgcagggatgtcctgctcagtcgtcagggcccggccaatccggagggcgctcggcgcgtggtcgggggccaggagcgcgtctggcctgcagtgcgcagaggacgcggcgggagcatgttccggctcctgagctggagcctgggccgaggcttcctgcgggccgcggggcggcggtgccggggctgctccgcgcgcctgctcccggggctggcaggaggtccggggcccgaggtgcaggtgccgccatcccgagtcgcgccgcacggccggggcccaggcctgctgccgctgctggcagcgctcgcctggttctcgaggcccgctgcggcagaggaggaggagcagcagggagccgacggggccgctgccgaggacggggcggacgaggccgaggcagagatcatccagctgctgaagcgagccaagttgagcattatgaaagatgagccagaagaggctgagttaattttgcatgacgctcttcgtctcgcctatcagactgataacaagaaggccatcacttacacttatgatttgatggccaacttagcatttatacggggtcagcttgaaaatgctgaacaactttttaaagcaacaatgagttacctccttggagggggcatgaagcaggaggacaatgcaataattgaaatttccctaaagctggccagtatctatgctgcgcagaacagacaggaatttgctgttgctggctatgaattctgcatttcaactctagaggaaaaaattgaaagagaaaaggaattagcagaagacattatgtcagtggaagagaaagccaatacccacctcctcttgggcatgtgcttagacgcctgtgctcgctaccttctgttctccaagcagccgtcacaggcacaaaggatgtatgaaaaagctctgcagatttctgaagaaatacaaggagaaagacacccacagaccattgtgctgatgagtgacctggctactaccctggatgcacagggccgctttgatgaggcctatatttatatgcaaagggcatcagatctggcaagacagataaatcatcctgagctacacatggtactcagtaatctagctgcagttttgatgcacagagaacgatatacacaagcaaaagagatctaccaggaagcactgaagcaagcaaagctgaaaaaagatgaaatttctgtacaacacatcagggaagagttggctgagctgtcaaagaaaagtagacctttgacaaattctgtcaagctctaaatccatttttgtgtagggagaataatgtctagtaatgtggaagaatagctatcattcctgtctctgtggcacccgatcaatggcttaaatctgtcgtttttgatattcaggtttcctcaatttagccttagtgaaggaggggttgtacacactgccatttttgtattttaaaggaaaaatgactttcattcccaactgattatgacctttcaggatgtcgtcaagtgatgctttcagttgtaacacgtgacttggtgctgtccctgctggtctaagtagaactgtagattcatatgggctggtgttcctgtgcgctgtgggtgtggtgattcagcctggcatttctaccataagtttttggtctgctgatttgctgccctgtcttctcttactttactttatcaatacctggcaaactgaccagaattaccttcctcatggcaaagggggattatggtgaattgttgttcttatagtctgtttcatgaagcacaagtggaatttaatacataaaagagaaaaatatcttagtttgctaccagcatccagcatgaagttgtaaagtggggattaggcacgtgacagtatagcacccatttgaatttaaataaaagtgaaccatatttatctggttatataaaactaaaaatgggggtgtttatataaaactaaaaactaagaatgatgtaaccttttgtctgtgttatctgaacactctacttcctttgcagccttagtcacacaactgagtcatctcaagtactctttaaggacacacagcccaggctgttctgagtcagaataggcccctacaggtatattttaaaactcttcgtaattctaatgtgtactgctggtatagctgaactactgacctggatcttagtcctagcctttttgcttttgcaatttcagtatcttcatctctaaactagggaaacactgggattctttcttagctgtgggggaaggtatttggttagatgactttgaatgaatagactgctgtgctgaaagagctttatcacactgtctcaaagtatgtaaagatacataggtggatgctcttactgcagcagtcatgaatacatttttagccatttacctaaggaaaaagacagtttttctaggtaccatgaaggaagattgaccctgttggtatgcctgtgggggtgggatgtgagtgggactgataaactgatacttttggttcgtatgtacatactggaagaatcttttcataataaatgagactacacaacaaaaaaaananagaaanaaaaaaaantttttgggccgcctcgtggccttgaaaaagttttttaaaacccttctgtttggggggcccgggcccccgttgggttacgttaacacctggggcaaaaagggggtacccaaaggaaaaacctcggggacagaacaaagggcctgggtgttttctccacccaatataaaaaaagccccggggggaaacccgaaggtttccggaaccaaatccccaaaggggatttccgagaggccataaggggggtctctacaaacaggggttccaaggaatccgattttaattc

SEQ ID NO: 305771 - DNA, 2073 bp, Homo sapiens
ctgcattgtttttcttataccatacaggtttttcattggccttgactttctgttgtgtaactcattcttctttgggtttattttcatttgtttctgctgaatattatttgtttcaaactaaaaataacattccacattttaattgatgtgcggactcttaatctacttaaaatgtgggctgaagttccatgattccagctagtctggaataggtcatttaactggatgttaattcacctacattgttccctaagtgacatgtgggtcccattctgctgacatatttgtgggtcctggtaacaaccatttgggtagatttgctgattcctcttttctccttagtggaagagaaagccaatacccacctcctcttgggcatgtgcttagacgcctgtgctcgctaccttctgttctccaagcagccgtcacaggcacaaaggatgtatgaaaaagctctgcagatttctgaagaaatacaaggagaaagacacccacagaccattgtgctgatgagtgacctggctactaccctggatgcacagggccgctttgatgaggcctatatttatatgcaaagggcatcagatctggcaagacagataaatcatcctgagctacacatggtactcagtaatctagctgcagttttgatgcacagagaacgatatacacaagcaaaagagatctaccaggaagcactgaagcaagcaaagctgaaaaaagatgaaatttctgtacaacacatcagggaagagttggctgagctgtcaaagaaaagtagacctttgacaaattctgtcaagctctaaatccatttttgtgtagggagaataatgtctagtaatgtggaagaatagctatcattcctgtctctgtggcacccgatcaatggcttaaatctgtcgtttttgatattcaggtttcctcaatttagccttagtgaaggaggggttgtacacactgccatttttgtattttaaaggaaaaatgactttcattcccaactgattatgacctttcaggatgtcgtcaagtgatgctttcagttgtaacacgtgacttggtgctgtccctgctggtctaagtagaactgtagattcatatgggctggtgttcctgtgcgctgtgggtgtggtgattcagcctggcatttctaccataagtttttggtctgctgatttgctgccctgtcttctcttactttactttatcaatacctggcaaactgaccagaattaccttcctcatggcaaagggggattatggtgaattgttgttcttatagtctgtttcatgaagcacaagtggaatttaatacataaaagagaaaaatatcttagtttgctaccagcatccagcatgaagttgtaaagtggggattaggcacgtgacagtatagcacccatttgaatttaaataaaagtgaaccatatttatctggttatataaaactaaaaatgggggtgtttatataaaactaaaaactaagaatgatgtaaccttttgtctgtgttatctgaacactctacttcctttgcagccttagtcacacaactgagtcatctcaagtactctttaaggacacacagcccaggctgttctgagtcagaataggcccctacaggtatattttaaaactcttcgtaattctaatgtgtactgctggtatagctgaactactgacctggatcttagtcctagcctttttgcttttgcaatttcagtatcttcatctctaaactagggaaacactgggattctttcttagctgtgggggaaggtatttggttagatgactttgaatgaatagactgctgtgctgaaagagctttatcacactgtctcaaagtatgtaaagatacataggtggatgctcttactgcagcagtcatgaatacatttttagccatttacctaaggaaaaagacagtttttctaggtaccatgaaggaagattgaccctgttggtatgcctgtgggggtgggatgtgagtgggactgataaactgatacttttggttcgtatgtacatactggaagaatcttttcataataaatgagactacacaacaa

SEQ ID NO: 305772 - DNA, 2382 bp, Homo sapiens
  misc_feature (181)..(181): n is a, c, g, or t
  misc_feature (187)..(187): n is a, c, g, or t
  misc_feature (191)..(191): n is a, c, g, or t
  misc_feature (197)..(197): n is a, c, g, or t
  misc_feature (199)..(199): n is a, c, g, or t
  misc_feature (201)..(202): n is a, c, g, or t
  misc_feature (213)..(213): n is a, c, g, or t
  misc_feature (217)..(219): n is a, c, g, or t
  misc_feature (227)..(228): n is a, c, g, or t
  misc_feature (233)..(233): n is a, c, g, or t
  misc_feature (238)..(238): n is a, c, g, or t
  misc_feature (241)..(241): n is a, c, g, or t
  misc_feature (246)..(246): n is a, c, g, or t
  misc_feature (248)..(250): n is a, c, g, or t
  misc_feature (253)..(253): n is a, c, g, or t
  misc_feature (255)..(255): n is a, c, g, or t
  misc_feature (257)..(258): n is a, c, g, or t
  misc_feature (260)..(261): n is a, c, g, or t
  misc_feature (264)..(265): n is a, c, g, or t
  misc_feature (269)..(270): n is a, c, g, or t
  misc_feature (275)..(276): n is a, c, g, or t
  misc_feature (278)..(278): n is a, c, g, or t
  misc_feature (280)..(280): n is a, c, g, or t
  misc_feature (284)..(285): n is a, c, g, or t
  misc_feature (288)..(290): n is a, c, g, or t
  misc_feature (294)..(294): n is a, c, g, or t
  misc_feature (296)..(296): n is a, c, g, or t
  misc_feature (303)..(303): n is a, c, g, or t
  misc_feature (308)..(308): n is a, c, g, or t
  misc_feature (311)..(313): n is a, c, g, or t
  misc_feature (315)..(316): n is a, c, g, or t
  misc_feature (318)..(318): n is a, c, g, or t
  misc_feature (320)..(320): n is a, c, g, or t
  misc_feature (325)..(325): n is a, c, g, or t
  misc_feature (327)..(328): n is a, c, g, or t
  misc_feature (333)..(334): n is a, c, g, or t
  misc_feature (337)..(338): n is a, c, g, or t
  misc_feature (342)..(342): n is a, c, g, or t
  misc_feature (347)..(348): n is a, c, g, or t
  misc_feature (352)..(353): n is a, c, g, or t
  misc_feature (356)..(356): n is a, c, g, or t
  misc_feature (360)..(361): n is a, c, g, or t
  misc_feature (363)..(363): n is a, c, g, or t
  misc_feature (365)..(365): n is a, c, g, or t
  misc_feature (368)..(368): n is a, c, g, or t
  misc_feature (370)..(370): n is a, c, g, or t
  misc_feature (378)..(379): n is a, c, g, or t
  misc_feature (381)..(381): n is a, c, g, or t
  misc_feature (413)..(413): n is a, c, g, or t
  misc_feature (428)..(430): n is a, c, g, or t
  misc_feature (436)..(437): n is a, c, g, or t
  misc_feature (441)..(441): n is a, c, g, or t
  misc_feature (445)..(445): n is a, c, g, or t
  misc_feature (452)..(452): n is a, c, g, or t
  misc_feature (455)..(455): n is a, c, g, or t
cggggacaggggcgcgggccgggcccgatgacctcagagccccttcccgcagcgctcgcctggttctcgaggcccgctgcggcagaggaggaggagcagcagggagccgacggggccgctgccgaggacggggcggacgaggccgaggcagagatcatccagctgctgaagcgagccaagnggaggngggngaagtngngnnttatgagagangagnnngaggaggnngagtnaattntgngtggngnnnttngngnngnntanngggnngatgnnangngggnnatnnnttgngnttatganttggnggnnnanntngnatttntnnggggnnggnntganaatgnnggannacntttnnangnganantgggttgnntncttggggggggcatgaaggagggggggaatgnaataattgggatttnnntagagnnggcnggtntctatgntgngcagaacacaggaatttgctgttgctggctatgaattctgcatttcaactctagaggaaaaaattgaaagagaaaaggaattagcagaagacattatgtcagtagagacggggtttcaccatgttagccaggatggtctcaatctcctgaccttgtgatccacccgcctcggcctcccaaagtgctgtgattacagtggaagagaaagccaatacccacctcctcttgggcatgtgcttagacgcctgtgctcgctaccttctgttctccaagcagccgtcacaggcacaaaggatgtatgaaaaagctctgcagatttctgaagaaatacaaggagaaagacacccacagaccattgtgctgatgagtgacctggctactaccctggatgcacagggccgctttgatgaggcctatatttatatgcaaagggcatcagatctggcaagacagataaatcatcctgagctacacatggtactcagtaatctagctgcagttttgatgcacagagaacgatatacacaagcaaaagagatctaccaggaagcactgaagcaagcaaagctgaaaaaagatgaaatttctgtacaacacatcagggaagagttggctgagctgtcaaagaaaagtagacctttgacaaattctgtcaagctctaaatccatttttgtgtagggagaataatgtctagtaatgtggaagaatagctatcattcctgtctctgtggcacccgatcaatggcttaaatctgtcgtttttgatattcaggtttcctcaatttagccttagtgaaggaggggttgtacacactgccatttttgtattttaaaggaaaaatgactttcattcccaactgattatgacctttcaggatgtcgtcaagtgatgctttcagttgtaacacgtgacttggtgctgtccctgctggtctaagtagaactgtagattcatatgggctggtgttcctgtgcgctgtgggtgtggtgattcagcctggcatttctaccataagtttttggtctgctgatttgctgccctgtcttctcttactttactttatcaatacctggcaaactgaccagaattaccttcctcatggcaaagggggattatggtgaattgttgttcttatagtctgtttcatgaagcacaagtggaatttaatacataaaagagaaaaatatcttagtttgctaccagcatccagcatgaagttgtaaagtggggattaggcacgtgacagtatagcacccatttgaatttaaataaaagtgaaccatatttatctggttatataaaactaaaaatgggggtgtttatataaaactaaaaactaagaatgatgtaaccttttgtctgtgttatctgaacactctacttcctttgcagccttagtcacacaactgagtcatctcaagtactctttaaggacacacagcccaggctgttctgagtcagaataggcccctacaggtatattttaaaactcttcgtaattctaatgtgtactgctggtatagctgaactactgacctggatcttagtcctagcctttttgcttttgcaatttcagtatcttcatctctaaactagggaaacactgggattctttcttagctgtgggggaaggtatttggttagatgactttgaatgaatagactgctgtgctgaaagagctttatcacactgtctcaaagtatgtaaagatacataggtggatgctcttactgcagcagtcatgaatacatttttagccatttacctaaggaaaaagacagtttttctaggtaccatgaaggaagattgaccctgttggtatgcctgtgggggtgggatgtgagtgggactgataaactgatacttttggttcgtatgtacatactggaagaatcttttcataataaatgagactacacaacaa

SEQ ID NO: 305773 - DNA, 1665 bp, Homo sapiens
cgcagggatgtcctgctcagtcgtcagggcccggccaatccggagggcgctcggcgcgtggtcgggggccaggagcgcgtctggcctgcagtgcgcagaggacgcggcgggagcatgttccggctcctgagctggagcctgggccgaggcttcctgcgggccgcggggcggcggtgccggggctgctccgcgcgcctgctcccggggctggcaggaggtccggggcccgaggtgcaggtgccgccatcccgagtcgcgccgcacggccggggcccaggcctgctgccgctgctggcagcgctcgcctggttctcgaggcccgctgcggcagaggaggaggagcagcagggagccgacggggccgctgccgaggacggggcggacgaggccgaggcagagatcatccagctgctgaagcgagccaagttgagcattatgaaagatgagccagaagaggctgagttaattttgcatgacgctcttcgtctcgcctatcagactgataacaagaaggccatcacttacacttatgatttgatggccaacttagcatttatacggggtcagcttgaaaatgctgaacaactttttaaagcaacaatgagttacctccttggagggggcatgaagcaggaggacaatgcaataattgaaatttccctaaagctggccagtatctatgctgcgcagaacagacaggaatttgctgttgctggctatgaattctgcatttcaactctagaggaaaaaattgaaagagaaaaggaattagcagaagacattatgtcagtggaagagaaagccaatacccacctcctcttgggcatgtgcttagacgcctgtgctcgctaccttctgttctccaagcagccgtcacaggcacaaaggatgtatgaaaaagctctgcagatttctgaagaaatacaaggagaaagacacccacagaccattgtgctgatgagtgacctggctactaccctggatgcacagggccgctttgatgaggcctatatttatatgcaaagggcatcagatctggcaagacagataaatcatcctgagctacacatggtactcagtaatctagctgcagttttgatgcacagagaacgatatacacaagcaaaagagatctaccaggaagcactgaagcaagcaaagctgaaaaaagatgaaatttctgtacaacacatcagggaagagttggctgagctgtcaaagaaaagtagacctttgacaaattctgtcaagctctaaatccatttttgtgtagggagaataatgtctagtaatgtggaagaatagctatcattcctgtctctgtggcacccgatcaatggcttaaatctgtcgtttttgatattcaggtttcctcaatttagccttagtgaaggaggggttgtacacactgccatttttgtattttaaaggaaaaatgactttcattcccaactgattatgacctttcaggatgtcgtcaagtgatgctttcagttgtaacacgtgacttggtgctgtccctgctggtctaagtagaactgtagattcatatgggctggtgttcctgtgcgctgtgggatgtgagtgggactgataaactgatacttttggttcgtatgtacatactggaagaatcttttcataataaatgagactacacaacaa

SEQ ID NO: 305774 - DNA, 1392 bp, Homo sapiens
cgcagggatgtcctgctcagtcgtcagggcccggccaatccggagggcgctcggcgcgtggtcgggggccaggagcgcgtctggcctgcagtgcgcagaggacgcggcgggagcatgttccggctcctgagctggagcctgggccgaggcttcctgcgggccgcggggcggcggtgccggggctgctccgcgcgcctgctcccggggctggcaggaggtccggggcccgaggtgcaggtgccgccatcccgagtcgcgccgcacggccggggcccaggcctgctgccgctgctggcagcgctcgcctggttctcgaggcccgctgcggcagaggaggaggagcagcagggagccgacggggccgctgccgaggacggggcggacgaggccgaggcagagatcatccagctgctgaagcgagccaagttgagcattatgaaagatgagccagaagaggctgagttaattttgcatgacgctcttcgtctcgcctatcagactgataacaagaaggccatcacttacacttatgatttgatggccaacttagcatttatacggggtcagcttgaaaatgctgaacaactttttaaagcaacaatgagttacctccttggagggggcatgaagcaggaggacaatgcaataattgaaatttccctaaagctggccagtatctatgctgcgcagaacagacaggaatttgctgttgctggctatgaattctgcatttcaactctagaggaaaaaattgaaagagaaaaggaattagcagaagacattatgtcagtggaagagaaagccaatacccacctcctcttgggcatgtgcttagacgcctgtgctcgctaccttctgttctccaagcagccgtcacaggcacaaaggatgtatgaaaaagctctgcagatttctgaagaaatacaaggagaaagacacccacagaccattgtgctgatgagtgacctggctactaccctggatgcacagggccgctttgatgaggcctatatttatatgcaaagggcatcagatctggcaagacagataaatcatcctgagctacacatggtactcagtaatctagctgcagttttgatgcacagagctgccaccacagtgcttggtccttccaaggaagctaaggccacgttgggatgaggccctcacttcatccggcaactaccaccacgtccggcagcgccagccccacacttgcccataccatgtcctctgtctccgagctcgcctgcatctactcagccctcactctgcatgacaatgaggtgaccatcacggaggataagatcaatgccctcgttaaagcagctggtgtaaatgttgaacctttttggtccagcttgtttgcaatggccctggccaatgtcaaca

SEQ ID NO: 305775 - DNA, 1409 bp, Homo sapiens
cgcagggatgtcctgctcagtcgtcagggcccggccaatccggagggcgctcggcgcgtggtcgggggccaggagcgcgtctggcctgcagtgcgcagaggacgcggcgggagcatgttccggctcctgagctggagcctgggccgaggcttcctgcgggccgcggggcggcggtgccggggctgctccgcgcgcctgctcccggggctggcaggaggtccggggcccgaggtgcaggtgccgccatcccgagtcgcgccgcacggccggggcccaggcctgctgccgctgctggcagcgctcgcctggttctcgaggcccgctgcggcagaggaggaggagcagcagggagccgacggggccgctgccgaggacggggcggacgaggccgaggcagagatcatccagctgctgaagcgagccaagttgagcattatgaaagatgagccagaagaggctgagttaattttgcatgacgctcttcgtctcgcctatcagactgataacaagaaggccatcacttacacttatgatttgatggccaacttagcatttatacggggtcagcttgaaaatgctgaacaactttttaaagcaacaatgagttacctccttggagggggcatgaagcaggaggacaatgcaataattgaaatttccctaaagctggccagtatctatgctgcgcagaacagacaggaatttgctgttgctggctatgaattctgcatttcaactctagaggaaaaaattgaaagagaaaaggaattagcagaagacattatgtcaggtaggaaacccattatctgggcattgccttttctccacaaaaggctttactttacacttttgagaaatggaaagagatctaaattgggaagagggaaagttacctattttgcaaaataagtgtctgtctttaaggtatcagcagaagttttggaataagatgttttatttaaaatatttgactgctgttttggtggtggttttttttttaacccccttggtaacatggtcataatttatttgttaacttttagttacatataacttaaggaaaattggggagcagaaggagaaggtgtttctcgtatctcttagttcagctaccaatcaaaatgcttattacgttttagccctagatatacagcaaattaagaaagaagagaaaaaaagctcatgtttttacaatccatcctcactcattctggaggctaggaatagaactggatgagcaggaagctctctagctctccaccattttgggtttcttaatttgggttgaagtattgagaattttcagatttgacatttattcaatacctactctataccaagagctaccgagatggtagggatacagcagtcaactcttctgtacctagtggtcttctaactctctcttg

SEQ ID NO: 305776 - DNA, 170 bp, Homo sapiens
atggccaacttagcatttatacggggtcagcttgaaaatgtaagtaaattgctttgtaatatcttgaatttatgaaggagtagcttcaagggaactgtaatagtaagagtacaggctaagctgctataacaaagagaccctagaatatagtgactcaaacaagataaaag

SEQ ID NO: 305777 - DNA, 336 bp, Homo sapiens
ctctgcatgacaatgaggtgaccatcacggaggataagatcaatgccctcgttaaagcagctggtgtaaatgttgaacctttttggtccagcttgtttgcaatggccctggccaatgtcaacattgggagcctcatctacaatgtaggggctggtggacctgctccagcagctggtgctgcaccagtgggatcctgcccactccactgctgctgctccagctgagaagaaagtggaagcaaacaaagaagaatctgaggagtctgatgatgacatgggcttttggttgttttgactaaatttcttataacgtgttcaatacaaagctgaacttaag

SEQ ID NO: 305778 - DNA, 691 bp, Homo sapiens
gcaccagcttgtcgcttcataagcacacagtaaattagccctatatctgcattcatgctctctcttcagaatcaccttgaaaacatacactttcttcttactgtcccttctctctgggttattttagaacgatatacacaagcaaaagagatctaccaggaagcactgaagcaagcaaagctgaaaaaagatgaaatttctgtacaacacatcagggaagagttggctgagctgtcaaagaaaagtagacctttgacaaattctgtcaagctctaaatccatttttgtgtagggagaataatgtctagtaatgtggaagaatagctatcattcctgtctctgtggcacccgatcaatggcttaaatctgtcgtttttgatattcaggtttcctcaatttagccttagtgaaggaggggttgtacacactgccatttttgtattttaaaggaaaaatgactttcattcccaactgattatgacctttcaggatgtcgtcaagtgatgctttcagttgtaacacgtgacttggtgctgtccctgctggtctaagtagaactgtagattcatatgggctggtgttcctgtgcgctgtgggtgtggtgattcagcctggcatttctaccataagtttttggtctgctgatttgctgccctgtcttctcttactttactttatcaatacctggcaa

SEQ ID NO: 305779 - DNA, 179 bp, Homo sapiens
gcggccgcctactactactactgctcgaattcaagcttctaacgatgtacggggacatgccctcagcaccactcttgtccccactgaacggcaactgagactgggtacctggagattctgaagtgcctttgctgtggttttcaaaataataaagatttgtattcaactcaaaaaaaaaa

SEQ ID NO: 305780 - DNA, 1750 bp, Homo sapiens
gtgctgtaaccctgcagggaccaacgagcaggctatcatcgatgtgctcaccaagagaagcaacacgcagcggcagcagatcgccaagtccttcaaggctcagttcggcaaggacctcactgagaccttgaagtctgagctcagtggcaagtttgagaggctcattgtggcccttatgtacccgccatacagatacgaagccaaggagctgcatgacgccatgaagggcttaggaaccaaggagggtgtcatcattgagatcctggcctctcggaccaagaaccagctgcgggagataatgaaggcgtatgaggaagactatgggtccagcctggaggaggacatccaagcagacacaagtggctacctggagaggatcctggtgtgcctcctgcagggcagcagggatgatgtgagcagctttgtggacccggcactggccctccaagacgcacaggatctgtatgcggcaggcgagaagattcgtgggactgatgagatgaaattcatcaccatcctgtgcacgcgcagtgccactcacctgctgagagtgtttgaagagtatgagaaaattgccaacaagagcattgaggacagcatcaagagtgagacccatggctcactggaggaggccatgctcactgtggtgaaatgcacccaaaacctccacagctactttgcagagagactctactatgccatgaagggagcagggacgcgtgatgggaccctgataagaaacatcgtttcaaggagcgagattgacttaaatcttatcaaatgtcacttcaagaagatgtacggcaagaccctcagcagcatgatcatggaagacaccagcggcgactacaagaacgccctgctgagcctggtgggcagcgacccctgaggcacagaagaacaagagcaaagaccatgaagccagagtctccaggactcctcactcaacctcggccatggacgcaggttgggtgtgaggggggtcccagcctttcagtcttctatttccctatttccagtgctttccagccgggtttctgacccagagggtggaaccggcctggactcctcttcccaacttcctccaggtcatttcccagtgtgagcacaatgccaaccttagtgtttctccagccagacagatgcctcagcatgaagggcttggggacttgtggatcattccttcctccctgcaggagcttcccaagctggtcacagagtctcctgggcacaggttatacagaccccagccccattcccatctactgaaacagggtctccacaagaggggccagggaatatgggtttttaacaagcgtcttacaaaacacttctctatcatgcagccggagagctggctgggagcccttttgttttagaacacacatccttcagcagctgagaaacgaacacgaatccatcccaaccgagatgccattaacattcatctaaaaatgttaggctctaaatggacgaaaaattctctcgccatcttaataacaaaataaactacaaattcctgacccaaggacactgtgttataagaggcgtgggctcccctggtggctgaccaggtcagctgccctggccttgcacccctctgcatgcagcacagaagggtgtgaccatgccctcagcaccactcttgtccccactgaacggcaactgagactgggtacctggagattctgaagtgcctttgctgtggttttcaaaataataaagatttgtattcaactcaaaaaaaaaa

SEQ ID NO: 305781 - DNA, 2157 bp, Homo sapiens
cagtatgcatttttacagtttccctctcttagtcctcacagtgatacattctttgtattcaaacatttggggaaactggcactcagagaggttttaagttgcccaaggtcccagagcctgtaatcaacaaggtggggattaaaatccaggtctgacaaagcccttgatctctctgctgctctgtagatcagctgatgtagcctggtggctcctcgtagcaacatgtgaccttagaaggaggcacatgtgagacgaagtctttaattcaggcatgcattcattcattgagtgccaagtgacaggtattttatggtgatgccatactcagagcttgcagtctagctagcaataccaatttcattttactgagagcttatgatgtgcccagcactgcactgaatgctgaattgagtcacacacaaccccctaagcaacgggatgaagcaggagcacgtttctctccgtgtaaccggtaaagatactgatgctaagagaagctaaggagctggcccaagaaacccagccagcacgtggcaaggcccacgcagaatccagcccaagcccctggacccagccaccactccgctgcctgcactcagatacgaagccaaggagctgcatgacgccatgaagggcttaggaaccaaggagggtgtcatcattgagatcctggcctctcggaccaagaaccagctgcgggagataatgaaggcgtatgaggaagactatgggtccagcctggaggaggacatccaagcagacacaagtggctacctggagaggatcctggtgtgcctcctgcagggcagcagggatgatgtgagcagctttgtggacccggcactggccctccaagacgcacaggatctgtatgcggcaggcgagaagattcgtgggactgatgagatgaaattcatcaccatcctgtgcacgcgcagtgccactcacctgctgagagtgtttgaagagtatgagaaaattgccaacaagagcattgaggacagcatcaagagtgagacccatggctcactggaggaggccatgctcactgtggtgaaatgcacccaaaacctccacagctactttgcagagagactctactatgccatgaagggagcagggacgcgtgatgggaccctgataagaaacatcgtttcaaggagcgagattgacttaaatcttatcaaatgtcacttcaagaagatgtacggcaagaccctcagcagcatgatcatggaagacaccagcggcgactacaagaacgccctgctgagcctggtgggcagcgacccctgaggcacagaagaacaagagcaaagaccatgaagccagagtctccaggactcctcactcaacctcggccatggacgcaggttgggtgtgaggggggtcccagcctttcagtcttctatttccctatttccagtgctttccagccgggtttctgacccagagggtggaaccggcctggactcctcttcccaacttcctccaggtcatttcccagtgtgagcacaatgccaaccttagtgtttctccagccagacagatgcctcagcatgaagggcttggggacttgtggatcattccttcctccctgcaggagcttcccaagctggtcacagagtctcctgggcacaggttatacagaccccagccccattcccatctactgaaacagggtctccacaagaggggccagggaatatgggtttttaacaagcgtcttacaaaacacttctctatcatgcagccggagagctggctgggagcccttttgttttagaacacacatccttcagcagctgagaaacgaacacgaatccatcccaaccgagatgccattaacattcatctaaaaatgttaggctctaaatggacgaaaaattctctcgccatcttaataacaaaataaactacaaattcctgacccaaggacactgtgttataagaggcgtgggctcccctggtggctgaccaggtcagctgccctggccttgcacccctctgcatgcagcacagaagggtgtgaccatgccctcagcaccactcttgtccccactgaacggcaactgagactgggtacctggagattctgaagtgcctttgctgtggttttcaaaataataaagatttgtattcaactcaaaaaaaaaa

SEQ ID NO: 305782 - DNA, 1654 bp, Homo sapiens
gtgctgtaaccctgcagggaccaacgagcaggctatcatcgatgtgctcaccaagagaagcaacacgcagcggcagcagatcgccaagtccttcaaggctcagttcggcaaggacctcactgagaccttgaagtctgagctcagtggcaagtttgagaggctcattgtggcccttatgtacccgccatacagatacgaagccaaggagctgcatgacgccatgaagggcttaggaaccaaggagggtgtcatcattgagatcctggcctctcggaccaagaaccagctgcgggagataatgaaggcgtatgaggaagactatgggtccagcctggaggaggacatccaagcagacacaagtggctacctggagaggatcctggtgtgcctcctgcagggcagcagggatgatgtgagcagctttgtggacccggcactggccctccaagacgcacaggatctgtatgcggcaggcgagaagattcgtgggactgatgagatgaaattcatcaccatcctgtgcacgcgcagtgccactcacctgctgagagtgaaatgcacccaaaacctccacagctactttgcagagagactctactatgccatgaagggagcagggacgcgtgatgggaccctgataagaaacatcgtttcaaggagcgagattgacttaaatcttatcaaatgtcacttcaagaagatgtacggcaagaccctcagcagcatgatcatggaagacaccagcggcgactacaagaacgccctgctgagcctggtgggcagcgacccctgaggcacagaagaacaagagcaaagaccatgaagccagagtctccaggactcctcactcaacctcggccatggacgcaggttgggtgtgaggggggtcccagcctttcagtcttctatttccctatttccagtgctttccagccgggtttctgacccagagggtggaaccggcctggactcctcttcccaacttcctccaggtcatttcccagtgtgagcacaatgccaaccttagtgtttctccagccagacagatgcctcagcatgaagggcttggggacttgtggatcattccttcctccctgcaggagcttcccaagctggtcacagagtctcctgggcacaggttatacagaccccagccccattcccatctactgaaacagggtctccacaagaggggccagggaatatgggtttttaacaagcgtcttacaaaacacttctctatcatgcagccggagagctggctgggagcccttttgttttagaacacacatccttcagcagctgagaaacgaacacgaatccatcccaaccgagatgccattaacattcatctaaaaatgttaggctctaaatggacgaaaaattctctcgccatcttaataacaaaataaactacaaattcctgacccaaggacactgtgttataagaggcgtgggctcccctggtggctgaccaggtcagctgccctggccttgcacccctctgcatgcagcacagaagggtgtgaccatgccctcagcaccactcttgtccccactgaacggcaactgagactgggtacctggagattctgaagtgcctttgctgtggttttcaaaataataaagatttgtattcaactcaaaaaaaaaa

SEQ ID NO: 305783 - DNA, 1617 bp, Homo sapiens
ttcctgaggctcaggcatcttgagaaaagaaggtgtggacagagcagaaggtcatggcagagcactccagcaggcagaggtttctgtccacagggcttaggaaccaaggagggtgtcatcattgagatcctggcctctcggaccaagaaccagctgcgggagataatgaaggcgtatgaggaagactatgggtccagcctggaggaggacatccaagcagacacaagtggctacctggagaggatcctggtgtgcctcctgcagggcagcagggatgatgtgagcagctttgtggacccggcactggccctccaagacgcacaggatctgtatgcggcaggcgagaagattcgtgggactgatgagatgaaattcatcaccatcctgtgcacgcgcagtgccactcacctgctgagagtgtttgaagagtatgagaaaattgccaacaagagcattgaggacagcatcaagagtgagacccatggctcactggaggaggccatgctcactgtggtgaaatgcacccaaaacctccacagctactttgcagagagactctactatgccatgaagggagcagggacgcgtgatgggaccctgataagaaacatcgtttcaaggagcgagattgacttaaatcttatcaaatgtcacttcaagaagatgtacggcaagaccctcagcagcatgatcatggaagacaccagcggcgactacaagaacgccctgctgagcctggtgggcagcgacccctgaggcacagaagaacaagagcaaagaccatgaagccagagtctccaggactcctcactcaacctcggccatggacgcaggttgggtgtgaggggggtcccagcctttcagtcttctatttccctatttccagtgctttccagccgggtttctgacccagagggtggaaccggcctggactcctcttcccaacttcctccaggtcatttcccagtgtgagcacaatgccaaccttagtgtttctccagccagacagatgcctcagcatgaagggcttggggacttgtggatcattccttcctccctgcaggagcttcccaagctggtcacagagtctcctgggcacaggttatacagaccccagccccattcccatctactgaaacagggtctccacaagaggggccagggaatatgggtttttaacaagcgtcttacaaaacacttctctatcatgcagccggagagctggctgggagcccttttgttttagaacacacatccttcagcagctgagaaacgaacacgaatccatcccaaccgagatgccattaacattcatctaaaaatgttaggctctaaatggacgaaaaattctctcgccatcttaataacaaaataaactacaaattcctgacccaaggacactgtgttataagaggcgtgggctcccctggtggctgaccaggtcagctgccctggccttgcacccctctgcatgcagcacagaagggtgtgaccatgccctcagcaccactcttgtccccactgaacggcaactgagactgggtacctggagattctgaagtgcctttgctgtggttttcaaaataataaagatttgtattcaactcaaaaaaaaaa

SEQ ID NO: 305784 - DNA, 2252 bp, Homo sapiens
cagtatgcatttttacagtttccctctcttagtcctcacagtgatacattctttgtattcaaacatttggggaaactggcactcagagaggttttaagttgcccaaggtcccagagcctgtaatcaacaaggtggggattaaaatccaggtctgacaaagcccttgatctctctgctgctctgtagatcagctgatgtagcctggtggctcctcgtagcaacatgtgaccttagaaggaggcacatgtgagacgaagtctttaattcaggcatgcattcattcattgagtgccaagtgacaggtattttatggtgatgccatactcagagcttgcagtctagctagcaataccaatttcattttactgagagcttatgatgtgcccagcactgcactgaatgctgaattgagtcacacacaaccccctaagcaacgggatgaagcaggagcacgtttctctccgtgtaaccggtaaagatactgatgctaagagaagctaaggagctggcccaagaaacccagccagcacgtggcaaggcccacgcagaatccagcccaagcccctggacccagccaccactccgctgcctgcactcagatacgaagccaaggagctgcatgacgccatgaagggcttaggaaccaaggagggtgtcatcattgagatcctggcctctcggaccaagaaccagctgcgggagataatgaaggcgtatgaggaagactatgggtccagcctggaggaggacatccaagcagacacaagtggctacctggagaggatcctggtgtgcctcctgcaggtgtcacagcctaggctcttgggagtgccttggtttgggagtcccaacagctccaccccagggagcagcccttgaatagcgccacaagagtcaggggcagcagggatgatgtgagcagctttgtggacccggcactggccctccaagacgcacaggatctgtatgcggcaggcgagaagattcgtgggactgatgagatgaaattcatcaccatcctgtgcacgcgcagtgccactcacctgctgagagtgtttgaagagtatgagaaaattgccaacaagagcattgaggacagcatcaagagtgagacccatggctcactggaggaggccatgctcactgtggtgaaatgcacccaaaacctccacagctactttgcagagagactctactatgccatgaagggagcagggacgcgtgatgggaccctgataagaaacatcgtttcaaggagcgagattgacttaaatcttatcaaatgtcacttcaagaagatgtacggcaagaccctcagcagcatgatcatggaagacaccagcggcgactacaagaacgccctgctgagcctggtgggcagcgacccctgaggcacagaagaacaagagcaaagaccatgaagccagagtctccaggactcctcactcaacctcggccatggacgcaggttgggtgtgaggggggtcccagcctttcagtcttctatttccctatttccagtgctttccagccgggtttctgacccagagggtggaaccggcctggactcctcttcccaacttcctccaggtcatttcccagtgtgagcacaatgccaaccttagtgtttctccagccagacagatgcctcagcatgaagggcttggggacttgtggatcattccttcctccctgcaggagcttcccaagctggtcacagagtctcctgggcacaggttatacagaccccagccccattcccatctactgaaacagggtctccacaagaggggccagggaatatgggtttttaacaagcgtcttacaaaacacttctctatcatgcagccggagagctggctgggagcccttttgttttagaacacacatccttcagcagctgagaaacgaacacgaatccatcccaaccgagatgccattaacattcatctaaaaatgttaggctctaaatggacgaaaaattctctcgccatcttaataacaaaataaactacaaattcctgacccaaggacactgtgttataagaggcgtgggctcccctggtggctgaccaggtcagctgccctggccttgcacccctctgcatgcagcacagaagggtgtgaccatgccctcagcaccactcttgtccccactgaacggcaactgagactgggtacctggagattctgaagtgcctttgctgtggttttcaaaataataaagatttgtattcaactcaaaaaaaaaa

SEQ ID NO: 305785 - DNA, 2498 bp, Homo sapiens
gtgctgtaaccctgcagggaccaacgagcaggctatcatcgatgtgctcaccaagagaagcaacacgcagcggcagcagatcgccaagtccttcaaggctcagttcggcaaggacctcactgagaccttgaagtctgagctcagtggcaagtttgagaggctcattgtggcccttatgtacccgccatacagatacgaagccaaggagctgcatgacgccatgaagggcttaggaaccaaggagggtgtcatcattgagatcctggcctctcggaccaagaaccagctgcgggagataatgaaggcgtatgaggaagactatgggtccagcctggaggaggacatccaagcagacacaagtggctacctggagaggatcctggtgtgcctcctgcagggcagcagggatgatgtgagcagctttgtggacccggcactggccctccaagacgcacaggatctgtatgcggcaggcgagaagattcgtgggactgatgagatgaaattcatcaccatcctgtgcacgcgcagtgccactcacctgctgagagtgtttgaagagtatgagaaaattgccaacaagagcattgaggacagcatcaagagtgagacccatggctcactggaggaggccatgctcactgtggtgaaatgcacccaaaacctccacagctactttgcagagagactctactatgccatgaaggtaactgtcctgtcttcttcttcctgacgctcaccctacatagcaccaagtgcaaagccaaggagctcaaagccaccacgatcctccacacgggggagttatcttacccaaacctgtcgtggatcagaaaggttttagttctcggagatgaaattgagtctgggaaagggacgctgcatctccagaggtgaataattccctgaaactaaaaccattgcccgttttctctgattgatggttgctgatatcccctgaagttagttccacacccgaaacccaagccctctggccacttctgcccaggaaatgagagagggcatgcgattcccttggccatgtggccccagctgacatgagactggtcagggatgaaggtgagcaggaaggccctgcctgtgaaattcctggctgagctgattgctgccattgctctagtaggaagtcttgttcctggagcagtgagtattttgtgtctagaatctgatgtggcaaaccaaacatactgcagtttggagcacttggcatcataaaggaagagttctgggcagtgggtgagaaggaattaagggagtggacaccctaagccaccaaagcttccctcctaatgcttccctggctgaagcacaggctccttcccacatctccctccctctaaaagccccagaacccaaccacacagatccgtccatcactcagagatggacaggaaaggtgaggcaggattgttgatggctgctgtcttgcccagggagcagggacgcgtgatgggaccctgataagaaacatcgtttcaaggagcgagattgacttaaatcttatcaaatgtcacttcaagaagatgtacggcaagaccctcagcagcatgatcatggaagacaccagcggcgactacaagaacgccctgctgagcctggtgggcagcgacccctgaggcacagaagaacaagagcaaagaccatgaagccagagtctccaggactcctcactcaacctcggccatggacgcaggttgggtgtgaggggggtcccagcctttcagtcttctatttccctatttccagtgctttccagccgggtttctgacccagagggtggaaccggcctggactcctcttcccaacttcctccaggtcatttcccagtgtgagcacaatgccaaccttagtgtttctccagccagacagatgcctcagcatgaagggcttggggacttgtggatcattccttcctccctgcaggagcttcccaagctggtcacagagtctcctgggcacaggttatacagaccccagccccattcccatctactgaaacagggtctccacaagaggggccagggaatatgggtttttaacaagcgtcttacaaaacacttctctatcatgcagccggagagctggctgggagcccttttgttttagaacacacatccttcagcagctgagaaacgaacacgaatccatcccaaccgagatgccattaacattcatctaaaaatgttaggctctaaatggacgaaaaattctctcgccatcttaataacaaaataaactacaaattcctgacccaaggacactgtgttataagaggcgtgggctcccctggtggctgaccaggtcagctgccctggccttgcacccctctgcatgcagcacagaagggtgtgaccatgccctcagcaccactcttgtccccactgaacggcaactgagactgggtacctggagattctgaagtgcctttgctgtggttttcaaaataataaagatttgtattcaactcaaaaaaaaaa

SEQ ID NO: 305786 - DNA, 1633 bp, Homo sapiens
gtgctgtaaccctgcagggaccaacgagcaggctatcatcgatgtgctcaccaagagaagcaacacgcagcggcagcagatcgccaagtccttcaaggctcagttcggcaaggacctcactgagaccttgaagtctgagctcagtggcaagtttgagaggctcattgtggcccttatgtacccgccatacagatacgaagccaaggagctgcatgacgccatgaagggcttaggaaccaaggagggtgtcatcattgagatcctggcctctcggaccaagaaccagctgcgggagataatgaaggcgtatgaggaagactatgggtccagcctggaggaggacatccaagcagacacaagtggctacctggagaggatcctggtgtgcctcctgcagggcagcagggatgatgtgagcagctttgtggacccggcactggccctccaagacgcacaggatctgtatgcggcaggcgagaagattcgtgggactgatgagatgaaattcatcaccatcctgtgcacgcgcagtgccactcacctgctgagagtgtttgaagagtatgagaaaattgccaacaagagcattgaggacagcatcaagagtgagacccatggctcactggaggaggccatgctcactgtggtgaaatgcacccaaaacctccacagctactttgcagagagactctactatgccatgaagggagcagggacgcgtgatgggaccctgataagaaacatcgtttcaaggagcgagattgacttaaatcttatcaaatgtcacttcaagaagatgtacggcaagaccctcagcagcatgatcatggaagacaccagcggcgactacaagaacgccctgctgagcctggtgggcagcgacccctgaggcacagaagaacaagagcaaagaccatgaagccagagtctccaggactcctcactcaacctcggccatggacgcagtccaggtcatttcccagtgtgagcacaatgccaaccttagtgtttctccagccagacagatgcctcagcatgaagggcttggggacttgtggatcattccttcctccctgcaggagcttcccaagctggtcacagagtctcctgggcacaggttatacagaccccagccccattcccatctactgaaacagggtctccacaagaggggccagggaatatgggtttttaacaagcgtcttacaaaacacttctctatcatgcagccggagagctggctgggagcccttttgttttagaacacacatccttcagcagctgagaaacgaacacgaatccatcccaaccgagatgccattaacattcatctaaaaatgttaggctctaaatggacgaaaaattctctcgccatcttaataacaaaataaactacaaattcctgacccaaggacactgtgttataagaggcgtgggctcccctggtggctgaccaggtcagctgccctggccttgcacccctctgcatgcagcacagaagggtgtgaccatgccctcagcaccactcttgtccccactgaacggcaactgagactgggtacctggagattctgaagtgcctttgctgtggttttcaaaataataaagatttgtattcaactcaaaaaaaaaa

SEQ ID NO: 305787 - DNA, 2030 bp, Homo sapiens
gctaccttccctgtcccacgccacctgacacaaagcctctcacattgggaaaggcacggaacaaagaaatatgccaagccttgcacaacactgactcttaagacctaaggcaagacataaagttgtaggcagtgccacctaccagctccagacattaacacagctttcttgtttgccagtgaaatgcacccaaaacctccacagctactttgcagagagactctactatgccatgaaggtaactgtcctgtcttcttcttcctgacgctcaccctacatagcaccaagtgcaaagccaaggagctcaaagccaccacgatcctccacacgggggagttatcttacccaaacctgtcgtggatcagaaaggttttagttctcggagatgaaattgagtctgggaaagggacgctgcatctccagaggtgaataattccctgaaactaaaaccattgcccgttttctctgattgatggttgctgatatcccctgaagttagttccacacccgaaacccaagccctctggccacttctgcccaggaaatgagagagggcatgcgattcccttggccatgtggccccagctgacatgagactggtcagggatgaaggtgagcaggaaggccctgcctgtgaaattcctggctgagctgattgctgccattgctctagtaggaagtcttgttcctggagcagtgagtattttgtgtctagaatctgatgtggcaaaccaaacatactgcagtttggagcacttggcatcataaaggaagagttctgggcagtgggtgagaaggaattaagggagtggacaccctaagccaccaaagcttccctcctaatgcttccctggctgaagcacaggctccttcccacatctccctccctctaaaagccccagaacccaaccacacagatccgtccatcactcagagatggacaggaaaggtgaggcaggattgttgatggctgctgtcttgcccagggagcagggacgcgtgatgggaccctgataagaaacatcgtttcaaggagcgagattgacttaaatcttatcaaatgtcacttcaagaagatgtacggcaagaccctcagcagcatgatcatggaagacaccagcggcgactacaagaacgccctgctgagcctggtgggcagcgacccctgaggcacagaagaacaagagcaaagaccatgaagccagagtctccaggactcctcactcaacctcggccatggacgcaggttgggtgtgaggggggtcccagcctttcagtcttctatttccctatttccagtgctttccagccgggtttctgacccagagggtggaaccggcctggactcctcttcccaacttcctccaggtcatttcccagtgtgagcacaatgccaaccttagtgtttctccagccagacagatgcctcagcatgaagggcttggggacttgtggatcattccttcctccctgcaggagcttcccaagctggtcacagagtctcctgggcacaggttatacagaccccagccccattcccatctactgaaacagggtctccacaagaggggccagggaatatgggtttttaacaagcgtcttacaaaacacttctctatcatgcagccggagagctggctgggagcccttttgttttagaacacacatccttcagcagctgagaaacgaacacgaatccatcccaaccgagatgccattaacattcatctaaaaatgttaggctctaaatggacgaaaaattctctcgccatcttaataacaaaataaactacaaattcctgacccaaggacactgtgttataagaggcgtgggctcccctggtggctgaccaggtcagctgccctggccttgcacccctctgcatgcagcacagaagggtgtgaccatgccctcagcaccactcttgtccccactgaacggcaactgagactgggtacctggagattctgaagtgcctttgctgtggttttcaaaataataaagatttgtattcaactcaaaaaaaaaa

SEQ ID NO: 305788 - DNA, 1733 bp, Homo sapiens
gtgctgtaaccctgcagggaccaacgagcaggctatcatcgatgtgctcaccaagagaagcaacacgcagcggcagcagatcgccaagtccttcaaggctcagttcggcaaggacctcactgagaccttgaagtctgagctcagtggcaagtttgagaggctcattgtggcccttatgtacccgccatacagatacgaagccaaggagctgcatgacgccatgaagggcttaggaaccaaggagggtgtcatcattgagatcctggcctctcggaccaagaaccagctgcgggagataatgaaggcgtatgaggaagactatgggtccagcctggaggaggacatccaagcagacacaagtggctacctggagaggatcctggtgtgcctcctgcagggcagcagggatgatgtgagcagctttgtggacccggcactggccctccaagacgcacaggatctgtatgcggcaggcgagaagattcgtgggactgatgagatgaaattcatcaccatcctgtgcacgcgcagtgccactcacctgctgagagtgtttgaagagtatgagaaaattgccaacaagagcattgaggacagcatcaagagtgagacccatggctcactggaggaggccatgctcactgtggtgaaatgcacccaaaacctccacagctactttgcagagagactctactatgccatgaagggagcagggacgcgtgatgggaccctgataagaaacatcgtttcaaggagcgagattgacttaaatcttatcaaatgtcacttcaagaagatgtacggcaagaccctcagcagcatgatcatggaagacaccagcggcgactacaagaacgccctgctgagcctggtgggcagcgacccctgaggcacagaagaacaagagcaaagaccatgaagccagagtctccaggactcctcactcaacctcggccatggacgcaggttgggtgtgaggggggtcccagcctttcagtcttctatttccctatttccagtgctttccagccgggtttctgacccagagggtggaaccggcctggactcctcttcccaacttcctgtgagcacaatgccaaccttagtgtttctccagccagacagatgcctcagcatgaagggcttggggacttgtggatcattccttcctccctgcaggagcttcccaagctggtcacagagtctcctgggcacaggttatacagaccccagccccattcccatctactgaaacagggtctccacaagaggggccagggaatatgggtttttaacaagcgtcttacaaaacacttctctatcatgcagccggagagctggctgggagcccttttgttttagaacacacatccttcagcagctgagaaacgaacacgaatccatcccaaccgagatgccattaacattcatctaaaaatgttaggctctaaatggacgaaaaattctctcgccatcttaataacaaaataaactacaaattcctgacccaaggacactgtgttataagaggcgtgggctcccctggtggctgaccaggtcagctgccctggccttgcacccctctgcatgcagcacagaagggtgtgaccatgccctcagcaccactcttgtccccactgaacggcaactgagactgggtacctggagattctgaagtgcctttgctgtggttttcaaaataataaagatttgtattcaactcaaaaaaaaaa

SEQ ID NO: 305789 - DNA, 988 bp, Homo sapiens
acagccgccactgccgagccaggcacaagcaaaccccttctcacgcttatgcgcctcctgcccacaggaagacaccagcggcgactacaagaacgccctgctgagcctggtgggcagcgacccctgaggcacagaagaacaagagcaaagaccatgaagccagagtctccaggactcctcactcaacctcggccatggacgcaggttgggtgtgaggggggtcccagcctttcagtcttctatttccctatttccagtgctttccagccgggtttctgacccagagggtggaaccggcctggactcctcttcccaacttcctccaggtcatttcccagtgtgagcacaatgccaaccttagtgtttctccagccagacagatgcctcagcatgaagggcttggggacttgtggatcattccttcctccctgcaggagcttcccaagctggtcacagagtctcctgggcacaggttatacagaccccagccccattcccatctactgaaacagggtctccacaagaggggccagggaatatgggtttttaacaagcgtcttacaaaacacttctctatcatgcagccggagagctggctgggagcccttttgttttagaacacacatccttcagcagctgagaaacgaacacgaatccatcccaaccgagatgccattaacattcatctaaaaatgttaggctctaaatggacgaaaaattctctcgccatcttaataacaaaataaactacaaattcctgacccaaggacactgtgttataagaggcgtgggctcccctggtggctgaccaggtcagctgccctggccttgcacccctctgcatgcagcacagaagggtgtgaccatgccctcagcaccactcttgtccccactgaacggcaactgagactgggtacctggagattctgaagtgcctttgctgtggttttcaaaataataaagatttgtattcaactcaaaaaaaaaa

SEQ ID NO: 305790 - DNA, 1332 bp, Homo sapiens
gctaccttccctgtcccacgccacctgacacaaagcctctcacattgggaaaggcacggaacaaagaaatatgccaagccttgcacaacactgactcttaagacctaaggcaagacataaagttgtaggcagtgccacctaccagctccagacattaacacagctttcttgtttgccagtgaaatgcacccaaaacctccacagctactttgcagagagactctactatgccatgaagggagcagggacgcgtgatgggaccctgataagaaacatcgtttcaaggagcgagattgacttaaatcttatcaaatgtcacttcaagaagatgtacggcaagaccctcagcagcatgatcatggagtggaactgtctctgattcattttccacatcaatcctgcatgtagttggaagacaccagcggcgactacaagaacgccctgctgagcctggtgggcagcgacccctgaggcacagaagaacaagagcaaagaccatgaagccagagtctccaggactcctcactcaacctcggccatggacgcaggttgggtgtgaggggggtcccagcctttcagtcttctatttccctatttccagtgctttccagccgggtttctgacccagagggtggaaccggcctggactcctcttcccaacttcctccaggtcatttcccagtgtgagcacaatgccaaccttagtgtttctccagccagacagatgcctcagcatgaagggcttggggacttgtggatcattccttcctccctgcaggagcttcccaagctggtcacagagtctcctgggcacaggttatacagaccccagccccattcccatctactgaaacagggtctccacaagaggggccagggaatatgggtttttaacaagcgtcttacaaaacacttctctatcatgcagccggagagctggctgggagcccttttgttttagaacacacatccttcagcagctgagaaacgaacacgaatccatcccaaccgagatgccattaacattcatctaaaaatgttaggctctaaatggacgaaaaattctctcgccatcttaataacaaaataaactacaaattcctgacccaaggacactgtgttataagaggcgtgggctcccctggtggctgaccaggtcagctgccctggccttgcacccctctgcatgcagcacagaagggtgtgaccatgccctcagcaccactcttgtccccactgaacggcaactgagactgggtacctggagattctgaagtgcctttgctgtggttttcaaaataataaagatttgtattcaactcaaaaaaaaaa

SEQ ID NO: 305791 - DNA, 1162 bp, Homo sapiens
cgggcagtgcaccttgatgctgctggtcgatctagagtatccccgagggtccctgcgcgcagtgccactcacctgctgagtgtttgaagagtatgagaaaattgccaacaagagcattgaggacagcatcaagagtgagacccatggctcactggaggaggccatgctcactgtggtgaaatgcacccaaaacctccacagctactttgcagagagactctactatgccatgaagggagcagggacgcgtgatgggaccctgataagaaacatcgtttcaaggagcgagattgacttaaatcttatcaaatgtcacttcaagaagatgtacggcaagaccctcagcagcatgatcatggaagacaccagcggcgactacaagaacgccctgctgagcctggtgggcagcgacccctgaggcacagaagaacaagagcaaagaccatgaagccagagtctccaggactcctcactcaacctcggccatggacgcagtccaggtcatttcccagtgtgagcacaatgccaaccttagtgtttctccagccagacagatgcctcagcatgaagggcttggggacttgtggatcattccttcctccctgcaggagcttcccaagctggtcacagagtctcctgggcacaggttatacagaccccagccccattcccatctactgaaacagggtctccacaagaggggccagggaatatgggtttttaacaagcgtcttacaaaacacttctctatcatgcagccggagagctggctgggagcccttttgttttagaacacacatccttcagcagctgagaaacgaacacgaatccatcccaaccgagatgccattaacattcatctaaaaatgttaggctctaaatggacgaaaaattctctcgccatcttaataacaaaataaactacaaattcctgacccaaggacactgtgttataagaggcgtgggctcccctggtggctgaccaggtcagctgccctggccttgcacccctctgcatgcagcacagaagggtgtgaccatgccctcagcaccactcttgtccccactgaacggcaactgagactgggtacctggagattctgaagtgcctttgctgtggttttcaaaataataaagatttgtattcaactcaaaaaaaaaa

SEQ ID NO: 305792 - DNA, 1521 bp, Homo sapiens
gtgctgtaaccctgcagggaccaacgagcaggctatcatcgatgtgctcaccaagagaagcaacacgcagcggcagcagatcgccaagtccttcaaggctcagttcggcaaggacctcactgagaccttgaagtctgagctcagtggcaagtttgagaggctcattgtggcccttatgtacccgccatacagatacgaagccaaggagctgcatgacgccatgaagggcttaggaaccaaggagggtgtcatcattgagatcctggcctctcggaccaagaaccagctgcgggagataatgaaggcgtatgaggaagactatgggtccagcctggaggaggacatccaagcagacacaagtggctacctggagaggatcctggtgtgcctcctgcagggcagcagggatgatgtgagcagctttgtggacccggcactggccctccaagacgcacaggatctgtatgcggcaggcgagaagattcgtgggactgatgagatgaaattcatcaccatcctgtgcacgcgcagtgccactcacctgctgagagtgtttgaagagtatgagaaaattgccaacaagagcattgaggacagcatcaagagtgagacccatggctcactggaggaggccatgctcactgtggtgaaatgcacccaaaacctccacagctactttgcagagagactctactatgccatgaagggagcagggacgcgtgatgggaccctgataagaaacatcgtttcaaggagcgagattgacttaaatcttatcaaatgtcacttcaagaagatgtacggcaagaccctcagcagcatgatcatggaagacaccagcggcgactacaagaacgccctgctgagcctggtgggcagcgacccctgaggcacagaagaacaagagcaaagaccatgaagccagagtctccaggactcctcactcaacctcggccatggacgcagtccaggtcatttcccagtgtgagcacaatgccaaccttagtgtttctccagccagacagatgcctcagcatgaagggcttggggacttgtggatcattccttcctccctgcaggagcttcccaagctggtcacagagtctcctgggcacagccggagagctggctgggagcccttttgttttagaacacacatccttcagcagctgagaaacgaacacgaatccatcccaaccgagatgccattaacattcatctaaaaatgttaggctctaaatggacgaaaaattctctcgccatcttaataacaaaataaactacaaattcctgacccaaggacactgtgttataagaggcgtgggctcccctggtggctgaccaggtcagctgccctggccttgcacccctctgcatgcagcacagaagggtgtgaccatgccctcagcaccactcttgtccccactgaacggcaactgagactgggtacctggagattctgaagtgcctttgctgtggttttcaaaataataaagatttgtattcaactcaaaaaaaaaa

SEQ ID NO: 305793 - DNA, 253 bp, Homo sapiens
ggcagcagggatgatgtgagcagctttgtggacccggcactggccctccaagacgcacaggtgaggctgcgcccagccggccatgtggccccaccccctgccatctggactccggctcctctgcccacgggggctttctctgacactgggctgggacccacccagctcagctccctataggcctttgtcctgtggtgtctggggaggagagtgagggtgttgggagactcgggaggaaggagtgtgacttggg

SEQ ID NO: 305794 - DNA, 1738 bp, Homo sapiens
agcgggctgctgtcgcgagacttcctgctcatctgccgctccctttgccgccgccttagcccgggacccgaacccagcctctcccctacccgaacaccggccccggctccaccgaggcccgggtcccccagcccgtctcgccgccgccatggcggaccctaaatacgccgaccttcccggcattgccaggaatgagccagatgtttatgaaactagcgacctacctgaggatgatcaagcggagttcgatgcggagctggaggagctgacaagcacaagtgtggaacacatcattgtcaatcctaatgctgcctatgacaagttcaaggacaagagagtggggacaaagggacttgatttctcagatcgtattggaaaaaccaagaggacaggatatgaatctggagaatatgagatgcttggagagggtctgggagtgaaggagacaccccagcaaaagtaccagcgcctactgcatgaggtccaagagctgacaactgaagttgaaaaaatcaagacgacagtgaaggagtcagccacagaggagaagctgacccctgtgttgctggctaaacagctggcagccctgaagcagcagctggttgcttcccacctggagaagctgctgggaccagatgctgcaatcaaccttaccgaccccgatggcgccctggctaagcgcctactactgcagctggaagcaacaaagaacagcaaagggggatcagggggaaaaaccactgggacccccccagatagcagccttgtcacttatgaactacattctcggcctgagcaggacaagttctctcaagctgccaaagtcgcagaacttgaaaagcgcctgacagagctggagacagctgtacgttgtgatcaggatgctcagaatcccctttctgcaggtctacagggagcctgtctcatggagactgtagagctgttgcaagcaaaggtgagcgccctagaccttgcagttttggatcaagtggaggctcggctacagagtgtcctgggaaaggtgaacgagattgccaagcataaagcctctgtagaagatgcagatacacaaagcaaggtgcaccagctatatgaaactatacagcgctggagccccattgcctccaccctccctgagctggtgcagagacttgtcaccatcaagcagctgcacgagcaagccatgcagtttggtcagctcctgacacacttggataccacccagcagatgattgctaattccttgaaggacaataccaccctcttgacccaggtgcagacaaccatgcgtgaaaacctggccacagttgaggggaactttgccagcattgatgaacggatgaagaagctgggaaagtgagcacatttgggagctggagaacaggggttatccctacccctgtgaactctgttaacagcttacatagggtttcccctttactataactctagcatccccatcccatttgacactgggggcaagggttcttcttgcatgtggggtttatacccctcccctgatgaatacagagtggtagctaggggttggttatcatcagaaggtggtctcccctcaggcctgggggataaggacgtgggcccagccacatgccaactcatgtccaatactgctttgcctggtgtggggaaggattgggtcttgtcccccaacacagcttctgtggctgactgtaatactgtacaactgtttctgaccattaaatgctgttgtactctg

SEQ ID NO: 305795 - DNA, 1772 bp, Homo sapiens
tcccccccccccccccccccccccccccccccccctctcccctcctcctccaactccccccaacttcggctaggtcgaggcctgggttgttagcccgggacccgaacccagcctctcccctacccgaacaccggccccggctccaccgaggcccgggtcccccagcccgtctcgccgccgccatggcggaccctaaatacgccgaccttcccggcattgccaggaatgagccagatgtttatgaaactagcgacctacctgaggatgatcaagcggagttcgatgcggagctggaggagctgacaagcacaagtgtggaacacatcattgtcaatcctaatgctgcctatgacaagttcaaggacaagagagtggggacaaagggacttgatttctcagatcgtattggaaaaaccaagaggacaggatatgaatctggagaatatgagatgcttggagagggtctgggagtgaaggagacaccccagcaaaagtaccagcgcctactgcatgaggtccaagagctgacaactgaagttgaaaaaatcaagacgacagtgaaggagtcagccacagaggagaagctgacccctgtgttgctggctaaacagctggcagccctgaagcagcagctggttgcttcccacctggagaagctgctgggaccagatgctgcaatcaaccttaccgaccccgatggcgccctggctaagcgcctactactgcagctggaagcaacaaagaacagcaaagggggatcagggggaaaaaccactgggacccccccagatagcagccttgtcacttatgaactacattctcggcctgagcaggacaagttctctcaagctgccaaagtcgcagaacttgaaaagcgcctgacagagctggagacagctgtacgttgtgatcaggatgctcagaatcccctttctgcaggtctacagggagcctgtctcatggagactgtagagctgttgcaagcaaaggtgagcgccctagaccttgcagttttggatcaagtggaggctcggctacagagtgtcctgggaaaggtgaacgagattgccaagcataaagcctctgtagaagatgcagatacacaaagcaaggtgcaccagctatatgaaactatacagcgctggagccccattgcctccaccctccctgagctggtgcagagacttgtcaccatcaagcagctgcacgagcaagccatgcagtttggtcagctcctgacacacttggataccacccagcagatgattgctaattccttgaaggacaataccaccctcttgacccaggtgcagacaaccatgcgtgaaaacctggccacagttgaggggaactttgccagcattgatgaacggatgaagaagctgggaaagtgagcacatttgggagctggagaacaggggttatccctacccctgtgaactctgttaacagcttacatagggtttcccctttactataactctagcatccccatcccatttgacactgggggcaagggttcttcttgcatgtggggtttatacccctcccctgatgaatacagagtggtagctaggggttggttatcatcagaaggtggtctcccctcaggcctgggggataaggacgtgggcccagccacatgccaactcatgtccaatactgctttgcctggtgtggggaaggattgggtcttgtcccccaacacagcttctgtggctgactgtaatactgtacaactgtttctgaccattaaatgctgttgtactctg

SEQ ID NO: 305796 - DNA, 1366 bp, Homo sapiens
agcgggctgctgtcgcgagacttcctgctcatctgccgctccctttgccgccgccttagcccgggacccgaacccagcctctcccctacccgaacaccggccccggctccaccgaggcccgggtcccccagcccgtctcgccgccgccatggcggaccctaaatacgccgaccttcccggcattgccaggaatgagccagatgtttatgaaactagcgacctacctgaggatgatcaagcggagttcgatgcggagctggaggagctgacaagcacaagtgtggaacacatcattgtcaatcctaatgctgcctatgacaagttcaaggacaagagagtggggacaaagggacttgatttctcagatcgtattggaaaaaccaagaggacaggatatgaatctggagaatatgagatgcttggagagggtctgggagtgaaggagacaccccagcaaaagtaccagcgcctactgcatgaggtccaagagctgacaactgaagttgaaaaaatcaagaatcccctttctgcaggtctacagggagcctgtctcatggagactgtagagctgttgcaagcaaaggtgagcgccctagaccttgcagttttggatcaagtggaggctcggctacagagtgtcctgggaaaggtgaacgagattgccaagcataaagcctctgtagaagatgcagatacacaaagcaaggtgcaccagctatatgaaactatacagcgctggagccccattgcctccaccctccctgagctggtgcagagacttgtcaccatcaagcagctgcacgagcaagccatgcagtttggtcagctcctgacacacttggataccacccagcagatgattgctaattccttgaaggacaataccaccctcttgacccaggtgcagacaaccatgcgtgaaaacctggccacagttgaggggaactttgccagcattgatgaacggatgaagaagctgggaaagtgagcacatttgggagctggagaacaggggttatccctacccctgtgaactctgttaacagcttacatagggtttcccctttactataactctagcatccccatcccatttgacactgggggcaagggttcttcttgcatgtggggtttatacccctcccctgatgaatacagagtggtagctaggggttggttatcatcagaaggtggtctcccctcaggcctgggggataaggacgtgggcccagccacatgccaactcatgtccaatactgctttgcctggtgtggggaaggattgggtcttgtcccccaacacagcttctgtggctgactgtaatactgtacaactgtttctgaccattaaatgctgttgtactctg

SEQ ID NO: 305797 - DNA, 429 bp, Homo sapiens
tctagaggatcccgggactgagagtaaaggagaatgttaagtggcaggaggaaagtccccttgggcttatggggaggggaggaaagggctcccacttgtctgcatctgtggttgtttgctagggtgagggtctgtctgaggccagacacagaggggcctttcatccttccccttctcagaagcccagttagtgtcttagctctttggaccccatctccctggattctccctgatcgacctatcctgattatttttcctctctcattctcagatcctgccactctaggcaaatcctgcttctcctgtgcccactaacgcccgcacgcccccatcttcatgggatacaacttatccttcttctgaccctgtggcacttccttgcaccttcccattatcaccgcagctcctgtgctgggtagactttctctc

SEQ ID NO: 305798 - DNA, 2353 bp, Homo sapiens
tcggctcttatcggttcccatcccagttgttgatcttatgcaagacgctgcacgaccccgcgcccgcttgtcgccacggcacttgaggcagccggagatactctgagttactcggagcccgacgcctgagggtgagatgaacgcgctggcctccctaaccgtccggacctgtgatcgcttctggcagaccgaaccggcgctcctgcccccggggtgacgcgcagctcccagccgcccagacacatggccccaggccaagcaccccatcaggctaccccgtggagggatgcccaccctttcttcctcctgtccccagtgatgggcctcctcagccgcgcctggagccgcctgaggggcctgggacctctagagccctggctggtggaagcagtaaaaggagcagctctggtagaagctggcctggagggagaagctaggactcctctggcaatcccccataccccttggggcagacgccctgaagaggaggctgaagacagtggaggccctggagaggacagagaaacactggggctgaaaaccagcagttcccttcctgaagcctggggacttttggatgatgatgatggcatgtatggtgagcgagaggcaaccagtgtccctagagggcagggaagtcaatttgcagatggccagcgtgctcccctgtctcccagccttctgataaggacactgcaaggttctgataagaacccaggggaggagaaagccgaggaagagggagttgctgaagaggagggagttaacaagttctcttatccaccatcacaccgggagtgttgtccagccgtggaggaggaggacgatgaagaagctgtaaagaaagaagctcacagaacctctacttctgccttgtctccaggatccaagcccagcacttgggtgtcttgcccaggggaggaagagaatcaagccacggaggataaaagaacagaaagaagtaaaggagccaggaagacctccgtgtccccccgatcttcaggctccgaccccaggtcctgggagtatcgttcaggagaggcgtccgaggagaaggaggaaaaggcacacgaagaaactgggaaaggagaagctgccccagggccgcaatcctcagccccagcccagaggccccagctcaagtcctggtggtgccaacccagtgatgaagaggagggtgaggtcaaggctttgggggcagctgagaaggatggagaagctgagtgtcctccctgcatccccccaccaagtgccttcctgaaggcctgggtgtattggccaggagaggacacagaggaagaggaagatgaggaagaagatgaggacagtgactctggatcagatgaggaagagggagaagctgaggcttcctcttccactcctgctacaggtgtcttcttgaagtcctgggtctatcagccaggagaggacacagaggaggaggaagatgaggacagtgatacaggatcagccgaggatgaaagagaagctgagacttctgcttccacaccccctgcaagtgctttcttgaaggcctgggtgtatcggccaggagaggacacggaggaggaggaagatgaggatgtggatagtgaggataaggaagatgattcagaagcagccttgggagaagctgagtcagacccacatccctcccacccggaccagagggcccacttcaggggctggggatatcgacctggaaaagagacagaggaagaggaagctgctgaggactggggagaagctgagccctgccccttccgagtggccatctatgtacctggagagaagccaccgcctccctgggctcctcctaggctgcccctccgactgcaaaggcggctcaagcgcccagaaacccctactcatgatccggaccctgagactcccctaaaggccagaaaggtgcgcttctccgagaaggtcactgtccatttcctggctgtctgggcagggccggcccaggccgcccgccagggcccctgggagcagcttgctcgggatcgcagccgcttcgcacgccgcatcacccaggcccaggaggagctgagcccctgcctcacccctgctgcccgggccagagcctgggcacgcctcaggaacccacctttagcccccatccctgccctcacccagaccttgccttcctcctctgtcccttcgtccccagtccagaccacgcccttgagccaagctgtggccacaccttcccgctcgtctgctgctgcagcggctgccctggacctcagtgggaggcgtggctgagaccaactggtttgcctataatttattaactatttattttttctaagtgtgggtttatataaggaataaagccttttgatttgta

SEQ ID NO: 305799 - DNA, 2353 bp, Homo sapiens
gtaccggccggagtgtatggatccagttgttgatcttatgcaagacgctgcacgaccccgcgcccgcttgtcgccacggcacttgaggcagccggagatactctgagttactcggagcccgacgcctgagggtgagatgaacgcgctggcctccctaaccgtccggacctgtgatcgcttctggcagaccgaaccggcgctcctgcccccggggtgacgcgcagctcccagccgcccagacacatggccccaggccaagcaccccatcaggctaccccgtggagggatgcccaccctttcttcctcctgtccccagtgatgggcctcctcagccgcgcctggagccgcctgaggggcctgggacctctagagccctggctggtggaagcagtaaaaggagcagctctggtagaagctggcctggagggagaagctaggactcctctggcaatcccccataccccttggggcagacgccctgaagaggaggctgaagacagtggaggccctggagaggacagagaaacactggggctgaaaaccagcagttcccttcctgaagcctggggacttttggatgatgatgatggcatgtatggtgagcgagaggcaaccagtgtccctagagggcagggaagtcaatttgcagatggccagcgtgctcccctgtctcccagccttctgataaggacactgcaaggttctgataagaacccaggggaggagaaagccgaggaagagggagttgctgaagaggagggagttaacaagttctcttatccaccatcacaccgggagtgttgtccagccgtggaggaggaggacgatgaagaagctgtaaagaaagaagctcacagaacctctacttctgccttgtctccaggatccaagcccagcacttgggtgtcttgcccaggggaggaagagaatcaagccacggaggataaaagaacagaaagaagtaaaggagccaggaagacctccgtgtccccccgatcttcaggctccgaccccaggtcctgggagtatcgttcaggagaggcgtccgaggagaaggaggaaaaggcacacgaagaaactgggaaaggagaagctgccccagggccgcaatcctcagccccagcccagaggccccagctcaagtcctggtggtgccaacccagtgatgaagaggagggtgaggtcaaggctttgggggcagctgagaaggatggagaagctgagtgtcctccctgcatccccccaccaagtgccttcctgaaggcctgggtgtattggccaggagaggacacagaggaagaggaagatgaggaagaagatgaggacagtgactctggatcagatgaggaagagggagaagctgaggcttcctcttccactcctgctacaggtgtcttcttgaagtcctgggtctatcagccaggagaggacacagaggaggaggaagatgaggacagtgatacaggatcagccgaggatgaaagagaagctgagacttctgcttccacaccccctgcaagtgctttcttgaaggcctgggtgtatcggccaggagaggacacggaggaggaggaagatgaggatgtggatagtgaggataaggaagatgattcagaagcagccttgggagaagctgagtcagacccacatccctcccacccggaccagagggcccacttcaggggctggggatatcgacctggaaaagagacagaggaagaggaagctgctgaggactggggagaagctgagccctgccccttccgagtggccatctatgtacctggagagaagccaccgcctccctgggctcctcctaggctgcccctccgactgcaaaggcggctcaagcgcccagaaacccctactcatgatccggaccctgagactcccctaaaggccagaaaggtgcgcttctccgagaaggtcactgtccatttcctggctgtctgggcagggccggcccaggccgcccgccagggcccctgggagcagcttgctcgggatcgcagccgcttcgcacgccgcatcacccaggcccaggaggagctgagcccctgcctcacccctgctgcccgggccagagcctgggcacgcctcaggaacccacctttagcccccatccctgccctcacccagaccttgccttcctcctctgtcccttcgtccccagtccagaccacgcccttgagccaagctgtggccacaccttcccgctcgtctgctgctgcagcggctgccctggacctcagtgggaggcgtggctgagaccaactggtttgcctataatttattaactatttattttttctaagtgtgggtttatataaggaataaagccttttgatttgta

SEQ ID NO: 305800 - DNA, 2083 bp, Homo sapiens
tcggctcttatcggttcccatcccagttgttgatcttatgcaagacgctgcacgaccccgcgcccgcttgtcgccacggcacttgaggcagccggagatactctgagttactcggagcccgacgcctgagggtgagatgaacgcgctggcctccctaaccgtccggacctgtgatcgcttctggcagaccgaaccggcgctcctgcccccggggtgacgcgcagctcccagccgcccagacacatggccccaggccaagcaccccatcaggctaccccgtggagggatgcccaccctttcttcctcctgtccccagtgatgggcctcctcagccgcgcctggagccgcctgaggggcctgggacctctagagccctggctggtggaagcagtaaaaggagcagctctggtagaagctggcctggagggagaagctaggactcctctggcaatcccccataccccttggggcagacgccctgaagaggaggctgaagacagtggaggccctggagaggacagagaaacactggggctgaaaaccagcagttcccttcctgaagcctggggacttttggatgatgatgatggcatgtatggtgagcgagaggcaaccagtgtccctagagggcagggaagtcaatttgcagatggccagcgtgctcccctgtctcccagccttctgataaggacactgcaaggttctgataagaacccaggggaggagaaagccgaggaagagggagttgctgaagaggagggagttaacaagttctcttatccaccatcacaccgggagtgttgtccagccgtggaggaggaggacgatgaagaagctgtaaagaaagaagctcacagaacctctacttctgccttgtctccaggatccaagcccagcacttgggtgtcttgcccaggggaggaagagaatcaagccacggaggataaaagaacagaaagaagtaaaggagccaggaagacctccgtgtccccccgatcttcaggctccgaccccaggtcctgggagtatcgttcaggagaggcgtccgaggagaaggaggaaaaggcacacgaagaaactgggaaaggagaagctgccccagggccgcaatcctcagccccagcccagaggccccagctcaagtcctggtggtgccaacccagtgatgaagaggagggtgaggtcaaggctttgggggcagctgagaaggatggagaagctgagtgtcctccctgcatccccccaccaagtgccttcctgaaggcctgggtgtatcggccaggagaggacacggaggaggaggaagatgaggatgtggatagtgaggataaggaagatgattcagaagcagccttgggagaagctgagtcagacccacatccctcccacccggaccagagggcccacttcaggggctggggatatcgacctggaaaagagacagaggaagaggaagctgctgaggactggggagaagctgagccctgccccttccgagtggccatctatgtacctggagagaagccaccgcctccctgggctcctcctaggctgcccctccgactgcaaaggcggctcaagcgcccagaaacccctactcatgatccggaccctgagactcccctaaaggccagaaaggtgcgcttctccgagaaggtcactgtccatttcctggctgtctgggcagggccggcccaggccgcccgccagggcccctgggagcagcttgctcgggatcgcagccgcttcgcacgccgcatcacccaggcccaggaggagctgagcccctgcctcacccctgctgcccgggccagagcctgggcacgcctcaggaacccacctttagcccccatccctgccctcacccagaccttgccttcctcctctgtcccttcgtccccagtccagaccacgcccttgagccaagctgtggccacaccttcccgctcgtctgctgctgcagcggctgccctggacctcagtgggaggcgtggctgagaccaactggtttgcctataatttattaactatttattttttctaagtgtgggtttatataaggaataaagccttttgatttgta

SEQ ID NO: 305801 - DNA, 1950 bp, Homo sapiens
tcggctcttatcggttcccatcccagttgttgatcttatgcaagacgctgcacgaccccgcgcccgcttgtcgccacggcacttgaggcagccggagatactctgagttactcggagcccgacgcctgagggtgagatgaacgcgctggcctccctaaccgtccggacctgtgatcgcttctggcagaccgaaccggcgctcctgcccccggggtgacgcgcagctcccagccgcccagacacatggccccaggccaagcaccccatcaggctaccccgtggagggatgcccaccctttcttcctcctgtccccagtgatgggcctcctcagccgcgcctggagccgcctgaggggcctgggacctctagagccctggctggtggaagcagtaaaaggagcagctctggtagaagctggcctggagggagaagctaggactcctctggcaatcccccataccccttggggcagacgccctgaagaggaggctgaagacagtggaggccctggagaggacagagaaacactggggctgaaaaccagcagttcccttcctgaagcctggggacttttggatgatgatgatggcatgtatggtgagcgagaggcaaccagtgtccctagagggcagggaagtcaatttgcagatggccagcgtgctcccctgtctcccagccttctgataaggacactgcaaggttctgataagaacccaggggaggagaaagccgaggaagagggagttgctgaagaggagggagttaacaagttctcttatccaccatcacaccgggagtgttgtccagccgtggaggaggaggacgatgaagaagctgtaaagaaagaagctcacagaacctctacttctgccttgtctccaggatccaagcccagcacttgggtgtcttgcccaggggaggaagagaatcaagccacggaggataaaagaacagaaagaagtaaaggagccaggaagacctccgtgtccccccgatcttcaggctccgaccccaggtcctgggagtatcgttcaggagaggcgtccgaggagaaggaggaaaaggcacacgaagaaactgggaaaggagaagctgccccagggccgcaatcctcagccccagcccagaggccccagctcaagtcctggtggtgccaacccagtgatgaagaggaggggatgtggatagtgaggataaggaagatgattcagaagcagccttgggagaagctgagtcagacccacatccctcccacccggaccagagggcccacttcaggggctggggatatcgacctggaaaagagacagaggaagaggaagctgctgaggactggggagaagctgagccctgccccttccgagtggccatctatgtacctggagagaagccaccgcctccctgggctcctcctaggctgcccctccgactgcaaaggcggctcaagcgcccagaaacccctactcatgatccggaccctgagactcccctaaaggccagaaaggtgcgcttctccgagaaggtcactgtccatttcctggctgtctgggcagggccggcccaggccgcccgccagggcccctgggagcagcttgctcgggatcgcagccgcttcgcacgccgcatcacccaggcccaggaggagctgagcccctgcctcacccctgctgcccgggccagagcctgggcacgcctcaggaacccacctttagcccccatccctgccctcacccagaccttgccttcctcctctgtcccttcgtccccagtccagaccacgcccttgagccaagctgtggccacaccttcccgctcgtctgctgctgcagcggctgccctggacctcagtgggaggcgtggctgagaccaactggtttgcctataatttattaactatttattttttctaagtgtgggtttatataaggaataaagccttttgatttgta

SEQ ID NO: 305802 - DNA, 2650 bp, Homo sapiens
  misc_feature (2363)..(2364): n is a, c, g, or t
  misc_feature (2366)..(2366): n is a, c, g, or t
tcggctcttatcggttcccatcccagttgttgatcttatgcaagacgctgcacgaccccgcgcccgcttgtcgccacggcacttgaggcagccggagatactctgagttactcggagcccgacgcctgagggtgagatgaacgcgctggcctccctaaccgtccggacctgtgatcgcttctggcagaccgaaccggcgctcctgcccccggggtgacgcgcagctcccagccgcccagacacatggccccaggccaagcaccccatcaggctaccccgtggagggatgcccaccctttcttcctcctgtccccagtgatgggcctcctcagccgcgcctggagccgcctgaggggcctgggacctctagagccctggctggtggaagcagtaaaaggagcagctctggtagaagctggcctggagggagaagctaggactcctctggcaatcccccataccccttggggcagacgccctgaagaggaggctgaagacagtggaggccctggagaggacagagaaacactggggctgaaaaccagcagttcccttcctgaagcctggggacttttggatgatgatgatggcatgtatggtgagcgagaggcaaccagtgtccctagagggcagggaagtcaatttgcagatggccagcgtgctcccctgtctcccagccttctgataaggacactgcaaggttctgataagaacccaggggaggagaaagccgaggaagagggagttgctgaagaggagggagttaacaagttctcttatccaccatcacaccgggagtgttgtccagccgtggaggaggaggacgatgaagaagctgtaaagaaagaagctcacagaacctctacttctgccttgtctccaggatccaagcccagcacttgggtgtcttgcccaggggaggaagagaatcaagccacggaggataaaagaacagaaagaagtaaaggagccaggaagacctccgtgtccccccgatcttcaggctccgaccccaggtcctgggagtatcgttcaggagaggcgtccgaggagaaggaggaaaaggcacacgaagaaactgggaaaggagaagctgccccagggccgcaatcctcagccccagcccagaggccccagctcaagtcctggtggtgccaacccagtgatgaagaggagggtgaggtcaaggctttgggggcagctgagaaggatggagaagctgagtgtcctccctgcatccccccaccaagtgccttcctgaaggcctgggtgtattggccaggagaggacacagaggaagaggaagatgaggaagaagatgaggacagtgactctggatcagatgaggaagagggagaagctgaggcttcctcttccactcctgctacaggtgtcttcttgaagtcctgggtctatcagccaggagaggacacagaggaggaggaagatgaggacagtgatacaggatcagccgaggatgaaagagaagctgagacttctgcttccacaccccctgcaagtgctttcttgaaggcctgggtgtatcggccaggagaggacacggaggaggaggaagatgaggatgtggatagtgaggataaggaagatgattcagaagcagccttgggagaagctgagtcagacccacatccctcccacccggaccagagggcccacttcaggggctggggatatcgacctggaaaagagacagaggaagaggaagctgctgaggactggggagaagctgagccctgccccttccgagtggccatctatgtacctggagagaagccaccgcctccctgggctcctcctaggctgcccctccgactgcaaaggcggctcaagcgcccagaaacccctactcatgatccggaccctgagactcccctaaaggccagaaaggtgcgcttctccgagaaggtcactgtccatttcctggctgtctgggcagggccggcccaggccgcccgccagggcccctgggagcagcttgctcgggatcgcagccgcttcgcacgccgcatcacccaggcccaggaggagctgagcccctgcctcacccctgctgcccgggccagagcctgggcacgcctcaggaacccacctttagcccccatccctgccctcacccagaccttgccttcctcctctgtcccttcgtccccagtccagaccacgcccttgagccaagctgtggccacaccttcccgctcgtctgctgctgcagcggctgccctggacctcagtgggaggcgtggctgagaccaactggtttgcctataatttattaactatttattttttctaagtgtgggtttatataaggaataaagccttttgatttgtaaacaacaacnnanaaaaaaaggggggggcgaaaaaatacccgggggccaaaagggacccgtttttgtcaagggggccctatggggagggagataaagaaggacggggggggtaaaaagagggaggggaaggagcggggattgggagaccctcgtgtgggggaatggcaccaccaggattagccgggactacttcgttcgggtaacggcatgcggaatgtcgagatataggaggataataagagggtaaggatgatatgaagggagagtgcgagagtagacaacagcgtaacgacgag

SEQ ID NO: 305803 - DNA, 2151 bp, Homo sapiens
ctaaactttatttttttctcccccttttccagcccagacacatggccccaggccaagcaccccatcaggctaccccgtggagggatgcccaccctttcttcctcctgtccccagtgatgggcctcctcagccgcgcctggagccgcctgaggggcctgggacctctagagccctggctggtggaagcagtaaaaggagcagctctggtagaagctggcctggagggagaagctaggactcctctggcaatcccccataccccttggggcagacgccctgaagaggaggctgaagacagtggaggccctggagaggacagagaaacactggggctgaaaaccagcagttcccttcctgaagcctggggacttttggatgatgatgatggcatgtatggtgagcgagaggcaaccagtgtccctagagggcagggaagtcaatttgcagatggccagcgtgctcccctgtctcccagccttctgataaggacactgcaaggttctgataagaacccaggggaggagaaagccgaggaagagggagttgctgaagaggagggagttaacaagttctcttatccaccatcacaccgggagtgttgtccagccgtggaggaggaggacgatgaagaagctgtaaagaaagaagctcacagaacctctacttctgccttgtctccaggatccaagcccagcacttgggtgtcttgcccaggggaggaagagaatcaagccacggaggataaaagaacagaaagaagtaaaggagccaggaagacctccgtgtccccccgatcttcaggctccgaccccaggtcctgggagtatcgttcaggagaggcgtccgaggagaaggaggaaaaggcacacgaagaaactgggaaaggagaagctgccccagggccgcaatcctcagccccagcccagaggccccagctcaagtcctggtggtgccaacccagtgatgaagaggagggtgaggtcaaggctttgggggcagctgagaaggatggagaagctgagtgtcctccctgcatccccccaccaagtgccttcctgaaggcctgggtgtattggccaggagaggacacagaggaagaggaagatgaggaagaagatgaggacagtgactctggatcagatgaggaagagggagaagctgaggcttcctcttccactcctgctacaggtgtcttcttgaagtcctgggtctatcagccaggagaggacacagaggaggaggaagatgaggacagtgatacaggatcagccgaggatgaaagagaagctgagacttctgcttccacaccccctgcaagtgctttcttgaaggcctgggtgtatcggccaggagaggacacggaggaggaggaagatgaggatgtggatagtgaggataaggaagatgattcagaagcagccttgggagaagctgagtcagacccacatccctcccacccggaccagagggcccacttcaggggctggggatatcgacctggaaaagagacagaggaagaggaagctgctgaggactggggagaagctgagccctgccccttccgagtggccatctatgtacctggagagaagccaccgcctccctgggctcctcctaggctgcccctccgactgcaaaggcggctcaagcgcccagaaacccctactcatgatccggaccctgagactcccctaaaggccagaaaggtgcgcttctccgagaaggtcactgtccatttcctggctgtctgggcagggccggcccaggccgcccgccagggcccctgggagcagcttgctcgggatcgcagccgcttcgcacgccgcatcacccaggcccaggaggagctgagcccctgcctcacccctgctgcccgggccagagcctgggcacgcctcaggaacccacctttagcccccatccctgccctcacccagaccttgccttcctcctctgtcccttcgtccccagtccagaccacgcccttgagccaagctgtggccacaccttcccgctcgtctgctgctgcagcggctgccctggacctcagtgggaggcgtggctgagaccaactggtttgcctataatttattaactatttattttttctaagtgtgggtttatataaggaataaagccttttgatttgta

SEQ ID NO: 305804 - DNA, 2031 bp, Homo sapiens
  misc_feature (16)..(16): n is a, c, g, or t
  misc_feature (28)..(28): n is a, c, g, or t
aagcttacggctagtncgaggctgggtnttaatccggccgaggctagagcccctggctggtggaagcagtaaaaggagcagctctggtagaagctggcctggagggagaagctaggactcctctggcaatcccccataccccttggggcagacgccctgaagaggaggctgaagacagtggaggccctggagaggacagagaaacactggggctgaaaaccagcagttcccttcctgaagcctggggacttttggatgatgatgatggcatgtatggtgagcgagaggcaaccagtgtccctagagggcagggaagtcaatttgcagatggccagcgtgctcccctgtctcccagccttctgataaggacactgcaaggttctgataagaacccaggggaggagaaagccgaggaagagggagttgctgaagaggagggagttaacaagttctcttatccaccatcacaccgggagtgttgtccagccgtggaggaggaggacgatgaagaagctgtaaagaaagaagctcacagaacctctacttctgccttgtctccaggatccaagcccagcacttgggtgtcttgcccaggggaggaagagaatcaagccacggaggataaaagaacagaaagaagtaaaggagccaggaagacctccgtgtccccccgatcttcaggctccgaccccaggtcctgggagtatcgttcaggagaggcgtccgaggagaaggaggaaaaggcacacgaagaaactgggaaaggagaagctgccccagggccgcaatcctcagccccagcccagaggccccagctcaagtcctggtggtgccaacccagtgatgaagaggagggtgaggtcaaggctttgggggcagctgagaaggatggagaagctgagtgtcctccctgcatccccccaccaagtgccttcctgaaggcctgggtgtattggccaggagaggacacagaggaagaggaagatgaggaagaagatgaggacagtgactctggatcagatgaggaagagggagaagctgaggcttcctcttccactcctgctacaggtgtcttcttgaagtcctgggtctatcagccaggagaggacacagaggaggaggaagatgaggacagtgatacaggatcagccgaggatgaaagagaagctgagacttctgcttccacaccccctgcaagtgctttcttgaaggcctgggtgtatcggccaggagaggacacggaggaggaggaagatgaggatgtggatagtgaggataaggaagatgattcagaagcagccttgggagaagctgagtcagacccacatccctcccacccggaccagagggcccacttcaggggctggggatatcgacctggaaaagagacagaggaagaggaagctgctgaggactggggagaagctgagccctgccccttccgagtggccatctatgtacctggagagaagccaccgcctccctgggctcctcctaggctgcccctccgactgcaaaggcggctcaagcgcccagaaacccctactcatgatccggaccctgagactcccctaaaggccagaaaggtgcgcttctccgagaaggtcactgtccatttcctggctgtctgggcagggccggcccaggccgcccgccagggcccctgggagcagcttgctcgggatcgcagccgcttcgcacgccgcatcacccaggcccaggaggagctgagcccctgcctcacccctgctgcccgggccagagcctgggcacgcctcaggaacccacctttagcccccatccctgccctcacccagaccttgccttcctcctctgtcccttcgtccccagtccagaccacgcccttgagccaagctgtggccacaccttcccgctcgtctgctgctgcagcggctgccctggacctcagtgggaggcgtggctgagaccaactggtttgcctataatttattaactatttattttttctaagtgtgggtttatataaggaataaagccttttgatttgta

SEQ ID NO: 305805 - DNA, 1787 bp, Homo sapiens
gaacgggtgatgcggttgactgaggatgtggatagtgaggataaggaagatgattcagaagcagccttgggagaagctgagtcagacccacatccctcccacccggaccagagggcccacttcaggggctggggatatcgacctggaaaagagacagaggaagaggaagctgctgaggactggggagaagctgagccctgccccttccgagtgggcatctatgtaccgggagtgttgtccagccgtggaggaggaggacgatgaagaagctgtaaagaaagaagctcacagaacctctacttctgccttgtctccaggatccaagcccagcacttgggtgtcttgcccaggggaggaagagaatcaagccacggaggataaaagaacagaaagaagtaaaggagccaggaagacctccgtgtccccccgatcttcaggctccgaccccaggtcctgggagtatcgttcaggagaggcgtccgaggagaaggaggaaaaggcacacgaagaaactgggaaaggagaagctgccccagggccgcaatcctcagccccagcccagaggccccagctcaagtcctggtggtgccaacccagtgatgaagaggagggtgaggtcaaggctttgggggcagctgagaaggatggagaagctgagtgtcctccctgcatccccccaccaagtgccttcctgaaggcctgggtgtattggccaggagaggacacagaggaagaggaagatgaggaagaagatgaggacagtgactctggatcagatgaggaagagggagaagctgaggcttcctcttccactcctgctacaggtgtcttcttgaagtcctgggtctatcagccaggagaggacacagaggaggaggaagatgaggacagtgatacaggatcagccgaggatgaaagagaagctgagacttctgcttccacaccccctgcaagtgctttcttgaaggcctgggtgtatcggccaggagaggacacggaggaggaggaagatgaggatgtggatagtgaggataaggaagatgattcagaagcagccttgggagaagctgagtcagacccacatccctcccacccggaccagagggcccacttcaggggctggggatatcgacctggaaaagagacagaggaagaggaagctgctgaggactggggagaagctgagccctgccccttccgagtggccatctatgtacctggagagaagccaccgcctccctgggctcctcctaggctgcccctccgactgcaaaggcggctcaagcgcccagaaacccctactcatgatccggaccctgagactcccctaaaggccagaaaggtgcgcttctccgagaaggtcactgtccatttcctggctgtctgggcagggccggcccaggccgcccgccagggcccctgggagcagcttgctcgggatcgcagccgcttcgcacgccgcatcacccaggcccaggaggagctgagcccctgcctcacccctgctgcccgggccagagcctgggcacgcctcaggaacccacctttagcccccatccctgccctcacccagaccttgccttcctcctctgtcccttcgtccccagtccagaccacgcccttgagccaagctgtggccacaccttcccgctcgtctgctgctgcagcggctgccctggacctcagtgggaggcgtggctgagaccaactggtttgcctataatttattaactatttattttttctaagtgtgggtttatataaggaataaagccttttgatttgta

SEQ ID NO: 305806 - DNA, 1343 bp, Homo sapiens
ccggtaccctgctccgccctctccaggagaggcgtccgaggagaaggaggaaaaggcacacgaagaaactgggaaaggagaagctgccccagggccgcaatcctcagccccagcccagaggccccagctcaagtcctggtggtgccaacccagtgatgaagaggagggtgaggtcaaggctttgggggcagctgagaaggatggagaagctgagtgtcctccctgcatccccccaccaagtgccttcctgaaggcctgggtgtattggccaggagaggacacagaggaagaggaagatgaggaagaagatgaggacagtgactctggatcagatgaggaagagggagaagctgaggcttcctcttccactcctgctacaggtgtcttcttgaagtcctgggtctatcagccaggagaggacacagaggaggaggaagatgaggacagtgatacaggatcagccgaggatgaaagagaagctgagacttctgcttccacaccccctgcaagtgctttcttgaaggcctgggtgtatcggccaggagaggacacggaggaggaggaagatgaggatgtggatagtgaggataaggaagatgattcagaagcagccttgggagaagctgagtcagacccacatccctcccacccggaccagagggcccacttcaggggctggggatatcgacctggaaaagagacagaggaagaggaagctgctgaggactggggagaagctgagccctgccccttccgagtggccatctatgtacctggagagaagccaccgcctccctgggctcctcctaggctgcccctccgactgcaaaggcggctcaagcgcccagaaacccctactcatgatccggaccctgagactcccctaaaggccagaaaggtgcgcttctccgagaaggtcactgtccatttcctggctgtctgggcagggccggcccaggccgcccgccagggcccctgggagcagcttgctcgggatcgcagccgcttcgcacgccgcatcacccaggcccaggaggagctgagcccctgcctcacccctgctgcccgggccagagcctgggcacgcctcaggaacccacctttagcccccatccctgccctcacccagaccttgccttcctcctctgtcccttcgtccccagtccagaccacgcccttgagccaagctgtggccacaccttcccgctcgtctgctgctgcagcggctgccctggacctcagtgggaggcgtggctgagaccaactggtttgcctataatttattaactatttattttttctaagtgtgggtttatataaggaataaagccttttgatttgta

SEQ ID NO: 305807 - DNA, 2077 bp, Homo sapiens
tcggctcttatcggttcccatcccagttgttgatcttatgcaagacgctgcacgaccccgcgcccgcttgtcgccacggcacttgaggcagccggagatactctgagttactcggagcccgacgcctgagggtgagatgaacgcgctggcctccctaaccgtccggacctgtgatcgcttctggcagaccgaaccggcgctcctgcccccggggtgacgcgcagctcccagccgcccagacacatggccccaggccaagcaccccatcaggctaccccgtggagggatgcccaccctttcttcctcctgtccccagtgatgggcctcctcagccgcgcctggagccgcctgaggggcctgggacctctagagccctggctggtggaagcagtaaaaggagcagctctggtagaagctggcctggagggagaagctaggactcctctggcaatcccccataccccttggggcagacgccctgaagaggaggctgaagacagtggaggccctggagaggacagagaaacactggggctgaaaaccagcagttcccttcctgaagcctggggacttttggatgatgatgatggcatgtatggtgagcgagaggcaaccagtgtccctagagggcagggaagtcaatttgcagatggccagcgtgctcccctgtctcccagccttctgataaggacactgcaaggttctgataagaacccaggggaggagaaagccgaggaagagggagttgctgaagaggagggagttaacaagttctcttatccaccatcacaccgggagtgttgtccagccgtggaggaggaggacgatgaagaagctgtaaagaaagaagctcacagaacctctacttctgccttgtctccaggatccaagcccagcacttgggtgtcttgcccaggggaggaagagaatcaagccacggaggataaaagaacagaaagaagtaaaggagccaggaagacctccgtgtccccccgatcttcaggctccgaccccaggtcctgggagtatcgttcaggagaggcgtccgaggagaaggaggaaaaggcacacgaagaaactgggaaaggagaagctgccccagggccgcaatcctcagccccagcccagaggccccagctcaagtcctggtggtgccaacccagtgatgaagaggagggtgaggtcaaggctttgggggcagctgagaaggatggagaagctgagtgtcctccctgcatccccccaccaagtgccttcctgaaggcctgggtgtattggccaggagaggacacagaggaagaggaagatgaggaagaagatgaggacagtgactctggatcagatgaggaagagggagaagctgaggcttcctcttccactcctgctacaggtgtcttcttgaagtcctgggtctatcagccaggagaggacacagaggaggaggaagatgaggacagtgatacaggatcagccgaggatgaaagagaagctgagacttctgcttccacaccccctgcaagtgctttcttgaaggcctgggtgtatcggccaggagaggacacggaggaggaggaagatgaggatgtggatagtgaggataaggaagatgattcagaagcagccttgggagaagctgagtcagacccacatccctcccacccggaccagagggcccacttcaggggctggggatatcgacctggaaaagagacagaggaagaggaagctgctgaggactggggagaagctgagccctgccccttccgagtggccatctatgtacctggagagaagccaccgcctccctgggctcctcctaggctgcccctccgactgcaaaggcggctcaagcgcccagaaacccctactcatgatccggaccctgagactcccctaaaggccagaaaggtgcgcttctccgagaaggtcactgtccatttcctggctgtctgggcagggccggcccaggccgcccgccagggcccctgggagcagcttgctcgggatcgcagccgcttcgcacgccgcatcacccaggagatccgcccgcacatccgcttattgtacacacatccgg

SEQ ID NO: 305808 - DNA, 2230 bp, Homo sapiens
tcggctcttatcggttcccatcccagttgttgatcttatgcaagacgctgcacgaccccgcgcccgcttgtcgccacggcacttgaggcagccggagatactctgagttactcggagcccgacgcctgagggtgagatgaacgcgctggcctccctaaccgtccggacctgtgatcgcttctggcagaccgaaccggcgctcctgcccccggggtgacgcgcagctcccagccgcccagacacatggccccaggccaagcaccccatcaggctaccccgtggagggatgcccaccctttcttcctcctgtccccagtgatgggcctcctcagccgcgcctggagccgcctgaggggcctgggacctctagagccctggctggtggaagcagtaaaaggagcagctctggtagaagctggcctggagggagaagctaggactcctctggcaatcccccataccccttggggcagacgccctgaagaggaggctgaagacagtggaggccctggagaggacagagaaacactggggctgaaaaccagcagttcccttcctgaagcctggggacttttggatgatgatgatggcatgtatggtgagcgagaggcaaccagtgtccctagagggcagggaagtcaatttgcagatggccagcgtgctcccctgtctcccagccttctgataaggacactgcaaggttctgataagaacccaggggaggagaaagccgaggaagagggagttgctgaagaggagggagttaacaagttctcttatccaccatcacaccgggagtgttgtccagccgtggaggaggaggacgatgaagaagctgtaaagaaagaagctcacagaacctctacttctgccttgtctccaggatccaagcccagcacttgggtgtcttgcccaggggaggaagagaatcaagccacggaggataaaagaacagaaagaagtaaaggagccaggaagacctccgtgtccccccgatcttcaggctccgaccccaggtcctgggagtatcgttcaggagaggcgtccgaggagaaggaggaaaaggcacacgaagaaactgggaaaggagaagctgccccagggccgcaatcctcagccccagcccagaggccccagctcaagtcctggtggtgccaacccagtgatgaagaggagggtgaggtcaaggctttgggggcagctgagaaggatggagaagctgagtgtcctccctgcatccccccaccaagtgccttcctgaaggcctgggtgtattggccaggagaggacacagaggaagaggaagatgaggaagaagatgaggacagtgactctggatcagatgaggaagagggagaagctgaggcttcctcttccactcctgctacaggtgtcttcttgaagtcctgggtctatcagccaggagaggacacagaggaggaggaagatgaggacagtgatacaggatcagccgaggatgaaagagaagctgagacttctgcttccacaccccctgcaagtgctttcttgaaggcctgggtgtatcggccaggagaggacacggaggaggaggaagatgaggatgtggatagtgaggataaggaagatgattcagaagcagccttgggagaagctgagtcagacccacatccctcccacccggaccagagggcccacttcaggggctggggatatcgacctggaaaagagacagaggaagaggaagctgctgaggactggggagaagctgagccctgccccttccgagtggccatctatgtacctggagagaagccaccgcctccctgggctcctcctaggctgcccctccgactgcaaaggcggctcaagcgcccagaaacccctactcatgatccggaccctgagactcccctaaaggccagaaaggtgcgcttctccgagaaggtcactgtccatttcctggctgtctgggcagggccggcccaggccgcccgccagggcccctgggagcagcttgctcgggatcgcagccgcttcgcacgccgcatcacccaggcttcgtccccagtccagaccacgcccttgagccaagctgtggccacaccttcccgctcgtctgctgctgcagcggctgccctggacctcagtgggaggcgtggctgagaccaactggtttgcctataatttattaactatttattttttctaagtgtgggtttatataaggaataaagccttttgatttgta

SEQ ID NO: 305809 - DNA, 1626 bp, Homo sapiens
tcggctcttatcggttcccatcccagttgttgatcttatgcaagacgctgcacgaccccgcgcccgcttgtcgccacggcacttgaggcagccggagatactctgagttactcggagcccgacgcctgagggtgagatgaacgcgctggcctccctaaccgtccggacctgtgatcgcttctggcagaccgaaccggcgctcctgcccccggggtgacgcgcagctcccagccgcccagacacatggccccaggccaagcaccccatcaggctaccccgtggagggatgcccaccctttcttcctcctgtccccagtgatgggcctcctcagccgcgcctggagccgcctgaggggcctgggacctctagagccctggctggtggaagcagtaaaaggagcagctctggtagaagctggcctggagggagaagctaggactcctctggcaatcccccataccccttggggcagacgccctgaagaggaggctgaagacagtggaggccctggagaggacagagaaacactggggctgaaaaccagcagttcccttcctgaagcctggggacttttggatgatgatgatggcatgtatggtgagcgagaggcaaccagtgtccctagagggcagggaagtcaatttgcagatggccagcgtgctcccctgtctcccagccttctgataaggacactgcaaggttctgataagaacccaggggaggagaaagccgaggaagagggagttgctgaagaggagggagttaacaagttctcttatccaccatcacaccgggagtgttgtccagccgtggaggaggaggacgatgaagaagctgtaaagaaagaagctcacagaacctctacttctgccttgtctccaggatccaagcccagcacttgggtgtcttgcccaggggaggaagagaatcaagccacggaggataaaagaacagaaagaagtaaaggagccaggaagacctccgtgtccccccgatcttcaggctccgaccccaggtcctgggagtatcgttcaggagaggcgtccgaggagaaggaggaaaaggcacacgaagaaactgggaaaggagaagctgccccagggccgcaatcctcagccccagcccagaggccccagctcaagtcctggtggtgccaacccagtgatgaagaggagggtgaggtcaaggctttgggggcagctgagaaggatggagaagctgagtgtcctccctgcatccccccaccaagtgccttcctgaaggcctgggtgtattggccaggagaggacacagaggaagaggaagatgagcccaggaggagctgagcccctgcctcacccctgctgcccgggccagagcctgggcacgcctcaggaacccacctttagcccccatccctgccctcacccagaccttgccttcctcctctgtcccttcgtccccagtccagaccacgcccttgagccaagctgtggccacaccttcccgctcgtctgctgctgcagcggctgccctggacctcagtgggaggcgtggctgagaccaactggtttgcctataatttattaactatttattttttctaagtgtgggtttatataaggaataaagccttttgatttgta

SEQ ID NO: 305810 - DNA, 1699 bp, Homo sapiens
tcggctcttatcggttcccatcccagttgttgatcttatgcaagacgctgcacgaccccgcgcccgcttgtcgccacggcacttgaggcagccggagatactctgagttactcggagcccgacgcctgagggtgagatgaacgcgctggcctccctaaccgtccggacctgtgatcgcttctggcagaccgaaccggcgctcctgcccccggggtgacgcgcagctcccagccgcccagacacatggccccaggccaagcaccccatcaggctaccccgtggagggatgcccaccctttcttcctcctgtccccagtgatgggcctcctcagccgcgcctggagccgcctgaggggcctgggacctctagagccctggctggtggaagcagtaaaaggagcagctctggtagaagctggcctggagggagaagctaggactcctctggcaatcccccataccccttggggcagacgccctgaagaggaggctgaagacagtggaggccctggagaggacagagaaacactggggctgaaaaccagcagttcccttcctgaagcctggggacttttggatgatgatgatggcatgtatggtgagcgagaggcaaccagtgtccctagagggcagggaagtcaatttgcagatggccagcgtgctcccctgtctcccagccttctgataaggacactgcaaggttctgataagaacccaggggaggagaaagccgaggaagagggagttgctgaagaggagggagttaacaagttctcttatccaccatcacaccgggagtgttgtccagccgtggaggaggaggacgatgaagaagctgtaaagaaagaagctcacagaacctctacttctgccttgtctccaggatccaagcccagcacttgggtgtcttgcccaggggaggaagagaatcaagccacggaggataaaagaacagaaagaagtaaaggagccaggaagacctccgtgtccccccgatcttcaggctccgaccccaggtcctgggagtatcgttcaggagaggcgtccgaggagaaggaggaaaaggcacacgaagaaactgggaaaggagaagctgccccagggccgcaatcctcagccccagcccagaggccccagctcaagtcctggtggtgccaacccagtgatgaagaggagggtgaggtcaaggctttgggggcagctgagaaggatggagaagctgagtgtcctccctgcatccccccaccaagtgccttcctgaaggcctgggtgtatcggccaggagaggacacggaggaggaggaagatgaggatgtggatagtgaggataaggaagatgattcagaagcagccttgggagaagctgagtcagacccacatccctcccaggaggagctgagcccctgcctcacccctgctgcccgggccagagcctgggcacgcctcaggaacccacctttagcccccatccctgccctcacccagaccttgccttcctcctctgtcccttcgtccccagtccagaccacgcccttgagccaagctgtggccacaccttcccgctcgtctgctgctgcagcggctgccctggacctcagtgggaggcgtggctgagaccaactggtttgcctataatttattaactatttattttttctaagtgtgggtttatataaggaataaagccttttgatttgta

SEQ ID NO: 305811 - DNA, 1534 bp, Homo sapiens
tcggctcttatcggttcccatcccagttgttgatcttatgcaagacgctgcacgaccccgcgcccgcttgtcgccacggcacttgaggcagccggagatactctgagttactcggagcccgacgcctgagggtgagatgaacgcgctggcctccctaaccgtccggacctgtgatcgcttctggcagaccgaaccggcgctcctgcccccggggtgacgcgcagctcccagccgcccagacacatggccccaggccaagcaccccatcaggctaccccgtggagggatgcccaccctttcttcctcctgtccccagtgatgggcctcctcagccgcgcctggagccgcctgaggggcctgggacctctagagccctggctggtggaagcagtaaaaggagcagctctggtagaagctggcctggagggagaagctaggactcctctggcaatcccccataccccttggggcagacgccctgaagaggaggctgaagacagtggaggccctggagaggacagagaaacactggggctgaaaaccagcagttcccttcctgaagcctggggacttttggatgatgatgatggcatgtatggtgagcgagaggcaaccagtgtccctagagggcagggaagtcaatttgcagatggccagcgtgctcccctgtctcccagccttctgataaggacactgcaaggttctgataagaacccaggggaggagaaagccgaggaagagggagttgctgaagaggagggagttaacaagttctcttatccaccatcacaccgggagtgttgtccagccgtggaggaggaggacgatgaagaagctgtaaagaaagaagctcacagaacctctacttctgccttgtctccaggatccaagcccagcacttgggtgtcttgcccaggggaggaagagaatcaagccacggaggataaaagaacagaaagaagtaaaggagccaggaagacctccgtgtccccccgatcttcaggctccgaccccaggtcctgggagtatcgttcaggagaggcgtccgaggagaaggaggaaaaggcacacgaagaaactgggaaaggagaagctgccccagggccgcaatcctcagccccagcccagaggccccagctcaagtcctggtggtgccaacccagtgatgaagaggagggtgaggtcaaggctttgggggcagctgagaaggatggagaagcccaggaggagctgagcccctgcctcacccctgctgcccgggccagagcctgggcacgcctcaggaacccacctttagcccccatccctgccctcacccagaccttgccttcctcctctgtcccttcgtccccagtccagaccacgcccttgagccaagctgtggccacaccttcccgctcgtctgctgctgcagcggctgccctggacctcagtgggaggcgtggctgagaccaactggtttgcctataatttattaactatttattttttctaagtgtgggtttatataaggaataaagccttttgatttgta

SEQ ID NO: 305812 - DNA, 1052 bp, Homo sapiens
tattagaggatccccagaggcacaagggaggaggggcatcctcaccgctcgccgtagtgtggatgacctgtggtggagaagaacagagaaagaagttgcagaagcaggccacatcgaaaggaggtgcaataggggcagtgcacaaagatggagtcaagtgctggagaaagccgaggatgaaagagaagctgagacttctgcttccacaccccctgcaagtgctttcttgaaggcctgggtgtatcggccaggagaggacacggaggaggaggaagatgaggatgtggatagtgaggataaggaagatgattcagaagcagccttgggagaagctgagtcagacccacatccctcccacccggaccagagggcccacttcaggggctggggatatcgacctggaaaagagacagaggaagaggaagctgctgaggactggggagaagctgagccctgccccttccgagtggccatctatgtacctggagagaagccaccgcctccctgggctcctcctaggctgcccctccgactgcaaaggcggctcaagcgcccagaaacccctactcatgatccggaccctgagactcccctaaaggccagaaaggtgcgcttctccgagaaggtcactgtccatttcctggctgtctgggcagggccggcccaggccgcccgccagggcccctgggagcagcttgctcgggatcgcagccgcttcgcacgccgcatcacccaggcccaggaggagctgagcccctgcctcacccctgctgcccgggccagagcctgggcacgcctcaggaacccacctttagcccccatccctgccctcacccagaccttgccttcctcctctgtcccttcgtccccagtccagaccacgcccttgagccaagctgtggccacaccttcccgctcgtctgctgctgcagcggctgccctggacctcagtgggaggcgtggctgagaccaactggtttgcctataatttattaactatttattttttctaagtgtgggtttatataaggaataaagccttttgatttgta

SEQ ID NO: 305813 - DNA, 803 bp, Homo sapiens
  misc_feature (16)..(16): n is a, c, g, or t
  misc_feature (28)..(28): n is a, c, g, or t
aagcttacggctagtncgaggctgggtnttggatgtggatagtgaggataaggaagatgattcagaagcagccttgggagaagctgagtcagacccacatccctcccacccggaccagagggcccacttcaggggctggggatatcgacctggaaaagagacagaggaagaggaagctgctgaggactggggagaagctgagccctgccccttccgagtggccatctatgtacctggagagaagccaccgcctccctgggctcctcctaggctgcccctccgactgcaaaggcggctcaagcgcccagaaacccctactcatgatccggaccctgagactcccctaaaggccagaaaggtgcgcttctccgagaaggtcactgtccatttcctggctgtctgggcagggccggcccaggccgcccgccagggcccctgggagcagcttgctcgggatcgcagccgcttcgcacgccgcatcacccaggcccaggaggagctgagcccctgcctcacccctgctgcccgggccagagcctgggcacgcctcaggaacccacctttagcccccatccctgccctcacccagaccttgccttcctcctctgtcccttcgtccccagtccagaccacgcccttgagccaagctgtggccacaccttcccgctcgtctgctgctgcagcggctgccctggacctcagtgggaggcgtggctgagaccaactggtttgcctataatttattaactatttattttttctaagtgtgggtttatataaggaataaagccttttgatttgta

SEQ ID NO: 305814 - DNA, 1418 bp, Homo sapiens
  misc_feature (1387)..(1387): n is a, c, g, or t
tcggctcttatcggttcccatcccagttgttgatcttatgcaagacgctgcacgaccccgcgcccgcttgtcgccacggcacttgaggcagccggagatactctgagttactcggagcccgacgcctgagggtgagatgaacgcgctggcctccctaaccgtccggacctgtgatcgcttctggcagaccgaaccggcgctcctgcccccggggtgacgcgcagctcccagccgcccagacacatggccccaggccaagcaccccatcaggctaccccgtggagggatgcccaccctttcttcctcctgtccccagtgatgggcctcctcagccgcgcctggagccgcctgaggggcctgggacctctagagccctggctggtggaagcagtaaaaggagcagctctggtagaagctggcctggagggagaagctaggactcctctggcaatcccccataccccttggggcagacgccctgaagaggaggctgaagacagtggaggccctggagaggacagagaaacactggggctgaaaaccagcagttcccttcctgaagcctggggacttttggatgatgatgatggcatgtatggtgagcgagaggcaaccagtgtccctagagggcagggaagtcaatttgcagatggccagcgtgctcccctgtctcccagccttctgataaggacactgcaaggttctgataagaacccaggggaggagaaagccgaggaagagggagttgctgaagaggagggagttaacaagttctcttatccaccatcacaccgggagtgttgtccagccgtggaggaggaggacgatgaagaagctgtaaagaaagaagctcacagaacctctacttctgccttgtctccaggatccaagcccagcacttgggtgtcttgcccaggggaggaagagaatcaagccacggaggataaaagaacagaaagaagtaaaggagccaggaagacctccgtgtccccccgatcttcaggctccgaccccaggtcctgggagtatcgttcaggagaggcgtccgaggagaaggaggaaaaggcacacgaagaaactgggaaaggagaagctgccccagggccgcaatcctcagccccagcccagaggccccagctcaagtcctggtggtgccaacccagtgatgaagaggagggtgaggtcaaggctttgggggcagctgagaaggatggagaagctgagtgtcctccctgcatccccccaccaagtgccttcctgaaggcctgggtgtattggccaggagaggacacagaggaagaggaagatgagaatctagccacggaggataaaagaacagaaagaagtaaaggagccaggaagacctccgtgtccccccgatctcagnctccgaccccagtcctgggatatcttcatga

SEQ ID NO: 305815 - DNA, 1136 bp, Homo sapiens
tcggctcttatcggttcccatcccagttgttgatcttatgcaagacgctgcacgaccccgcgcccgcttgtcgccacggcacttgaggcagccggagatactctgagttactcggagcccgacgcctgagggtgagatgaacgcgctggcctccctaaccgtccggacctgtgatcgcttctggcagaccgaaccggcgctcctgcccccggggtgacgcgcagctcccagccgcccagacacatggccccaggccaagcaccccatcaggctaccccgtggagggatgcccaccctttcttcctcctgtccccagtgatgggcctcctcagccgcgcctggagccgcctgaggggcctgggacctctagagccctggctggtggaagcagtaaaaggagcagctctggtagaagctggcctggagggagaagctaggactcctctggcaatcccccataccccttggggcagacgccctgaagaggaggctgaagacagtggaggccctggagaggacagagaaacactggggctgaaaaccagcagttcccttcctgaagcctggggacttttggatgatgatgatggcatgtatggtgagcgagaggcaaccagtgtccctagagggcagggaagtcaatttgcagatggccagcgtgctcccctgtctcccagccttctgataaggacactgcaaggttctgataagaacccaggggaggagaaagccgaggaagagggagttgctgaagaggagggagttaacaagttctcttatccaccatcacaccgggagtgttgtccagccgtggaggaggaggacgatgaagaagctgtaaagaaagaagctcacagaacctctacttctgccttgtctccaggatccaagcccagcacttgggtgtcttgcccaggggaggaagagaatcaagccacggaggataaaagaacagaaagaagtaaaggagccaggaagacctccgtgtccccccgatcttcaggctccgaccccaggtcctgggagtatcgttcaggagaggcgtccgaggagaaggaggaaaaggcacacgaagaaactgggaaaggagaagctgccccagggccgcaatcctttcccagtttctttgtgtgccg

SEQ ID NO: 305816 - DNA, 959 bp, Homo sapiens
tcggctcttatcggttcccatcccagttgttgatcttatgcaagacgctgcacgaccccgcgcccgcttgtcgccacggcacttgaggcagccggagatactctgagttactcggagcccgacgcctgagggtgagatgaacgcgctggcctccctaaccgtccggacctgtgatcgcttctggcagaccgaaccggcgctcctgcccccggggtgacgcgcagctcccagccgcccagacacatggccccaggccaagcaccccatcaggctaccccgtggagggatgcccaccctttcttcctcctgtccccagtgatgggcctcctcagccgcgcctggagccgcctgaggggcctgggacctctagagccctggctggtggaagcagtaaaaggagcagctctggtagaagctggcctggagggagaagctaggactcctctggcaatcccccataccccttggggcagacgccctgaagaggaggctgaagacagtggaggccctggagaggacagagaaacactggggctgaaaaccagcagttcccttcctgaagcctggggacttttggatgatgatgatggcatgtatggtgagcgagaggcaaccagtgtccctagagggcagggaagtcaatttgcagatggccagcgtgctcccctgtctcccagccttctgataaggacactgcaaggttctgataagaacccaggggaggagaaagccgaggaagagggagttgctgaagaggagggagttaacaagttctcttatccaccatcacaccgggagtgttgtccagccgtggaggaggaggacgatgaagaagctgtaaagaaagaagctcacagaacctctacttctgccttgtctccaggatccaagcccagccaacttaggaaaattacctgccctcaggtgggtagggatatgattaattccagctcccttct

SEQ ID NO: 305817 - DNA, 565 bp, Homo sapiens
ctacgcggctggacaacactcccggtgtgatggtggataagagaacttgttaactccctccccatccggattcccgtggctgtgtgcatctcctgcctgtgtccccatgtctgcccgcaggtgcgcttctccgagaaggtcactgtccatttcctggctgtctgggcagggccggcccaggccgcccgccagggcccctgggagcagcttgctcgggatcgcagccgcttcgcacgccgcatcacccaggcccaggaggagctgagcccctgcctcacccctgctgcccgggccagagcctgggcacgcctcaggaacccacctttagcccccatccctgccctcacccagaccttgccttcctcctctgtcccttcgtccccagtccagaccacgcccttgagccaagctgtggccacaccttcccgctcgtctgctgctgcagcggctgccctggacctcagtgggaggcgtggctgagaccaactggtttgcctataatttattaactatttattttttctaagtgtgggtttatataaggaataaagccttttgatttgta

SEQ ID NO: 305818 - DNA, 583 bp, Homo sapiens
gtaccggccggagtgtatggatccagttgttgatcttatgcaagacgctgcacgaccccgcgcccgcttgtcgccacggcacttgaggcagccggagatactctgagttactcggagcccgacgcctgagggtgagatgaacgcgctggcctccctaaccgtccggacctgtgatcgcttctggcagaccgaaccggcgctcctgcccccggggtgacgcgcagctcccagccggtgagtaaggggtcggaacgcctgggtccccacggggctgggggcccggatttagaaaggagaaggggttgggagcctggagtcctgagcctgagggaggagggatctggaagccagattcttgggtcccccgtgaaggaatcatctgccaagtagggggtcgggtcagaatgtttcagtctgcgagggaggagggtgtgagggtttgatttgtcaatcttcagcagaatgagagagctagggactatgactttgtcgccaagggaagcaagtaaagacttttgttcttggttcttgggactgggagttctgcgtctgaagaaagagagggctgggggcttggaccctt

SEQ ID NO: 305819 - DNA, 525 bp, Homo sapiens
caaactcctgacatcacgtgatccacccatctcagcctcccaaagtgctgggattacaggcgtgagctaccacatctggctgagagcccagattcttgagtcttagaaagaaagggggctgggggccgagacttctgggtccctgtatgttgcagagggttgcatgtcatctccatggagaaggctgtgtacgctgtcacgcaatcccttgtaagaggccaggcccctgggggaggagggagcagctgtggctcacagcagccccaggaaaccacctcttccttcagtgagtcagatagatagagaatcccgtgacagtgacaggcaagtgactagccagatagaaagcatttttgtgtaataactaatttttgtttgcttctctctctctcttccccgccctccccatccggattcccgtggctgtgtgcatctcctgcctgtgtccccatgtctgcccgcaggtgcgcttctccgagaaggtcactgtccatttcctggctgtctgggcagggccggcccagg

SEQ ID NO: 305820 - DNA, 357 bp, Homo sapiens
ctcctgggcacagcaataaactcctgcctgggtttcacttagtgcccacaccttacagtgccttgcataccacagatgctcaatacacagttactgcatatctgttgaatatgtgttggcaacactggatcaagcacctcagatgtccactgatcaccttagtattcaaaagtacagagaggctgggtgcgtgcggtggctcatccctgtaatcccagcactttgggatgccgaggcaggcagatcacttgaggtcaggcatttggagatgagcctgaccaacatggtaaaaccccatctctactaaaaatacaagaaaattagccaggggtggtggtgcacgcctgtaatcccagc

SEQ ID NO: 305821 - DNA, 569 bp, Homo sapiens
attagtgatggattgctttgtaatactttgggagtctgggtttggcagagtgtgcccctatgaagactaagtgggactataatgattgtgttttcttaaatcagaatcaggatgcataaccagatgaaggaagacatagtcgggagccatagttttaatatctagattttggaattttagggtgatttactatagggacaaagtatttgaaattgggattggcggaacatcagtggaaccagcgattgctaagttaaatatatacagggacattagataatggatgatgaggaaatgggtaaaagaaagtgagggccttgtgagttgaaacaaaaataatcaaacctggaacactttccatttattgtattagatatcttcatttcaataaaattaatgtatatgacaaaattttattgtcctcctagttcaagtggtattctacttttatttccataaaaatatactttcaggatagggaaagggtaaacttgcattataagtttgtattttctcacgaagggacaggagagaagaaaaaaatcatttgcttattgtctaggctatgc

SEQ ID NO: 305822 - DNA, 716 bp, Homo sapiens
ccaccttggccaagctggtctcaaactcccaacctcaggtgatccacccacctcggccccaaagtgctgggattacaggagtgagccactgcttccggcctgctgtatgtttttattatatactatgagataatgagattagtgatggattgctttgtaatactttgggagtctgggtttggcagagtgtgcccctatgaagactaagtgggactataatgattgtgttttcttaaatcagaatcaggatgcataaccagatgaaggaagacatagtcgggagccatagttttaatatctagattttggaattttagggtgatttactatagggacaaagtatttgaaattgggattggcggaacatcagtggaaccagcgattgctaagttaaatatatacagggacattagataatggatgatgaggaaatgggtaaaagaaagtgagggccttgtgagttgaaacaaaaataatcaaacctggaacactttccatttattgtattagatatcttcatttcaataaaattaatgtatatgacaaaattttattgtcctcctagttcaagtggtattctacttttatttccataaaaatatactttcaggatagggaaagggtaaacttgcattataagtttgtattttctcacgaagggacaggagagaagaaaaaaatcatttgcttattgtctaggctatgcaaaaaaaaaa

SEQ ID NO: 305823 - DNA, 1890 bp, Homo sapiens
  misc_feature (1)..(2): n is a, c, g, or t
  misc_feature (161)..(161): n is a, c, g, or t
  misc_feature (366)..(366): n is a, c, g, or t
  misc_feature (934)..(934): n is a, c, g, or t
  misc_feature (1150)..(1150): n is a, c, g, or t
  misc_feature (1388)..(1388): n is a, c, g, or t
nnaatgtcaggattgaaaatattaactatatgtttaactttcagtgtttcatacttcccttaagagatgtaccactgaatgcttagaaacctgattttaaataggtatattttttaaaggagacttaagagcgatatcaaaaaatcacattcagcattttnaatgcactatttctaagaatgttttgttgaattatatggtagaagactttttgtattatgaatacccatgggcaaattggaagcataaacttggattttctcatgtttaaatgacttaaagacaagttgtatatttttattcattgttacagatttgtttcctcttcatgataaatttatgtgcaggtctgattgtacagtttanagtttggtctacattttgtttcttcctggctgagcacctctgtgttgagtgctaatagcttttttttttaatctaggttaactactgtgagatagtggggccccaatgaaacatataagcataccttttaaaatgttgccaaatagtcttcagagaacatacttaatacaaaaatgctgtgcagacatcattccgattgatcgactgatggatgactccgcagtttggattagagagagtaagaattagccagccagcatgatttgaaaatgtcacaggagggtgccagcaggatgatgtcagcccttgctttggcctatgcagcatagcacagtcatttcataaagaattgatactatgacacagggtgctggatgtgcattgggcacatctgtaattatagaactgagtttctgaatgagtcaaaacaaggtttagttagttcataatgttcaaaaatagctgtttttaaattagactctgctaatttaaattattgtttaaaaaattagcattttcagtggctgctttatattcctttagagcaatggcctacatgtttaatatngtcattttgaataggcattgctttttattcatgtaaagtctgtatttccctctatcttagtagcctggtaaaaactgaaccctgatttccagtattcagttgtttaaagattagtatattaactctgtatttttaagaaattttcccagtgaaagaattttctgaaaagaatgtcataggaaaatctaggctaatacttctctacacagcactcantatttgttattgctctacagagtaatttaagttatagagtccattgaatcttgtggctgggttggatattacccaaagctgcattcaaaggaagagcagtggtaatatctaaatatatagtttgaactatatatgtggacataacttacaaatattaaaataaaaggagtagtcatatatataaccaaacatttcctctgtactgaggtatattcagtattatactatgtacatttanaaagtaaccctgtaagttacactaatgcaggagtttgtatggaagtattgcatgttcgcaggatttcagaggcactttcttaataatgtgttaatggtgttaatgtctgttttatttattctttggatttttttgttttcatttttgggtttttgttgttgttacataaaataaaactatataaggctatttgtgccctatataaaatagctattttaaagagaattttaaagtgtcatattgtcttatgtgcccatgcatttatatagtggtcagaagtgtgtcttataaatagtaaaatcatgtagtaacgtcccctgtacctgagtttcagtgcagttaaggggcgtaattgcagggtcttttaatacacagtttactatctacaagtacttaccttagcaggcaattgtttttgttttttctttttttaaaaaaaaaagtatggtaaaccttcatactttagttttacaaagtaataataaactgttttgatattaac

SEQ ID NO: 305824 - DNA, 2809 bp, Homo sapiens
  misc_feature (1)..(2): n is a, c, g, or t
  misc_feature (161)..(161): n is a, c, g, or t
  misc_feature (366)..(366): n is a, c, g, or t
  misc_feature (934)..(934): n is a, c, g, or t
  misc_feature (1150)..(1150): n is a, c, g, or t
  misc_feature (1388)..(1388): n is a, c, g, or t
nnaatgtcaggattgaaaatattaactatatgtttaactttcagtgtttcatacttcccttaagagatgtaccactgaatgcttagaaacctgattttaaataggtatattttttaaaggagacttaagagcgatatcaaaaaatcacattcagcattttnaatgcactatttctaagaatgttttgttgaattatatggtagaagactttttgtattatgaatacccatgggcaaattggaagcataaacttggattttctcatgtttaaatgacttaaagacaagttgtatatttttattcattgttacagatttgtttcctcttcatgataaatttatgtgcaggtctgattgtacagtttanagtttggtctacattttgtttcttcctggctgagcacctctgtgttgagtgctaatagcttttttttttaatctaggttaactactgtgagatagtggggccccaatgaaacatataagcataccttttaaaatgttgccaaatagtcttcagagaacatacttaatacaaaaatgctgtgcagacatcattccgattgatcgactgatggatgactccgcagtttggattagagagagtaagaattagccagccagcatgatttgaaaatgtcacaggagggtgccagcaggatgatgtcagcccttgctttggcctatgcagcatagcacagtcatttcataaagaattgatactatgacacagggtgctggatgtgcattgggcacatctgtaattatagaactgagtttctgaatgagtcaaaacaaggtttagttagttcataatgttcaaaaatagctgtttttaaattagactctgctaatttaaattattgtttaaaaaattagcattttcagtggctgctttatattcctttagagcaatggcctacatgtttaatatngtcattttgaataggcattgctttttattcatgtaaagtctgtatttccctctatcttagtagcctggtaaaaactgaaccctgatttccagtattcagttgtttaaagattagtatattaactctgtatttttaagaaattttcccagtgaaagaattttctgaaaagaatgtcataggaaaatctaggctaatacttctctacacagcactcantatttgttattgctctacagagtaatttaagttatagagtccattgaatcttgtggctgggttggatattacccaaagctgcattcaaaggaagagcagtggtaatatctaaatatatagtttgaactatatatgtggacataacttacaaatattaaaataaaaggagtagtcatatatataaccaaacatttcctctgtactgaggtatattcagtattatactatgtacatttanaaagtaaccctgtaagttacactaatgcaggagtttgtatggaagtattgcatgttcgcaggatttcagaggcactttcttaataatgtgttaatggtgttaatgtctgttttatttattctttggatttttttgttttcatttttgggtttttgttgttgttacataaaataaaactatataaggctatttgtgccctatataaaatagctattttaaagagaattttaaagtgtcatattgtcttatgtgcccatgcatttatatagtggtcagaagtgtgtcttataaatagtaaaatcatgtagtaacgtcccctgtacctgagtttcagtgcagttaaggggcgtaattgcagggtcttttaatacacagtttactatctacaagtacttaccttagcaggcaattgtttttgttttttctttttttaaaaaaaaaagtatggtaaaccttcatactttagttttacaaagtaataataaactgttttgatattaacatgttttaatttgtatagcactttatattcaagacattttacacatgtatttctgatttgacacttatttgttaaatgctttattttatctggctcatagtagaagactattacagtgacctgcagaaaaaaatattgactctgggcaactagtgagatttacaactttactattaaataagcttttttattacaactcttttgaaaccaaacatattgagatcatttcctttcgtagggcttaaatatgtatttcccaccttattttcctgttccatctactcatattgttgttaactaaatgttaaccatttaaataagtttcccttctttctctcttaatcagaagagaggggaaccatgctcagatcaaataggaatgtctgtttacacttttgtaatcagtcactttattatgttaattctagttctacctatgttgtaattttaatagaattcttcaagactctccaggtagggtatcattaatactgctaatttaatcctcttaaaatatttgccaggaaaggtatttctacagtttttatcatgtgttccaaccctaagtatctaaatttttattatgaccaaattttattatgaccaataatgatctttccatatttgtgttaatgataaaatattcctgtttgtagcttatacatatatacatattttttctaacctataatgcttttagaagttatcctaaaatccaacttgatattcatatgataaacagaattcagaaattaagaatttttaaaggggctgggtgtggtggctcacgcctgtaatcctagcactttgggaggctgaggtaggtggatcacttgaggccaggagttcaagaccagcctggcaacatggtgaaaccccatcttcactgaaaatacaaaaaattagccaggtatggtgg

SEQ ID NO: 305825 - DNA, 1734 bp, Homo sapiens
gtgccctcgtgctgcctaggagacaagacgcgaggccggcagcgcccacccggtcgcaatggagcttcccctagggcggtgcgatgattcccgcacctgggacgatgactcggacccagagtcagagacagacccagacgcgcaggccaaggcctacgtggcccgcgttctcagtccgccaaaatccgggctggcgttctcgcgcccctcgcagctatccacacccgccgcgtccccgagcgcttcggagcctcgggccgcgtccagggtttcggccgtaagtgagccgggccttctgagccttcccccggagctgctgctcgagatctgctcctacctggacgcccgcctcgtgctccacgtcctgtcgcgggtgtgccacgcgctccgcgacctcgtgtctgaccatgtcacctggaggctacgcgcgctacgccgcgtacgcgcgccctacccagtggtggaagagaagaactttgactggccggcagcctgcattgcgctggagcagcacctgtcccgctgggcagaggatgggcgctgggtcgaatacttctgcctggccgaaggccacgtggcttccgttgactcagtgctgctgctccagggtgggtcactctgtctgtcgggctcccgagatcgcaacgtcaacttgtgggacctgcggcagctggggacggagtccaaccaggttctgatcaagaccttaggcactaagcgaaatagtacccatgagggctgggtgtggtcactggcagcgcaggaccaccgcgtgtgctccggctcctgggacagcacagtgaagctctgggacatggcagcggatgggcagcagttcggcgagataaaggccagctcagccgtgctgtgcctctcctacctgcctgacatcctggtgactggcacctatgacaagaaggtgaccatctacgaccccagagccggcccagccctgttgaagcaccagcaactacactccagacccgtgctgaccctgctggcggatgaccggcacatcatctcaggcagcgaggaccacaccctggtggtggtggaccgccgagccaacagcgtcctgcagcgtctgcagctggactcctacctgctctgcatgtcctaccaggaaccccagctctgggctggtgacaaccagggcctgctgcacgtcttcgccaaccgcaacggctgcttccagcttatccggtcctttgatgtgggccacagctttcccatcactgggatccagtactccgtgggagccttgtacaccacatccactgacaagaccatccgggtgcacgtgcccacagacccaccaaggaccatttgcacccgaaggcatgacaatgggctcaatagggtctgtgctgagggcaacctggtggtggccggctctggagacctgtcgctagaggtctggaggctgcaggcctgagcaggtgggcgtggatgtggatactgcctgccggaggctgggcttcctcctctgttcttgggggaccatccccaatgttggtgctgcctccgccccgtgggcctagggcacaaggagtcccagccacattcgggtgagcgtcctggcctgggccctatgcccgggggaagggtgaaattggggttcaggcccacccagggggccgcttcccactcttgggccctggttttgttatgatttggatgccccgctctcagttgagagcgaaggagaaataaacctgacatgttggtgcttgg

SEQ ID NO: 305826 - DNA, 2200 bp, Homo sapiens
gtgccctcgtgctgcctaggagacaagacgcgaggccggcagcgcccacccggtcgcaatggagcttcccctagggcggtgcgatgattcccgcacctgggacgatgactcggacccagagtcagagacagacccagacgcgcaggccaaggcctacgtggcccgcgttctcagtccgccaaaatccgggctggcgttctcgcgcccctcgcagctatccacacccgccgcgtccccgagcgcttcggagcctcgggccgcgtccagggtttcggccgtaagtgagccgggccttctgagccttcccccggagctgctgctcgagatctgctcctacctggacgcccgcctcgtgctccacgtcctgtcgcgggtgtgccacgcgctccgcgacctcgtgtctgaccatgtcacctggaggctacgcgcgctacgccgcgtacgcgcgccctacccagtggtggaagagaagaactttgactggccggcagcctgcattgcgctggagcagcacctgtcccgctgggcagaggatgggcgctgggtcgaatacttctgcctggccgaaggccacgtggcttccgttgactcagtgctgctgctccagggtgggtcactctgtctgtcgggctcccgagatcgcaacgtcaacttgtgggacctgcggcagctggggacggagtccaaccaggttctgatcaagaccttaggcactaagcgaaatagtacccatgagggctgggtgtggtcactggcagcgcaggaccaccgcgtgtgctccggctcctgggacagcacagtgaagctctgggacatggcagcggatgggcagcagttcggcgagataaaggccagctcagccgtgctgtgcctctcctacctgcctgacatcctggtgactggcacctatgacaagaaggtgaccatctacgaccccagagccggcccagccctgttgaagcaccagcaactacactccagacccgtgctgaccctgctggcggatgaccggcacatcatctcaggcagcgaggaccacaccctggtggtggtggaccgccgagccaacagcgtcctgcagcgtctgcagctggactcctacctgctctgcatgtcctaccaggaaccccagctctgggctggtgacaaccagggcctgctgcacgtcttcgccaaccgcaacggctgcttccagcttatccggtcctttgatgtgggccacagctttcccatcactgggatccagtactccgtgggagccttgtacaccacatccactgacaagaccatccgggtgcacgtgcccacagacccaccaaggaccatttgcacccgaaggcatgacaatgggctcaatagggtctgtgctgagggcaacctggtggtggccggctctggagacctgtcgctagaggtctggaggctgcaggcctgagcaggtgggcgtggatgtggatactgcctgccggaggctgggcttcctcctctgttcttgggggaccatccccaatgttggtgctgcctccgccccgtgggcctagggcacaaggagtcccagccacattcgggtgagcgtcctggcctgggccctatgcccgggggaagggtgaaattggggttcaggcccacccagggggccgcttcccactcttgggccctggttttgttatgatttggatgccccgctctcagttgagagcgaaggagaaataaacctgacatgttggtgcttggaaaaaacacagggacacaacgaagccaaaaaacgaaaacagaaaacaacaaaacgcacgaaacaaagaacgaacaacagaaaacaacacagcacgcaaggggacgggcgccgagaaacacaagaaaagaacccacgcgaggacgcacggaagaggacacgacagcacacccacgacacgccaggagcaagagagggcgaccaccacagccaccgcggccaaacacacagacgacaggactacaagacacgcgcacaggcgcagacaaacacacgcacggacagagaggaggaccggaagaggagaggagcgcgggagcgagagcgcgagagcggggggcgcacccaacacgacaggagagagggcagacaggcgccgggcgcacacagaggacgcgagagcggagctccgcagagagccgaggcgagacacacacgaaaaagcacgaaggaggccaagagcaacga

SEQ ID NO: 305827 - DNA, 2165 bp, Homo sapiens
gtgccctcgtgctgcctaggagacaagacgcgaggccggcagcgcccacccggtcgcaatggagcttcccctagggcggtgcgatgattcccgcacctgggacgatgactcggacccagagtcagagacagacccagacgcgcaggccaaggcctacgtggcccgcgttctcagtccgccaaaatccgggctggcgttctcgcgcccctcgcagctatccacacccgccgcgtccccgagcgcttcggagcctcgggccgcgtccagggtttcggccgtaagtgagccgggccttctgagccttcccccggagctgctgctcgagatctgctcctacctggacgcccgcctcgtgctccacgtcctgtcgcgggtgtgccacgcgctccgcgacctcgtgtctgaccatgtcacctggaggctacgcgcgctacgccgcgtacgcgcgccctacccagtggtggaagagaagaactttgactggccggcagcctgcattgcgctggagcagcacctgtcccgctgggcagaggatgggcgctgggtcgaatacttctgcctggccgaaggccacgtggcttccgttgactcagtgctgctgctccagggtgggtcactctgtctgtcgggctcccgagatcgcaacgtcaacttgtgggacctgcggcagctggggacggagtccaaccaggttctgatcaagaccttaggcactaagcgaaatagtacccatgagggctgggtgtggtcactggcagcgcaggaccaccgcgtgtgctccggctcctgggacagcacagtgaagctctgggacatggcagcggatgggcagcagttcggcgagataaaggccagctcagccgtgctgtgcctctcctacctgcctgacatcctggtgactggcacctatgacaagaaggtgaccatctacgaccccagagccggcccagccctgttgaagcaccagcaactacactccagacccgtgctgaccctgctggcggatgaccggcacatcatctcaggcagcgaggaccacaccctggtggtggtggaccgccgagccaacagcgtcctgcagcgtctgcagctggactcctacctgctctgcatgtcctaccaggaaccccagctctgggctggtgacaaccagggcctgctgcacgtcttcgccaaccgcaacggctgcttccagcttatccggtcctttgatgtgggccacagctttcccatcactgggatccagtactccgtgggagccttgtacaccacatccactgacaagaccatccgggtgcacgtgcccacagacccaccaaggaccatttgcacccgaaggcatgacaatgggctcaatagggtctgtgctgagggcaacctggtggtggccggctctggagacctgtcgctagaggtctggaggctgcaggcctgagcaggtgggcgtggatgtggatactgcctgccggaggctgggcttcctcctctgttcttgggggaccatccccaatgttggtgctgcctccgccccgtgggcctagggcacaaggagtcccagccacattcgggtgagcgtcctggcctgggccctatgcccgggggaagggtgaaattggggttcaggcccacccagggggccgcttcccactcttgggccctggttttgttatgatttggatgccccgctctcagttgagagcgaaggagaaataaacctgacatgttggtgcttggaaaaacaaaaaacagctcaagaacgaaaaaccactatacagaacgcgaccaccaaacaagacaagaaacaccacaacaccaccacagcacacacagagaggggcgcgagccgagagagaagaagagaaagaaagagaggcgagggacaagagtaggaggcgcgacagaagaggacataggacacacaggggcgggcagtaacggcgaggcgccacgaaagacgagacgagccgagaggaggagcgggaggccagagtccagcagaacaagagaagggatggagggagagagcagaagaggagagggatgggcgatgagcggaggcagagaacgagacgagccgtctgtgtgcgaggactcgagacacatgacggtggggcagtgcacagactgaacgcgacgaaagacaggacgagagacgcgaggagaac

SEQ ID NO: 305828 - DNA, 1864 bp, Homo sapiens
gtgccctcgtgctgcctaggagacaagacgcgaggccggcagcgcccacccggtcgcaatggagcttcccctagggcggtgcgatgattcccgcacctgggacgatgactcggacccagagtcagagacagacccagacgcgcaggccaaggcctacgtggcccgcgttctcagtccgccaaaatccgggctggcgttctcgcgcccctcgcagctatccacacccgccgcgtccccgagcgcttcggagcctcgggccgcgtccagggtttcggccgtaagtgagccgggccttctgagccttcccccggagctgctgctcgagatctgctcctacctggacgcccgcctcgtgctccacgtcctgtcgcgggtgtgccacgcgctccgcgacctcgtgtctgaccatgtcacctggaggctacgcgcgctacgccgcgtacgcgcgccctacccagtggtggaagagaagaactttgactggccggcagcctgcattgcgctggagcagcacctgtcccgctgggcagaggatgggcgctgggtcgaatacttctgcctggccgaaggccacgtggcttccgttgactcagtgctgctgctccagggtgggtcactctgtctgtcgggctcccgagatcgcaacgtcaacttgtgggacctgcggcagctggggacggagtccaaccaggttctgatcaagaccttaggcactaagcgaaatagtacccatgagggctgggtgtggtcactggcagcgcaggaccaccgcgtgtgctccggctcctgggacagcacagtgaagctctgggacatggcagcggatgggcagcagttcggcgagataaaggccagctcagccgtgctgtgcctctcctacctgcctgacatcctggtgactggcacctatgacaagaaggtgaccatctacgaccccagagccggcccagccctgttgaagcaccagcaactacactccagacccgtgctgaccctgctggcggatgaccggcacatcatctcaggcagcgaggaccacaccctggtggtggtggaccgccgagccaacagcgtcctgcagcgtctgcagctggactcctacctgctctgcatgtcctaccaggaaccccagctctgggctggtgacaaccagggcctgctgcacgtcttcgccaaccgcaacggctgcttccagcttatccgggtctgctggagctcctgcccctgactgtccctccccccgggcttccttcctacccgagcccctggtggtgtgggggagggcgggccttgggagagcctcgactgagtgttgcctgatcctcctcctgcagtcctttgatgtgggccacagctttcccatcactgggatccagtactccgtgggagccttgtacaccacatccactgacaagaccatccgggtgcacgtgcccacagacccaccaaggaccatttgcacccgaaggcatgacaatgggctcaatagggtctgtgctgagggcaacctggtggtggccggctctggagacctgtcgctagaggtctggaggctgcaggcctgagcaggtgggcgtggatgtggatactgcctgccggaggctgggcttcctcctctgttcttgggggaccatccccaatgttggtgctgcctccgccccgtgggcctagggcacaaggagtcccagccacattcgggtgagcgtcctggcctgggccctatgcccgggggaagggtgaaattggggttcaggcccacccagggggccgcttcccactcttgggccctggttttgttatgatttggatgccccgctctcagttgagagcgaaggagaaataaacctgacatgttggtgcttgg

SEQ ID NO: 305829 - DNA, 1976 bp, Homo sapiens
gtgccctcgtgctgcctaggagacaagacgcgaggccggcagcgcccacccggtcgcaatggagcttcccctagggcggtgcgatgattcccgcacctgggacgatgactcggacccagagtcagagacagacccagacgcgcaggccaaggcctacgtggcccgcgttctcagtccgccaaaatccgggctggcgttctcgcgcccctcgcagctatccacacccgccgcgtccccgagcgcttcggagcctcgggccgcgtccagggtttcggccgtaagtgagccgggccttctgagccttcccccggagctgctgctcgagatctgctcctacctggacgcccgcctcgtgctccacgtcctgtcgcgggtgtgccacgcgctccgcgacctcgtgtctgaccatgtcacctggaggctacgcgcgctacgccgcgtacgcgcgccctacccagtggtggaagagaagaactttgactggccggcagcctgcattgcgctggagcagcacctgtcccgctgggcagaggatgggcgctgggtcgaatacttctgcctggccgaaggccacgtggcttccgttgactcagtgctgctgctccagggtgggtcactctgtctgtcgggctcccgagatcgcaacgtcaacttgtgggacctgcggcagctggggacggagtccaaccaggttctgatcaagaccttaggcactaagcgaaatagtacccatgagggctgggtgtggtcactggcagcgcaggaccaccgcgtgtgctccggctcctgggacagcacagtgaagctctgggacatggcagcggatgggcagcagttcggcgagataaaggccagctcagccgtgctgtgcctctcctacctgcctgacatcctggtgactggcacctatgacaagaaggtgaccatctacgaccccagagccggcccagccctgttgaagcaccagcaactacactccagacccgtgctgaccctgctggcggatgaccggcacatcatctcaggcagcgaggaccacaccctggtggtggtggaccgccgagccaacagcgtcctgcagcgtctgcagctggactcctacctgctctgcatgtcctaccaggaaccccagctctgggctggtgacaaccagggcctgctgcacgtcttcgccaaccgcaacggctgcttccagcttatccggtcctttgatgtgggccacagctttcccatcactgggatccagtactccgtgggagccttgtacaccacatccactgacaagaccatccgggtgcacgtgcccacagacccaccaaggaccatttgcacccgaaggcatgacaatgggctcaatagggtctgtgctgagggcaacctggtggtggccggctctggagacctgtcgctagaggtctggaggctgcaggcctgagcaggtgggcgtggatgtggatactgcctgccggaggctgggcttcctcctctgttcttgggggaccatccccaatgttggtgctgcctccgccccgtgggcctagggcacaaggagtcccagccacattcgggtgagcggagttggtggcggccgggatgcccacaaggaaggggtcattcttggcctgctccgtgcagaacttcagcagatcggcggccatctttggacacctgcagaccaactggttcagccagaccagacccaggcatgcacctgtcccctggcccatgtgttcccacctcttcccgcctcctgcactggccccgaccctcaccttcacttggtcgatgcctgcctccatctggagctgctccactgcccagagggcctgcccaatgtcactgttgatggccaccttgctggacatctgggtaaagtgggcaggccgtgggcagcaggcccaacctcagtcccctagggggagcctagggctgcccgagggttcccacacctccttctatgttccttgggggctgca

SEQ ID NO: 305830 - DNA, 1696 bp, Homo sapiens
gtgccctcgtgctgcctaggagacaagacgcgaggccggcagcgcccacccggtcgcaatggagcttcccctagggcggtgcgatgattcccgcacctgggacgatgactcggacccagagtcagagacagacccagacgcgcaggccaaggcctacgtggcccgcgttctcagtccgccaaaatccgggctggcgttctcgcgcccctcgcagctatccacacccgccgcgtccccgagcgcttcggagcctcgggccgcgtccagggtttcggccgtaagtgagccgggccttctgagccttcccccggagctgctgctcgagatctgctcctacctggacgcccgcctcgtgctccacgtcctgtcgcgggtgtgccacgcgctccgcgacctcgtgtctgaccatgtcacctggaggctacgcgcgctacgccgcgtacgcgcgccctacccagtggtggaagagaagaactttgactggccggcagcctgcattgcgctggagcagcacctgtcccgctgggcagaggatgggcgctgggtcgaatacttctgcctggccgaaggccacgtggcttccgttgactcagtgctgctgctccagggtgggtcactctgtctgtcgggctcccgagatcgcaacgtcaacttgtgggacctgcggcagctggggacggagtccaaccaggttctgatcaagaccttaggcactaagcgaaatagtacccatgagggctgggtgtggtcactggcagcgcaggaccaccgcgtgtgctccggctcctgggacagcacagtgaagctctgggacatggcagcggatgggcagcagttcggcgagataaaggccagctcagccgtgctgtgcctctcctacctgcctgacatcctggtgactggcacctatgacaagaaggtgaccatctacgaccccagagccggcccagccctgttgaagcaccagcaactacactccagacccgtgctgaccctgctggcggatgaccggcacatcatctcaggcagcgaggaccacaccctggtggtggtggaccgccgagccaacagcgtcctgcagcgtctgcagctggactcctacctgctctgcatgtcctaccaggaaccccagctctgggctggtgacaaccagggcctgctgcacgtcttcgccaaccgcaacggctgcttccagcttatccggtcctttgatgtgggccacagctttcccatcactgggatccagtactccgtgggagccttgtacaccacatccactgacaagaccatccgggtgcacgtgcccacagacccaccaaggaccatttgcacccgaaggcatgacaatgggctcaatagggtctgtgctgagggcaacctggtggtggccggctctggagacctgtcgctagaggtctggaggctgcaggcctgagcaggtgggcgtggatgtggatactgcctgccggaggctgggcttcctcctctgttcttgggggaccatccccaatgttggtgctgcctccgccccgtgggctcctggcctgggccctatgcccgggggaagggtgaaattggggttcaggcccacccagggggccgcttcccactcttgggccctggttttgttatgatttggatgccccgctctcagttgagagcgaaggagaaataaacctgacatgttggtgcttgg

SEQ ID NO: 305831 - DNA, 1761 bp, Homo sapiens
caagataggtcaggtatgaggctggtgtgtaatcggagagggctgctagagatagagcgaggccggcagcgcccacccggtcgcaatggagcttcccctagggcggtgcgatgattcccgcacctgggacgatgactcggacccagagtcagagacagacccagacgcgcaggccaaggcctacgtggcccgcgttctcagtccgccaaaatccgggctggcgttctcgcgcccctcgcagctatccacacccgccgcgtccccgagcgcttcggagcctcgggccgcgtccagggtttcggccgtaagtgagccgggccttctgagccttcccccggagctgctgctcgagatctgctcctacctggacgcccgcctcgtgctccacgtcctgtcgcgggtgtgccacgcgctccgcgacctcgtgtctgaccatgtcacctggaggctacgcgcgctacgccgcgtacgcgcgccctacccagtggtggaagagaagaactttgactggccggcagcctgcattgcgctggagcagcacctgtcccgctgggcagaggatgggcgctgggtcgaatacttctgcctggccgaaggccacgtggcttccgttgactcagtgctgctgctccagggtgggtcactctgtctgtcgggctcccgagatcgcaacgtcaacttgtgggacctgcggcagctggggacggagtccaaccaggttctgatcaagaccttaggcactaagcgaaatagtacccatgagggctgggtgtggtcactggcagcgcaggaccaccgcgtgtgctccggctcctgggacagcacagtgaagctctgggacatggcagcggatgggcagcagttcggcgagataaaggccagctcagccgtgctgtgcctctcctacctgcctgacatcctggtgactggcacctatgacaagaaggtgaccatctacgaccccagagccggcccagccctgttgaagcaccagcaactacactccagacccgtgctgaccctgctggcggatgaccggcacatcatctcaggcagcgaggaccacaccctggtggtggtggaccgccgagccaacagcgtcctgcagcgtctgcagctggactcctacctgctctgcatgtcctaccaggaaccccagctctgggctggtgacaaccagggcctgctgcacgtcttcgccaaccgcaacggctgcttccagcttatccggtcctttgatgtgggccacagctttcccatcactgggatccagtactccgtgggagccttgtacaccacatccactgacaagaccatccgggtgcacgtgcccacagacccaccaaggaccatttgcacccgaaggcatgacaatgggctcaatagggtctgtgctgagggcaacctggtggtggccggctctggagacctgtcgctagaggtctggaggctgcaggcctgagcaggtgggcgtggatgtggatactgcctgccggaggctgggcttcctcctctgttcttgggggaccatccccaatgttggtgctgcctccgccccgtgggcctagggcacaaggagtcccagccacattcgggtgagcgtcctggcctgggccctatgcccgggggaagggtgaaattggggttcaggcccacccagggggccgcttcccactcttgggccctggttttgttatgatttggatgccccgctctcagttgagagcgaaggagaaataaacctgacatgttggtgcttgg

SEQ ID NO: 305832 - DNA, 1594 bp, Homo sapiens
gtgccctcgtgctgcctaggagacaagacgcgaggccggcagcgcccacccggtcgcaatggagcttcccctagggcggtgcgatgattcccgcacctgggacgatgactcggacccagagtcagagacagacccagacgcgcaggccaaggcctacgtggcccgcgttctcagtccgccaaaatccgggctggcgttctcgcgcccctcgcagctatccacacccgccgcgtccccgagcgcttcggagcctcgggccgcgtccagggtttcggccgtaagtgagccgggccttctgagccttcccccggagctgctgctcgagatctgctcctacctggacgcccgcctcgtgctccacgtcctgtcgcgggtgtgccacgcgctccgcgacctcgtgtctgaccatgtcacctggaggctacgcgcgctacgccgcgtacgcgcgccctacccagtggtggaagggtgggtcactctgtctgtcgggctcccgagatcgcaacgtcaacttgtgggacctgcggcagctggggacggagtccaaccaggttctgatcaagaccttaggcactaagcgaaatagtacccatgagggctgggtgtggtcactggcagcgcaggaccaccgcgtgtgctccggctcctgggacagcacagtgaagctctgggacatggcagcggatgggcagcagttcggcgagataaaggccagctcagccgtgctgtgcctctcctacctgcctgacatcctggtgactggcacctatgacaagaaggtgaccatctacgaccccagagccggcccagccctgttgaagcaccagcaactacactccagacccgtgctgaccctgctggcggatgaccggcacatcatctcaggcagcgaggaccacaccctggtggtggtggaccgccgagccaacagcgtcctgcagcgtctgcagctggactcctacctgctctgcatgtcctaccaggaaccccagctctgggctggtgacaaccagggcctgctgcacgtcttcgccaaccgcaacggctgcttccagcttatccggtcctttgatgtgggccacagctttcccatcactgggatccagtactccgtgggagccttgtacaccacatccactgacaagaccatccgggtgcacgtgcccacagacccaccaaggaccatttgcacccgaaggcatgacaatgggctcaatagggtctgtgctgagggcaacctggtggtggccggctctggagacctgtcgctagaggtctggaggctgcaggcctgagcaggtgggcgtggatgtggatactgcctgccggaggctgggcttcctcctctgttcttgggggaccatccccaatgttggtgctgcctccgccccgtgggcctagggcacaaggagtcccagccacattcgggtgagcgtcctggcctgggccctatgcccgggggaagggtgaaattggggttcaggcccacccagggggccgcttcccactcttgggccctggttttgttatgatttggatgccccgctctcagttgagagcgaaggagaaataaacctgacatgttggtgcttgg

SEQ ID NO: 305833 - DNA, 1053 bp, Homo sapiens
  misc_feature (13)..(13): n is a, c, g, or t
cgcgctggacganccaccagtttgtcaggccttagcactaacgaatagaccttgaggctgggtgtggtcactggcagcgcaggaccaccgcgtgtgctccggctcctgggacagcacagtgaagctctgggacatggcagcggatgggcagcagttcggcgagataaaggccagctcagccgtgctgtgcctctcctacctgcctgacatcctggtgactggcacctatgacaagaaggtgaccatctacgaccccagagccggcccagccctgttgaagcaccagcaactacactccagacccgtgctgaccctgctggcggatgaccggcacatcatctcaggcagcgaggaccacaccctggtggtggtggaccgccgagccaacagcgtcctgcagcgtctgcagctggactcctacctgctctgcatgtcctaccaggaaccccagctctgggctggtgacaaccagggcctgctgcacgtcttcgccaaccgcaacggctgcttccagcttatccggtcctttgatgtgggccacagctttcccatcactgggatccagtactccgtgggagccttgtacaccacatccactgacaagaccatccgggtgcacgtgcccacagacccaccaaggaccatttgcacccgaaggcatgacaatgggctcaatagggtctgtgctgagggcaacctggtggtggccggctctggagacctgtcgctagaggtctggaggctgcaggcctgagcaggtgggcgtggatgtggatactgcctgccggaggctgggcttcctcctctgttcttgggggaccatccccaatgttggtgctgcctccgccccgtgggcctagggcacaaggagtcccagccacattcgggtgagcgtcctggcctgggccctatgcccgggggaagggtgaaattggggttcaggcccacccagggggccgcttcccactcttgggccctggttttgttatgatttggatgccccgctctcagttgagagcgaaggagaaataaacctgacatgttggtgcttgg

SEQ ID NO: 305834 - DNA, 237 bp, Homo sapiens
ggtctcccatctcagcccagctcagccatgccctgagaagtattcacttcatgtttattgaggccccctggtttgcccaggccacagggtggcattgccctgggttcataggatggcatagggcttcttctccttgaaggagttggtggcggccgggatgcccacaaggaaggggtcattcttggcctgctccgtgcagaacttcagcagatcggcggccatctttggacacctgca

SEQ ID NO: 305835 - DNA, 704 bp, Homo sapiens
agatgaaaagttttaggcagctaggaatgtggagatgtgggtagtggtggctgccaagcacaggaaaatgatcatgctgaactgtacaaaggagattgtctctgaaccttttcataggttctgacactctatatatgtcatcttatttaaaaccctctgtattaaaatgataaggatttggagacattgaaattatatagaatttaaatgtatgcatgttcatatgtttttgcctctggctcatatttccagaatacttaacagtattttaacattttgtttcttatgattctggtcctaaaaaatcaaggacgctgcttactcagaaagctaaaaaacctgagctccagacccagttcctggacctgccctggaaaagaagtatcccgtagagatgagctcactgcagttacttaattaacaatttgtaagctgcaaaaatggcaatgggccaaccaagaacagctacaatttgaatttttctatttccagaaaatgcttggacagaagagatgagtactatttccactaaggcctagaattgcctactgtacaaatagtcctgatcaggcaatatacgaatggcccaaggaagccaccaaattgattttcaggttttacatgacctgcgacaaaaattccctgaagtacctgaagttgttgtatccaggtgcatgttacaggtcagtgttcaatgatttctg

SEQ ID NO: 305836 - DNA, 4188 bp, Homo sapiens
cgacgagttcgagtttgagaccgtgctggtgcaacatatggagactccgtctctacagaaggtcttgaacatatatacagcgctggtggcacacacctgtagtcccagttactcagtagactgagaaaatgcttggacagaagagatgagtactatttccactaaggcctagaattgcctactgtacaaatagtcctgatcaggcaatatacgaatggcccaaggaagccaccaaattgattttcaggttttacatgacctgcgacaaaaattccctgaagtacctgaagttgttgtatccaggtgcatgttacagaataataataacctggatgcctgctgtgctgttctctctcaggagagtacaagatatctttatggtgaaggagacttgaatttttcagatgattctggaatttctggtctacgcaatcacatgacttctctcaacttggacttgcaatcacagaacatttaccaccatggaagagaaggaagtaggatgaatggaagtaggactctaacgcacagcattagtgatggacaacttcaaggtggccagtccaatagtgaactatttcagcaggagccacagacagcaccagctcaagttcctcaaggctttaatgtttttggaatgtccagttcctctggtgcttcaaattcagcaccacatcttggatttcacttaggcagcaaaggaacatctagcctttctcaacaaactcccagatttaatcccattatggtaactttagccccaaatatccagactggtcgtaatactcctacatctttgcacatacatggtgtacctccacctgtacttaacagtccacagggaaattctatctatattaggccttacattacaactcctggtggtacaactcgacagacacaacagcattctggctgggtatctcagtttaatcccatgaaccctcagcaagtttatcagccttcacagcctggtccctggactacttgtcctgcatctaatcctctgtcacatacctcatctcaacagccaaatcagcaaggccaccagacctctcatgtctacatgccaatcagttcacctactacttcacaaccaccaaccattcattcatctggtagctcacagtcttctgcccatagccaatataacattcagaatatttcaacaggacctcgaaaaaaccagattgaaatcaaacttgaacccccacaaagaaataattcttcaaaactgcgttcttctggacctcgaacctccagcacttcctcttcagtcaatagccagaccttaaacagaaatcagcccactgtttacatagctgccagccccccaaatacggatgagctgatgtcccgtagtcaacctaaggtctatatttcagcgaatgctgccacaggagatgaacaggtcatgcggaatcagcccacactcttcatatccacaaactctggagcatctgctgcctccaggaacatgtctgggcaagtgagcatgggtcctgcctttattcatcaccatcctcccaaaagtcgagcaataggcaataactctgcaacctctcctcgagtggtagtcactcagcccaatacgaaatacactttcaaaattacagtctctcccaataagccccctgcagtttcaccaggggtggtgtcccctacctttgaacttacaaatcttcttaatcatcctgatcattatgtagaaaccgagaatattcagcacctcacggaccctacattagcacatgtggatagaataagtgaaacacggaaactgagtatgggatctgatgatgctgcctacacacaagctcttttggtacaccagaaggccagaatggaacgacttcaaagagaacttgagattcaaaagaaaaagctggataaattaaaatctgaggttaatgaaatggaaaataatctaactcgaaggcgcctgaaaagatcaaattctatatcccagataccttcccttgaagaaatgcagcagctgagaagttgtaatagacaactccagattgacattgactgcttaaccaaagaaattgatctttttcaagcccgaggaccacattttaaccccagcgctattcataacttttatgacaatattggatttgtaggtcctgtgccaccaaaacccaaagatcaaaggtccatcatcaaaacaccaaagactcaagacacagaagatgatgagggagctcagtggaattgtaccgcctgtacttttttgaaccatccagccttaattcgctgtgaacagtgtgagatgccaaggcatttctgagccaaatggccctgtatcttctctaaaaccacatctaaagttcaagaaactagtctgtcatcgggaaaaagtttcactgctacataggattttgtcaaattgaaggtgtgacaagatggtgttctgctaatgttaaatgtcagcccacagagctaataatacctcagtataatgtcatgagcagttgaaattcatcacatgaaaagtaatctgctgaaagacttggttgcccactgcctaactgtgtacagtgttaccagtgtcccattatggataattctcaatatgttaacacctaggtgttcccaatacctttttcccctcatgtcactactgaattttgacaggaggaaggaatagaatgatagcttgttttatttgtaaagctttcagtgaaacactacatacacgaagaaaaggaacaaggtttaactatttaagaaccatttgctgccgcatagtgccattggatagggaagaacttcagaaatctgtggtactcttggccttgtctttgtcttccctgaacgtgtctccactctgtgaagccagcatctaggggctaaagatgcaaaggaaagcagcatgcattgtctgtacaaatgtgcagcgaaataccccaaagcttttcctactgtacagatctctcgagtctgctttaagtgatttcttttcttcttgattattttcttatatttctatatgtatagtgtaatagccttttgttaactaattttcttttttccttttagtaattaagcacgatcatgtccctttttaagccttacctgagaggaacaatgccttaaaataaaaaagcattaatgagatgaaagtatgcacagaataactttcctctacttattctgtactttgccctcatgagttccaatgttgtgtgaagacaggcagatgctgcacagtgaattgcagatgatattacagaagtgatgtctgtaggtcacattaaatactgacttgagcagtgggtgacacaacacagtgtttgtcttccacagggaagcttaaaacaaaagatatttttaacccactgacagaacaacaaggttaagcttcatctgcttggtgtcccacagaacttgcacaagcagttgttattgggaaagtacagtctcaaaaccagcaacagcagcagtacctacagccctttttttggagagaagtttaaatgctttactgttggggcagtccatttctaatcctgacttggtgacagtatcatgtgtatttataaaacaaggctagccatatttaggacaactgaagaaaagctggaaaaaaaaacaagcaaacttgaacactgaagcaacctcaagcatctctttattttgatgatatatttttgtaaggaaaatattcagatgatcaggaatgtatataactgaaatcaagaaaaagaacagtatgcatttaaaaagacagaattatgaaattatatgagtgcttagaatggggctaagggaagtgctgaaatagagcaaaggatggaagataatatagactaccacccactgtaaatgtttgcaagtggctgtgttttaaatgggattattacagttgatctctatgaatgtcagagccctaactttcaggctttgcattttgtatatgggaagaaatatgacaatcctaggtaattaaaccatagacccaaagcccttacgtttgatgcaatttatttttaaaataggccttgtttttcagcttcatctgcagttctatgtgaagattgataaatcagtttttacttgttttattaataaaacgtaatttggatatcttgagttgatggttttgtgatttagctgggtaaactatctttgtaacagataagttatttataaaaattaaaaaacttatattctaatgtg

SEQ ID NO: 305837 - DNA, 4143 bp, Homo sapiens
  misc_feature (38)..(39): n is a, c, g, or t
  misc_feature (41)..(41): n is a, c, g, or t
  misc_feature (47)..(49): n is a, c, g, or t
aacgggtgatgcggttgccctagagggagaggcggcgnngncggccnnngaggaggagggggaagcggcggcggcaaaggaaaatgcttggacagaagagatgagtactatttccactaaggcctagaattgcctactgtacaaatagtcctgatcaggcaatatacgaatggcccaaggaagccaccaaattgattttcaggttttacatgacctgcgacaaaaattccctgaagtacctgaagttgttgtatccaggtgcatgttacagaataataataacctggatgcctgctgtgctgttctctctcaggagagtacaagatatctttatggtgaaggagacttgaatttttcagatgattctggaatttctggtctacgcaatcacatgacttctctcaacttggacttgcaatcacagaacatttaccaccatggaagagaaggaagtaggatgaatggaagtaggactctaacgcacagcattagtgatggacaacttcaaggtggccagtccaatagtgaactatttcagcaggagccacagacagcaccagctcaagttcctcaaggctttaatgtttttggaatgtccagttcctctggtgcttcaaattcagcaccacatcttggatttcacttaggcagcaaaggaacatctagcctttctcaacaaactcccagatttaatcccattatggtaactttagccccaaatatccagactggtcgtaatactcctacatctttgcacatacatggtgtacctccacctgtacttaacagtccacagggaaattctatctatattaggccttacattacaactcctggtggtacaactcgacagacacaacagcattctggctgggtatctcagtttaatcccatgaaccctcagcaagtttatcagccttcacagcctggtccctggactacttgtcctgcatctaatcctctgtcacatacctcatctcaacagccaaatcagcaaggccaccagacctctcatgtctacatgccaatcagttcacctactacttcacaaccaccaaccattcattcatctggtagctcacagtcttctgcccatagccaatataacattcagaatatttcaacaggacctcgaaaaaaccagattgaaatcaaacttgaacccccacaaagaaataattcttcaaaactgcgttcttctggacctcgaacctccagcacttcctcttcagtcaatagccagaccttaaacagaaatcagcccactgtttacatagctgccagccccccaaatacggatgagctgatgtcccgtagtcaacctaaggtctatatttcagcgaatgctgccacaggagatgaacaggtcatgcggaatcagcccacactcttcatatccacaaactctggagcatctgctgcctccaggaacatgtctgggcaagtgagcatgggtcctgcctttattcatcaccatcctcccaaaagtcgagcaataggcaataactctgcaacctctcctcgagtggtagtcactcagcccaatacgaaatacactttcaaaattacagtctctcccaataagccccctgcagtttcaccaggggtggtgtcccctacctttgaacttacaaatcttcttaatcatcctgatcattatgtagaaaccgagaatattcagcacctcacggaccctacattagcacatgtggatagaataagtgaaacacggaaactgagtatgggatctgatgatgctgcctacacacaagctcttttggtacaccagaaggccagaatggaacgacttcaaagagaacttgagattcaaaagaaaaagctggataaattaaaatctgaggttaatgaaatggaaaataatctaactcgaaggcgcctgaaaagatcaaattctatatcccagataccttcccttgaagaaatgcagcagctgagaagttgtaatagacaactccagattgacattgactgcttaaccaaagaaattgatctttttcaagcccgaggaccacattttaaccccagcgctattcataacttttatgacaatattggatttgtaggtcctgtgccaccaaaacccaaagatcaaaggtccatcatcaaaacaccaaagactcaagacacagaagatgatgagggagctcagtggaattgtaccgcctgtacttttttgaaccatccagccttaattcgctgtgaacagtgtgagatgccaaggcatttctgagccaaatggccctgtatcttctctaaaaccacatctaaagttcaagaaactagtctgtcatcgggaaaaagtttcactgctacataggattttgtcaaattgaaggtgtgacaagatggtgttctgctaatgttaaatgtcagcccacagagctaataatacctcagtataatgtcatgagcagttgaaattcatcacatgaaaagtaatctgctgaaagacttggttgcccactgcctaactgtgtacagtgttaccagtgtcccattatggataattctcaatatgttaacacctaggtgttcccaatacctttttcccctcatgtcactactgaattttgacaggaggaaggaatagaatgatagcttgttttatttgtaaagctttcagtgaaacactacatacacgaagaaaaggaacaaggtttaactatttaagaaccatttgctgccgcatagtgccattggatagggaagaacttcagaaatctgtggtactcttggccttgtctttgtcttccctgaacgtgtctccactctgtgaagccagcatctaggggctaaagatgcaaaggaaagcagcatgcattgtctgtacaaatgtgcagcgaaataccccaaagcttttcctactgtacagatctctcgagtctgctttaagtgatttcttttcttcttgattattttcttatatttctatatgtatagtgtaatagccttttgttaactaattttcttttttccttttagtaattaagcacgatcatgtccctttttaagccttacctgagaggaacaatgccttaaaataaaaaagcattaatgagatgaaagtatgcacagaataactttcctctacttattctgtactttgccctcatgagttccaatgttgtgtgaagacaggcagatgctgcacagtgaattgcagatgatattacagaagtgatgtctgtaggtcacattaaatactgacttgagcagtgggtgacacaacacagtgtttgtcttccacagggaagcttaaaacaaaagatatttttaacccactgacagaacaacaaggttaagcttcatctgcttggtgtcccacagaacttgcacaagcagttgttattgggaaagtacagtctcaaaaccagcaacagcagcagtacctacagccctttttttggagagaagtttaaatgctttactgttggggcagtccatttctaatcctgacttggtgacagtatcatgtgtatttataaaacaaggctagccatatttaggacaactgaagaaaagctggaaaaaaaaacaagcaaacttgaacactgaagcaacctcaagcatctctttattttgatgatatatttttgtaaggaaaatattcagatgatcaggaatgtatataactgaaatcaagaaaaagaacagtatgcatttaaaaagacagaattatgaaattatatgagtgcttagaatggggctaagggaagtgctgaaatagagcaaaggatggaagataatatagactaccacccactgtaaatgtttgcaagtggctgtgttttaaatgggattattacagttgatctctatgaatgtcagagccctaactttcaggctttgcattttgtatatgggaagaaatatgacaatcctaggtaattaaaccatagacccaaagcccttacgtttgatgcaatttatttttaaaataggccttgtttttcagcttcatctgcagttctatgtgaagattgataaatcagtttttacttgttttattaataaaacgtaatttggatatcttgagttgatggttttgtgatttagctgggtaaactatctttgtaacagataagttatttataaaaattaaaaaacttatattctaatgtg

SEQ ID NO: 305838 - DNA, 4126 bp, Homo sapiens
  misc_feature (30)..(31): n is a, c, g, or t
  misc_feature (38)..(38): n is a, c, g, or t
ctagagtatccccaactacagcagcaaccnngaacagntaaatttgaatttttctatttccagaaaatgcttggacagaagagatgagtactatttccactaaggcctagaattgcctactgtacaaatagtcctgatcaggcaatatacgaatggcccaaggaagccaccaaattgattttcaggttttacatgacctgcgacaaaaattccctgaagtacctgaagttgttgtatccaggtgcatgttacagaataataataacctggatgcctgctgtgctgttctctctcaggagagtacaagatatctttatggtgaaggagacttgaatttttcagatgattctggaatttctggtctacgcaatcacatgacttctctcaacttggacttgcaatcacagaacatttaccaccatggaagagaaggaagtaggatgaatggaagtaggactctaacgcacagcattagtgatggacaacttcaaggtggccagtccaatagtgaactatttcagcaggagccacagacagcaccagctcaagttcctcaaggctttaatgtttttggaatgtccagttcctctggtgcttcaaattcagcaccacatcttggatttcacttaggcagcaaaggaacatctagcctttctcaacaaactcccagatttaatcccattatggtaactttagccccaaatatccagactggtcgtaatactcctacatctttgcacatacatggtgtacctccacctgtacttaacagtccacagggaaattctatctatattaggccttacattacaactcctggtggtacaactcgacagacacaacagcattctggctgggtatctcagtttaatcccatgaaccctcagcaagtttatcagccttcacagcctggtccctggactacttgtcctgcatctaatcctctgtcacatacctcatctcaacagccaaatcagcaaggccaccagacctctcatgtctacatgccaatcagttcacctactacttcacaaccaccaaccattcattcatctggtagctcacagtcttctgcccatagccaatataacattcagaatatttcaacaggacctcgaaaaaaccagattgaaatcaaacttgaacccccacaaagaaataattcttcaaaactgcgttcttctggacctcgaacctccagcacttcctcttcagtcaatagccagaccttaaacagaaatcagcccactgtttacatagctgccagccccccaaatacggatgagctgatgtcccgtagtcaacctaaggtctatatttcagcgaatgctgccacaggagatgaacaggtcatgcggaatcagcccacactcttcatatccacaaactctggagcatctgctgcctccaggaacatgtctgggcaagtgagcatgggtcctgcctttattcatcaccatcctcccaaaagtcgagcaataggcaataactctgcaacctctcctcgagtggtagtcactcagcccaatacgaaatacactttcaaaattacagtctctcccaataagccccctgcagtttcaccaggggtggtgtcccctacctttgaacttacaaatcttcttaatcatcctgatcattatgtagaaaccgagaatattcagcacctcacggaccctacattagcacatgtggatagaataagtgaaacacggaaactgagtatgggatctgatgatgctgcctacacacaagctcttttggtacaccagaaggccagaatggaacgacttcaaagagaacttgagattcaaaagaaaaagctggataaattaaaatctgaggttaatgaaatggaaaataatctaactcgaaggcgcctgaaaagatcaaattctatatcccagataccttcccttgaagaaatgcagcagctgagaagttgtaatagacaactccagattgacattgactgcttaaccaaagaaattgatctttttcaagcccgaggaccacattttaaccccagcgctattcataacttttatgacaatattggatttgtaggtcctgtgccaccaaaacccaaagatcaaaggtccatcatcaaaacaccaaagactcaagacacagaagatgatgagggagctcagtggaattgtaccgcctgtacttttttgaaccatccagccttaattcgctgtgaacagtgtgagatgccaaggcatttctgagccaaatggccctgtatcttctctaaaaccacatctaaagttcaagaaactagtctgtcatcgggaaaaagtttcactgctacataggattttgtcaaattgaaggtgtgacaagatggtgttctgctaatgttaaatgtcagcccacagagctaataatacctcagtataatgtcatgagcagttgaaattcatcacatgaaaagtaatctgctgaaagacttggttgcccactgcctaactgtgtacagtgttaccagtgtcccattatggataattctcaatatgttaacacctaggtgttcccaatacctttttcccctcatgtcactactgaattttgacaggaggaaggaatagaatgatagcttgttttatttgtaaagctttcagtgaaacactacatacacgaagaaaaggaacaaggtttaactatttaagaaccatttgctgccgcatagtgccattggatagggaagaacttcagaaatctgtggtactcttggccttgtctttgtcttccctgaacgtgtctccactctgtgaagccagcatctaggggctaaagatgcaaaggaaagcagcatgcattgtctgtacaaatgtgcagcgaaataccccaaagcttttcctactgtacagatctctcgagtctgctttaagtgatttcttttcttcttgattattttcttatatttctatatgtatagtgtaatagccttttgttaactaattttcttttttccttttagtaattaagcacgatcatgtccctttttaagccttacctgagaggaacaatgccttaaaataaaaaagcattaatgagatgaaagtatgcacagaataactttcctctacttattctgtactttgccctcatgagttccaatgttgtgtgaagacaggcagatgctgcacagtgaattgcagatgatattacagaagtgatgtctgtaggtcacattaaatactgacttgagcagtgggtgacacaacacagtgtttgtcttccacagggaagcttaaaacaaaagatatttttaacccactgacagaacaacaaggttaagcttcatctgcttggtgtcccacagaacttgcacaagcagttgttattgggaaagtacagtctcaaaaccagcaacagcagcagtacctacagccctttttttggagagaagtttaaatgctttactgttggggcagtccatttctaatcctgacttggtgacagtatcatgtgtatttataaaacaaggctagccatatttaggacaactgaagaaaagctggaaaaaaaaacaagcaaacttgaacactgaagcaacctcaagcatctctttattttgatgatatatttttgtaaggaaaatattcagatgatcaggaatgtatataactgaaatcaagaaaaagaacagtatgcatttaaaaagacagaattatgaaattatatgagtgcttagaatggggctaagggaagtgctgaaatagagcaaaggatggaagataatatagactaccacccactgtaaatgtttgcaagtggctgtgttttaaatgggattattacagttgatctctatgaatgtcagagccctaactttcaggctttgcattttgtatatgggaagaaatatgacaatcctaggtaattaaaccatagacccaaagcccttacgtttgatgcaatttatttttaaaataggccttgtttttcagcttcatctgcagttctatgtgaagattgataaatcagtttttacttgttttattaataaaacgtaatttggatatcttgagttgatggttttgtgatttagctgggtaaactatctttgtaacagataagttatttataaaaattaaaaaacttatattctaatgtg

SEQ ID NO: 305839 - DNA, 4336 bp, Homo sapiens
  misc_feature (30)..(31): n is a, c, g, or t
  misc_feature (38)..(38): n is a, c, g, or t
ctagagtatccccaactacagcagcaaccnngaacagntaaatttgaatttttctatttccagaaaatgcttggacagaagagatgagtactatttccactaaggcctagaattgcctactgtacaaatagtcctgatcaggcaatatacgaatggcccaaggaagccaccaaattgattttcaggttttacatgacctgcgacaaaaattccctgaagtacctgaagttgttgtatccaggtgcatgttacagaataataataacctggatgcctgctgtgctgttctctctcaggagagtacaagatatctttatggtgaaggagacttgaatttttcagatgattctggaatttctggtctacgcaatcacatgacttctctcaacttggacttgcaatcacagaacatttaccaccatggaagagaaggaagtaggatgaatggaagtaggactctaacgcacagcattagtgatggacaacttcaaggtggccagtccaatagtgaactatttcagcaggagccacagacagcaccagctcaagttcctcaaggctttaatgtttttggaatgtccagttcctctggtgcttcaaattcagcaccacatcttggatttcacttaggcagcaaaggaacatctagcctttctcaacaaactcccagatttaatcccattatggtaactttagccccaaatatccagactggtcgtaatactcctacatctttgcacatacatggtgtacctccacctgtacttaacagtccacagggaaattctatctatattaggccttacattacaactcctggtggtacaactcgacagacacaacagcattctggctgggtatctcagtttaatcccatgaaccctcagcaagtttatcagccttcacagcctggtccctggactacttgtcctgcatctaatcctctgtcacatacctcatctcaacagccaaatcagcaaggccaccagacctctcatgtctacatgccaatcagttcacctactacttcacaaccaccaaccattcattcatctggtagctcacagtcttctgcccatagccaatataacattcagaatatttcaacaggacctcgaaaaaaccagattgaaatcaaacttgaacccccacaaagaaataattcttcaaaactgcgttcttctggacctcgaacctccagcacttcctcttcagtcaatagccagaccttaaacagaaatcagcccactgtttacatagctgccagccccccaaatacggatgagctgatgtcccgtagtcaacctaaggtctatatttcagcgaatgctgccacaggagatgaacaggtcatgcggaatcagcccacactcttcatatccacaaactctggagcatctgctgcctccaggaacatgtctgggcaagtgagcatgggtcctgcctttattcatcaccatcctcccaaaagtcgagcaataggcaataactctgcaacctctcctcgagtggtagtcactcagcccaatacgaaatacactttcaaaattacagtctctcccaataagccccctgcagtttcaccaggggtggtgtcccctacctttgaacttacaaatcttcttaatcatcctgatcattatgtagaaaccgagaatattcagcacctcacggaccctacattagcacatgtggatagaataagtgaaacacggaaactgagtatgggatctgatgatgctgcctacacacaagatatttgaagaataagtaattcttggctgggcatggtggctcacgcctgtaattccagtgctttgggaggccaagatgggaggatcatttgagcccaggagtttgagaccagctggggcaacatatggagactccgtctctacagaaggttttgaaattatgcaggcatggtggcacacacctgtagtcccagttactcagtagactgagctcttttggtacaccagaaggccagaatggaacgacttcaaagagaacttgagattcaaaagaaaaagctggataaattaaaatctgaggttaatgaaatggaaaataatctaactcgaaggcgcctgaaaagatcaaattctatatcccagataccttcccttgaagaaatgcagcagctgagaagttgtaatagacaactccagattgacattgactgcttaaccaaagaaattgatctttttcaagcccgaggaccacattttaaccccagcgctattcataacttttatgacaatattggatttgtaggtcctgtgccaccaaaacccaaagatcaaaggtccatcatcaaaacaccaaagactcaagacacagaagatgatgagggagctcagtggaattgtaccgcctgtacttttttgaaccatccagccttaattcgctgtgaacagtgtgagatgccaaggcatttctgagccaaatggccctgtatcttctctaaaaccacatctaaagttcaagaaactagtctgtcatcgggaaaaagtttcactgctacataggattttgtcaaattgaaggtgtgacaagatggtgttctgctaatgttaaatgtcagcccacagagctaataatacctcagtataatgtcatgagcagttgaaattcatcacatgaaaagtaatctgctgaaagacttggttgcccactgcctaactgtgtacagtgttaccagtgtcccattatggataattctcaatatgttaacacctaggtgttcccaatacctttttcccctcatgtcactactgaattttgacaggaggaaggaatagaatgatagcttgttttatttgtaaagctttcagtgaaacactacatacacgaagaaaaggaacaaggtttaactatttaagaaccatttgctgccgcatagtgccattggatagggaagaacttcagaaatctgtggtactcttggccttgtctttgtcttccctgaacgtgtctccactctgtgaagccagcatctaggggctaaagatgcaaaggaaagcagcatgcattgtctgtacaaatgtgcagcgaaataccccaaagcttttcctactgtacagatctctcgagtctgctttaagtgatttcttttcttcttgattattttcttatatttctatatgtatagtgtaatagccttttgttaactaattttcttttttccttttagtaattaagcacgatcatgtccctttttaagccttacctgagaggaacaatgccttaaaataaaaaagcattaatgagatgaaagtatgcacagaataactttcctctacttattctgtactttgccctcatgagttccaatgttgtgtgaagacaggcagatgctgcacagtgaattgcagatgatattacagaagtgatgtctgtaggtcacattaaatactgacttgagcagtgggtgacacaacacagtgtttgtcttccacagggaagcttaaaacaaaagatatttttaacccactgacagaacaacaaggttaagcttcatctgcttggtgtcccacagaacttgcacaagcagttgttattgggaaagtacagtctcaaaaccagcaacagcagcagtacctacagccctttttttggagagaagtttaaatgctttactgttggggcagtccatttctaatcctgacttggtgacagtatcatgtgtatttataaaacaaggctagccatatttaggacaactgaagaaaagctggaaaaaaaaacaagcaaacttgaacactgaagcaacctcaagcatctctttattttgatgatatatttttgtaaggaaaatattcagatgatcaggaatgtatataactgaaatcaagaaaaagaacagtatgcatttaaaaagacagaattatgaaattatatgagtgcttagaatggggctaagggaagtgctgaaatagagcaaaggatggaagataatatagactaccacccactgtaaatgtttgcaagtggctgtgttttaaatgggattattacagttgatctctatgaatgtcagagccctaactttcaggctttgcattttgtatatgggaagaaatatgacaatcctaggtaattaaaccatagacccaaagcccttacgtttgatgcaatttatttttaaaataggccttgtttttcagcttcatctgcagttctatgtgaagattgataaatcagtttttacttgttttattaataaaacgtaatttggatatcttgagttgatggttttgtgatttagctgggtaaactatctttgtaacagataagttatttataaaaattaaaaaacttatattctaatgtg

SEQ ID NO: 305840 - DNA, 4465 bp, Homo sapiens
cgacgagttcgagtttgagaccgtgctggtgcaacatatggagactccgtctctacagaaggtcttgaacatatatacagcgctggtggcacacacctgtagtcccagttactcagtagactgagaaaatgcttggacagaagagatgagtactatttccactaaggcctagaattgcctactgtacaaatagtcctgatcaggcaatatacgaatggcccaaggaagccaccaaattgattttcaggttttacatgacctgcgacaaaaattccctgaagtacctgaagttgttgtatccaggtgcatgttacagaataataataacctggatgcctgctgtgctgttctctctcaggagagtacaagatatctttatggtgaaggagacttgaatttttcagatgattctggaatttctggtctacgcaatcacatgacttctctcaacttggacttgcaatcacagaacatttaccaccatggaagagaaggaagtaggatgaatggaagtaggactctaacgcacagcattagtgatggacaacttcaaggtggccagtccaatagtgaactatttcagcaggagccacagacagcaccagctcaagttcctcaaggctttaatgtttttggaatgtccagttcctctggtgcttcaaattcagcaccacatcttggatttcacttaggcagcaaaggaacatctagcctttctcaacaaactcccagatttaatcccattatggtaactttagccccaaatatccagactggtcgtaatactcctacatctttgcacatacatggtgtacctccacctgtacttaacagtccacagggaaattctatctatattaggccttacattacaactcctggtggtacaactcgacagacacaacagcattctggctgggtatctcagtttaatcccatgaaccctcagcaagtttatcagccttcacagcctggtccctggactacttgtcctgcatctaatcctctgtcacatacctcatctcaacagccaaatcagcaaggccaccagacctctcatgtctacatgccaatcagttcacctactacttcacaaccaccaaccattcattcatctggtagctcacagtcttctgcccatagccaatataacattcagaatatttcaacaggacctcgaaaaaaccagattgaaatcaaacttgaacccccacaaagaaataattcttcaaaactgcgttcttctggacctcgaacctccagcacttcctcttcagtcaatagccagaccttaaacagaaatcagcccactgtttacatagctgccagccccccaaatacggatgagctgatgtcccgtagtcaacctaaggtctatatttcagcgaatgctgccacaggagatgaacaggtcatgcggaatcagcccacactcttcatatccacaaactctggagcatctgctgcctccaggaacatgtctgggcaagtgagcatgggtcctgcctttattcatcaccatcctcccaaaagtcgagcaataggcaataactctgcaacctctcctcgagtggtagtcactcagcccaatacgaaatacactttcaaaattacagtctctcccaataagccccctgcagtttcaccaggggtggtgtcccctacctttgaacttacaaatcttcttaatcatcctgatcattatgtagaaaccgagaatattcagcacctcacggaccctacattagcacatgtggatagaataagtgaaacacggaaactgagtatgggatctgatgatgctgcctacacacaagctcttttggtacaccagaaggccagaatggaacgacttcaaagagaacttgagattcaaaagaaaaagctggataaattaaaatctgaggttaatgaaatggaaaataatctaactcgaaggcgcctgaaaagatcaaattctatatcccagataccttcccttgaagaaatgcagcagctgagaagttgtaatagacaactccagattgacattgactgcttaaccaaagaaattgatctttttcaagcccgaggaccacattttaaccccagcgctattcataacttttatgacaatattggatttgtaggtcctgtgccaccaaaacccaaagatcaaaggtccatcatcaaaacaccaaagactcaagacacagaagatgatgagggagctcagtggaattgtaccgcctgtacttttttgaaccatccagccttaattcgctgtgaacagtgtgagatgccaaggcatttctgagccaaatggccctgtatcttctctaaaaccacatctaaagttcaagaaactagtctgtcatcgggaaaaagtttcactgctacataggattttgtcaaattgaaggtgtgacaagatggtgttctgctaatgttaaatgtcagcccacagagctaataatacctcagtataatgtcatgagcagttgaaattcatcacatgaaaagtaatctgctgaaagacttggttgcccactgcctaactgtgtacagtgttaccagtgtcccattatggataattctcaatatgttaacacctaggtgttcccaatacctttttcccctcatgtcactactgaattttgacaggaggaaggaatagaatgatagcttgttttatttgtaaagctttcagtgaaacactacatacacgaagaaaaggaacaaggtttaactatttaagaaccatttgctgccgcatagtgccattggatagggaagaacttcagaaatctgtggtactcttggccttgtctttgtcttccctgaacgtgtctccactctgtgaagccagcatctaggggctaaagatgcaaaggaaagcagcatgcattgtctgtacaaatgtgcagcgaaataccccaaagcttttcctactgtacagatctctcgagtctgctttaagtgatttcttttcttcttgattattttcttatatttctatatgtatagtgtaatagccttttgttaactaattttcttttttccttttagtaattaagcacgatcatgtccctttttaagccttacctgagaggaacaatgccttaaaataaaaaagcattaatgagatgaaagtatgcacagaataactttcctctacttattctgtactttgccctcatgagttccaatgttgtgtgaagacaggcagatgctgcacagtgaattgcagatgatattacagaagtgatgtctgtaggtcacattaaatactgacttgagcagtgggtgacacaacacagtgtttgtcttccacagggaagcttaaaacaaaagatatttttaacccactgacagaacaacaaggttaagcttcatctgcttggtgtcccacagaacttgcacaagcagttgttattgggaaagtacagtctcaaaaccagcaacagcagcagtacctacagccctttttttggagagaagtttaaatgctttactgttggggcagtccatttctaatcctgacttggtgacagtatcatgtgtatttataaaacaaggctagccatatttaggacaactgaagaaaagctggaaaaaaaaacaagcaaacttgaacactgaagcaacctcaagcatctctttattttgatgatatatttttgtaaggaaaatattcagatgatcaggaatgtatataactgaaatcaagaaaaagaacagtatgcatttaaaaagacagaattatgaaattatatgagtgcttagaatggggctaagggaagtgctgaaatagagcaaaggatggaagataatatagactaccacccactgtaaatgtttgcaagtggctgtgttttaaatgggattattacagttgatctctatgaatgtcagagccctaactttcaggctttgcattttgtatatgggaagaaatatgacaatcctaggtaattaaaccatagacccaaagcccttacgtttgatgcaatttatttttaaaataggccttgtttttcagcttcatctgcagttctatgtgaagattgataaatcagtttttacttgttttattaataaaacgtaatttggatatcttgagttgatggttttgtgatttagctgggtaaactatctttgtaacagataagttatttataaaaattaaaaaacttatattctaatgtgaaaaaaaacaacatgacaacagaaaatttgcgggcgccagcggtcccagaaaaaatttcgaaaacaacctggggcgggggccagatgtaatggaactgggccaaacgtgtcccaagaaactcgggcacaacatgtgctgggttccaccaaaaaaagccggcgccccggtctcgaaatccataggtgccgagacaccggcaacaagggccagggctcaacccaccgtgcgtgaagaacgagacaacaagacacccagatacacgagcacaccaacaca

SEQ ID NO: 305841 - DNA, 3538 bp, Homo sapiens
agcgatgatcgcattacactcgatagtccagtcgataatggaactatctaggccttttctcaacgacactcgccagagttatgctcccaattcatggctaattttagagtcgtattactccatgactgggccggtccttttcccaactcttgcctcatggtgtacctccacctgtacttaacagtccacagggaaattctatctatattaggccttacattacaactcctggtggtacaactcgacagacacaacagcattctggctgggtatctcagtttaatcccatgaaccctcagcaagtttatcagccttcacagcctggtccctggactacttgtcctgcatctaatcctctgtcacatacctcatctcaacagccaaatcagcaaggccaccagacctctcatgtctacatgccaatcagttcacctactacttcacaaccaccaaccattcattcatctggtagctcacagtcttctgcccatagccaatataacattcagaatatttcaacaggacctcgaaaaaaccagattgaaatcaaacttgaacccccacaaagaaataattcttcaaaactgcgttcttctggacctcgaacctccagcacttcctcttcagtcaatagccagaccttaaacagaaatcagcccactgtttacatagctgccagccccccaaatacggatgagctgatgtcccgtagtcaacctaaggtctatatttcagcgaatgctgccacaggagatgaacaggtcatgcggaatcagcccacactcttcatatccacaaactctggagcatctgctgcctccaggaacatgtctgggcaagtgagcatgggtcctgcctttattcatcaccatcctcccaaaagtcgagcaataggcaataactctgcaacctctcctcgagtggtagtcactcagcccaatacgaaatacactttcaaaattacagtctctcccaataagccccctgcagtttcaccaggggtggtgtcccctacctttgaacttacaaatcttcttaatcatcctgatcattatgtagaaaccgagaatattcagcacctcacggaccctacattagcacatgtggatagaataagtgaaacacggaaactgagtatgggatctgatgatgctgcctacacacaagctcttttggtacaccagaaggccagaatggaacgacttcaaagagaacttgagattcaaaagaaaaagctggataaattaaaatctgaggttaatgaaatggaaaataatctaactcgaaggcgcctgaaaagatcaaattctatatcccagataccttcccttgaagaaatgcagcagctgagaagttgtaatagacaactccagattgacattgactgcttaaccaaagaaattgatctttttcaagcccgaggaccacattttaaccccagcgctattcataacttttatgacaatattggatttgtaggtcctgtgccaccaaaacccaaagatcaaaggtccatcatcaaaacaccaaagactcaagacacagaagatgatgagggagctcagtggaattgtaccgcctgtacttttttgaaccatccagccttaattcgctgtgaacagtgtgagatgccaaggcatttctgagccaaatggccctgtatcttctctaaaaccacatctaaagttcaagaaactagtctgtcatcgggaaaaagtttcactgctacataggattttgtcaaattgaaggtgtgacaagatggtgttctgctaatgttaaatgtcagcccacagagctaataatacctcagtataatgtcatgagcagttgaaattcatcacatgaaaagtaatctgctgaaagacttggttgcccactgcctaactgtgtacagtgttaccagtgtcccattatggataattctcaatatgttaacacctaggtgttcccaatacctttttcccctcatgtcactactgaattttgacaggaggaaggaatagaatgatagcttgttttatttgtaaagctttcagtgaaacactacatacacgaagaaaaggaacaaggtttaactatttaagaaccatttgctgccgcatagtgccattggatagggaagaacttcagaaatctgtggtactcttggccttgtctttgtcttccctgaacgtgtctccactctgtgaagccagcatctaggggctaaagatgcaaaggaaagcagcatgcattgtctgtacaaatgtgcagcgaaataccccaaagcttttcctactgtacagatctctcgagtctgctttaagtgatttcttttcttcttgattattttcttatatttctatatgtatagtgtaatagccttttgttaactaattttcttttttccttttagtaattaagcacgatcatgtccctttttaagccttacctgagaggaacaatgccttaaaataaaaaagcattaatgagatgaaagtatgcacagaataactttcctctacttattctgtactttgccctcatgagttccaatgttgtgtgaagacaggcagatgctgcacagtgaattgcagatgatattacagaagtgatgtctgtaggtcacattaaatactgacttgagcagtgggtgacacaacacagtgtttgtcttccacagggaagcttaaaacaaaagatatttttaacccactgacagaacaacaaggttaagcttcatctgcttggtgtcccacagaacttgcacaagcagttgttattgggaaagtacagtctcaaaaccagcaacagcagcagtacctacagccctttttttggagagaagtttaaatgctttactgttggggcagtccatttctaatcctgacttggtgacagtatcatgtgtatttataaaacaaggctagccatatttaggacaactgaagaaaagctggaaaaaaaaacaagcaaacttgaacactgaagcaacctcaagcatctctttattttgatgatatatttttgtaaggaaaatattcagatgatcaggaatgtatataactgaaatcaagaaaaagaacagtatgcatttaaaaagacagaattatgaaattatatgagtgcttagaatggggctaagggaagtgctgaaatagagcaaaggatggaagataatatagactaccacccactgtaaatgtttgcaagtggctgtgttttaaatgggattattacagttgatctctatgaatgtcagagccctaactttcaggctttgcattttgtatatgggaagaaatatgacaatcctaggtaattaaaccatagacccaaagcccttacgtttgatgcaatttatttttaaaataggccttgtttttcagcttcatctgcagttctatgtgaagattgataaatcagtttttacttgttttattaataaaacgtaatttggatatcttgagttgatggttttgtgatttagctgggtaaactatctttgtaacagataagttatttataaaaattaaaaaacttatattctaatgtg

SEQ ID NO: 305842 - DNA, 3971 bp, Homo sapiens
cgacgagttcgagtttgagaccgtgctggtgcaacatatggagactccgtctctacagaaggtcttgaacatatatacagcgctggtggcacacacctgtagtcccagttactcagtagactgagaaaatgcttggacagaagagatgagtactatttccactaaggcctagaattgcctactgtacaaatagtcctgatcaggcaatatacgaatggcccaaggaagccaccaaattgattttcaggttttacatgacctgcgacaaaaattccctgaagtacctgaagttgttgtatccaggtgcatgttacagaataataataacctggatgcctgctgtgctgttctctctcaggagagtacaagatatctttatggtgaaggagacttgaatttttcagatgattctggaatttctggtctacgcaatcacatgacttctctcaacttggacttgcaatcacagaacatttaccaccatggaagagaaggaagtaggatgaatggaagtaggactctaacgcacagcattagtgatggacaacttcaaggtggccagtccaatagtgaactatttcagcaggagccacagacagcaccagctcaagttcctcaaggctttaatgtttttggaatgtccagttcctctggtgcttcaaattcagcaccacatcttggatttcacttaggcagcaaaggaacatctagcctttctcaacaaactcccagatttaatcccattatggtaactttagccccaaatatccagactggtcgtaatactcctacatctttgcacatacatggtgtacctccacctgtacttaacagtccacagggaaattctatctatattaggccttacattacaactcctggtggtacaactcgacagacacaacagcattctggctgggtatctcagtttaatcccatgaaccctcagcaagtttatcagccttcacagcctggtccctggactacttgtcctgcatctaatcctctgtcacatacctcatctcaacagccaaatcagcaaggccaccagacctctcatgtctacatgccaatcagttcacctactacttcacaaccaccaaccattcattcatctggtagctcacagtcttctgcccatagccaatataacattcagaatatttcaacaggacctcgaaaaaaccagattgaaatcaaacttgaacccccacaaagaaataattcttcaaaactgcgttcttctggacctcgaacctccagcacttcctcttcagtcaatagccagaccttaaacagaaatcagcccactgtttacatagctgccagccccccaaatacggatgagctgatgtcccgtagtcaacctaaggtctatatttcagcgaatgctgccacaggagatgaacaggtcatgcggaatcagcccacactcttcatatccacaaactctggagcatctgctgcctccaggaacatgtctgggcaagtgagcatgggtcctgcctttattcatcaccatcctcccaaaagtcgagcaataggcaataactctgcaacctctcctcgagtggtagtcactcagcccaatacgaaatacactttcaaaattacagtctctcccaataagccccctgcagtttcaccaggggtggtgtcccctacctttgaacttacaaatcttcttaatcatcctgatcattatgtagaaaccgagaatattcagcacctcacggaccctacattagcacatgtggatagaataagtgaaacacggaaactgagtatgggatctgatgatgctgcctacacacaagctcttttggtacaccagaaggccagaatggaacgacttcaaagagaacttgagattcaaaagaaaaagctggataaattaaaatctgaggttaatgaaatggaaaataatctaactcgaaggcgcctgaaaagatcaaattctatatcccagataccttcccttgaagaaatgcagcagctgagaagttgtaatagacaactccagattgacattgactgcttaaccaaagaaattgatctttttcaagcccgaggaccacattttaaccccagcgctattcataacttttatgacaatattggatttgtaggtcctgtgccaccaaaacccaaagatcaaaggtccatcatcaaaacaccaaagactcaagacacagaagatgatgagggagctcagtggaattgtaccgcctgtacttttttgaaccatccagccttaattcgctgtgaacagtgtgagatgccaaggcatttctgagccaaatggccctgtatcttctctaaaaccacatctaaagttcaagaaactagtctgtcatcgggaaaaagtttcactgctacataggattttgtcaaattgaaggtgtgacaagatggtgttctgctaatgttaaatgtcagcccacagagctaataatacctcagtataatgtcatgagcagttgaaattcatcacatgaaaagtaatctgctgaaagacttggttgcccactgcctaactgtgtacagtgttaccagtgtcccattatggataattctcaatatgttaacacctaggtgttcccaatacctttttcccctcatgtcactactgaattttgacaggaggaaggaatagaatgatagcttgttttatttgtaaagctttcagtgaaacactacatacacgaagaaaaggaacaaggtttaactatttaagaaccatttgctgccgcatagtgccattggatagggaagaacttcagaaatctgtggtactcttggccttgtctttgtcttccctgaacgtgtctccactctgtgaagccagcatctaggggctaaagatgcaaaggaaagcagcatgcattgtctgtacaaatgtgcagcgaaataccccaaagcttttcctactgtacagatctctcgagtctgctttaagtgatttcttttcttcttgattattttcttatatttctatatgtatagtgtaatagccttttgttaactaattttcttttttccttttagtaattaagcacgatcatgtccctttttaagccttacctgagaggaacaatgccttaaaataaaaaagcattaatgagatgaaagtatgcacagaataactttcctctacttattctgtactttgccctcatgagttccaatgttgtgtgaagacaggcagatgctgcacagtgaattgcagatgatattacagaagtgatgtctgtaggtcacattaaatactgacttgagcagtgggtgacacaacacagtgtttgtcttccacagggaagcttaaaacaaaagatatttttaacccactgacagaacaacaaggttaagcttcatctgcttggtgtcccacagaacttgcacaagcagttgttattgggaaagtacagtctcaaaaccagcaacagcagcagtacctacagccctttttttggagagaagtttaaatgctttactgttggggcagtccatttctaatcctgacttggtgacagtatcatgtgtatttataaaacaaggctagccatatttaggacaactgaagaaaagctggaaaaaaaaacaagcaaacttgaacactgaagcaacctcaagcatctctttattttgatgatatatttttgtaaggaaaatattcagatgatcaggaatgtatataactgaaatcaagaaaaagaacagtatgcatttaaaaagacagaattatgaaattatatgagtgcttagaatggggctaagggaagtgctgaaatagagcaaaggatggaagataatatagactaccacccactgtaaatgtttgcaagtggctgtgttttaaatgggattattacagttgatctctatgaatgtcagagccctaactttcaggctttgcattttgtatatgggaagaaatatgacaatcctaggtaattaaaccatagacccaa

SEQ ID NO: 305843 - DNA, 4049 bp, Homo sapiens
cgacgagttcgagtttgagaccgtgctggtgcaacatatggagactccgtctctacagaaggtcttgaacatatatacagcgctggtggcacacacctgtagtcccagttactcagtagactgagaaaatgcttggacagaagagatgagtactatttccactaaggcctagaattgcctactgtacaaatagtcctgatcaggcaatatacgaatggcccaaggaagccaccaaattgattttcaggttttacatgacctgcgacaaaaattccctgaagtacctgaagttgttgtatccaggtgcatgttacagaataataataacctggatgcctgctgtgctgttctctctcaggagagtacaagatatctttatggtgaaggagacttgaatttttcagatgattctggaatttctggtctacgcaatcacatgacttctctcaacttggacttgcaatcacagaacatttaccaccatggaagagaaggaagtaggatgaatggaagtaggactctaacgcacagcattagtgatggacaacttcaaggtggccagtccaatagtgaactatttcagcaggagccacagacagcaccagctcaagttcctcaaggctttaatgtttttggaatgtccagttcctctggtgcttcaaattcagcaccacatcttggatttcacttaggcagcaaaggaacatctagcctttctcaacaaactcccagatttaatcccattatggtaactttagccccaaatatccagactggtcgtaatactcctacatctttgcacatacatggtgtacctccacctgtacttaacagtccacagggaaattctatctatattaggccttacattacaactcctggtggtacaactcgacagacacaacagcattctggctgggtatctcagtttaatcccatgaaccctcagcaagtttatcagccttcacagcctggtccctggactacttgtcctgcatctaatcctctgtcacatacctcatctcaacagccaaatcagcaaggccaccagacctctcatgtctacatgccaatcagttcacctactacttcacaaccaccaaccattcattcatctggtagctcacagtcttctgcccatagccaatataacattcagaatatttcaacaggacctcgaaaaaaccagattgaaatcaaacttgaacccccacaaagaaataattcttcaaaactgcgttcttctggacctcgaacctccagcacttcctcttcagtcaatagccagaccttaaacagaaatcagcccactgtttacatagctgccagccccccaaatacggatgagctgatgtcccgtagtcaacctaaggtctatatttcagcgaatgctgccacaggagatgaacaggtcatgcggaatcagcccacactcttcatatccacaaactctggagcatctgctgcctccaggaacatgtctgggcaagtgagcatgggtcctgcctttattcatcaccatcctcccaaaagtcgagcaataggcaataactctgcaacctctcctcgagtggtagtcactcagcccaatacgaaatacactttcaaaattacagtctctcccaataagccccctgcagtttcaccaggggtggtgtcccctacctttgaacttacaaatcttcttaatcatcctgatcattatgtagaaaccgagaatattcagcacctcacggaccctacattagcacatgtggatagaataagtgaaacacggaaactgagtatgggatctgatgatgctgcctacacacaagctcttttggtacaccagaaggccagaatggaacgacttcaaagagaacttgagattcaaaagaaaaagctggataaattaaaatctgaggttaatgaaatggaaaataatctaactcgaaggcgcctgaaaagatcaaattctatatcccagataccttcccttgaagaaatgcagcagctgagaagttgtaatagacaactccagattgacattgactgcttaaccaaagaaattgatctttttcaagcccgaggaccacattttaaccccagcgctattcataacttttatgacaatattggatttgtaggtcctgtgccaccaaaacccaaagatcaaaggtccatcatcaaaacaccaaagactcaagacacagaagatgatgagggagctcagtggaattgtaccgcctgtacttttttgaaccatccagccttaattcgctgtgaacagtgtgagatgccaaggcatttctgagccaaatggccctgtatcttctctaaaaccacatctaaagttcaagaaactagtctgtcatcgggaaaaagtttcactgctacataggattttgtcaaattgaaggtgtgacaagatggtgttctgctaatgttaaatgtcagcccacagagctaataatacctcagtataatgtcatgagcagttgaaattcatcacatgaaaagtaatctgctgaaagacttggttgcccactgcctaactgtgtacagtgttaccagtgtcccattatggataattctcaatatgttaacacctaggtgttcccaatacctttttcccctcatgtcactactgaattttgacaggaggaaggaatagaatgatagcttgttttatttgtaaagctttcagtgaaacactacatacacgaagaaaaggaacaaggtttaactatttaagaaccatttgctgccgcatagtgccattggatagggaagaacttcagaaatctgtggtactcttggccttgtctttgtcttccctgaacgtgtctccactctgtgaagccagcatctaggggctaaagatgcaaaggaaagcagcatgcattgtctgtacaaatgtgcagcgaaataccccaaagcttttcctactgtacagatctctcgagtctgctttaagtgatttcttttcttcttgattattttcttatatttctatatgtatagtgtaatagccttttgttaactaattttcttttttccttttagtaattaagcacgatcatgtccctttttaagccttacctgagaggaacaatgccttaaaataaaaaagcattaatgagatgaaagtatgcacagaataactttcctctacttattctgtactttgccctcatgagttccaatgttgtgtgaagacaggcagatgctgcacagtgaattgcagatgatattacagaagtgatgtctgtaggtcacattaaatactgacttgagcagtgggtgacacaacacagtgtttgtcttccacagggaagcttaaaacaaaagatatttttaacccactgacagaacaacaaggttaagcttcatctgcttggtgtcccacagaacttgcacaagcagttgttattgggaaagtacagtctcaaaaccagcaacagcagcagtacctacagccctttttttggagagaagtttaaatgctttactgttggggcagtccatttctaatcctgacttggtgacagtatcatgtgtatttataaaacaaggctagccatatttaggacaactgaagaaaagctggaaaaaaaaacaagcaaacttgaacactgaagcaacctcaagcatctctttattttgatgatatatttttgtaaggaaaatattcagatgatcaggaatgtatataactgaaatcaagaaaaagaacagtatgcaaaaaaaaaaaaaaaaaaaaaaaaaaaaatttttggggcggccttgggcccctggaaaaagtttccagagacccattcgcgttgggccccgggggcccatgtggggttagtggcacagggggccaagacggtgttcccgagaggaaaaaaccgggggacaacgacacaagggccgcggtgtttctccgcccgaaattaaaaaaaaggccgcggggggaaccaccgacgtcgtttctgacacactccccagagagggaattcgcgagaaggcacaaacgggggctctcatcaacagagaggacccaagagacccagaaaaaattc

SEQ ID NO: 305844 - DNA, 1052 bp, Homo sapiens
cgtgctattccgtgcatagctcgattcctagaggtataccctggttcagcgctcttggtgagggcatggcagatgctgcacagtgaattgcagatgatattacagaagtgatgtctgtaggtcacattaaatactgacttgagcagtgggtgacacaacacagtgtttgtcttccacagggaagcttaaaacaaaagatatttttaacccactgacagaacaacaaggttaagcttcatctgcttggtgtcccacagaacttgcacaagcagttgttattgggaaagtacagtctcaaaaccagcaacagcagcagtacctacagccctttttttggagagaagtttaaatgctttactgttggggcagtccatttctaatcctgacttggtgacagtatcatgtgtatttataaaacaaggctagccatatttaggacaactgaagaaaagctggaaaaaaaaacaagcaaacttgaacactgaagcaacctcaagcatctctttattttgatgatatatttttgtaaggaaaatattcagatgatcaggaatgtatataactgaaatcaagaaaaagaacagtatgcatttaaaaagacagaattatgaaattatatgagtgcttagaatggggctaagggaagtgctgaaatagagcaaaggatggaagataatatagactaccacccactgtaaatgtttgcaagtggctgtgttttaaatgggattattacagttgatctctatgaatgtcagagccctaactttcaggctttgcattttgtatatgggaagaaatatgacaatcctaggtaattaaaccatagacccaaagcccttacgtttgatgcaatttatttttaaaataggccttgtttttcagcttcatctgcagttctatgtgaagattgataaatcagtttttacttgttttattaataaaacgtaatttggatatcttgagttgatggttttgtgatttagctgggtaaactatctttgtaacagataagttatttataaaaattaaaaaacttatattctaatgtg

SEQ ID NO: 305845 - DNA, 760 bp, Homo sapiens
agcgcccactagctcattctaagcactcatataatttcataaattctgtctttttaaatgctttactgttggggcagtccatttctaatcctgacttggtgacagtatcatgtgtatttataaaacaaggctagccatatttaggacaactgaagaaaagctggaaaaaaaaacaagcaaacttgaacactgaagcaacctcaagcatctctttattttgatgatatatttttgtaaggaaaatattcagatgatcaggaatgtatataactgaaatcaagaaaaagaacagtatgcatttaaaaagacagaattatgaaattatatgagtgcttagaatggggctaagggaagtgctgaaatagagcaaaggatggaagataatatagactaccacccactgtaaatgtttgcaagtggctgtgttttaaatgggattattacagttgatctctatgaatgtcagagccctaactttcaggctttgcattttgtatatgggaagaaatatgacaatcctaggtaattaaaccatagacccaaagcccttacgtttgatgcaatttatttttaaaataggccttgtttttcagcttcatctgcagttctatgtgaagattgataaatcagtttttacttgttttattaataaaacgtaatttggatatcttgagttgatggttttgtgatttagctgggtaaactatctttgtaacagataagttatttataaaaattaaaaaacttatattctaatgtg

SEQ ID NO: 305846 - DNA, 2000 bp, Homo sapiens
cgacgagttcgagtttgagaccgtgctggtgcaacatatggagactccgtctctacagaaggtcttgaacatatatacagcgctggtggcacacacctgtagtcccagttactcagtagactgagaaaatgcttggacagaagagatgagtactatttccactaaggcctagaattgcctactgtacaaatagtcctgatcaggcaatatacgaatggcccaaggaagccaccaaattgattttcaggttttacatgacctgcgacaaaaattccctgaagtacctgaagttgttgtatccaggtgcatgttacagaataataataacctggatgcctgctgtgctgttctctctcaggagagtacaagatatctttatggtgaaggagacttgaatttttcagatgattctggaatttctggtctacgcaatcacatgacttctctcaacttggacttgcaatcacagaacatttaccaccatggaagagaaggaagtaggatgaatggaagtaggactctaacgcacagcattagtgatggacaacttcaaggtggccagtccaatagtgaactatttcagcaggagccacagacagcaccagctcaagttcctcaaggctttaatgtttttggaatgtccagttcctctggtgcttcaaattcagcaccacatcttggatttcacttaggcagcaaaggaacatctagcctttctcaacaaactcccagatttaatcccattatggtaactttagccccaaatatccagactggtcgtaatactcctacatctttgcacatacatggtgtacctccacctgtacttaacagtccacagggaaattctatctatattaggccttacattacaactcctggtggtacaactcgacagacacaacagcattctggctgggtatctcagtttaatcccatgaaccctcagcaagtttatcagccttcacagcctggtccctggactacttgtcctgcatctaatcctctgtcacatacctcatctcaacagccaaatcagcaaggccaccagacctctcatgtctacatgccaatcagttcacctactacttcacaaccaccaaccattcattcatctggtagctcacagtcttctgcccatagccaatataacattcagaatatttcaacaggacctcgaaaaaaccagattgaaatcaaacttgaacccccacaaagaaataattcttcaaaactgcgttcttctggacctcgaacctccagcacttcctcttcagtcaatagccagaccttaaacagaaatcagcccactgtttacatagctgccagccccccaaatacggatgagctgatgtcccgtagtcaacctaaggtctatatttcagcgaatgctgccacaggagatgaacaggtcatgcggaatcagcccacactcttcatatccacaaactctggagcatctgctgcctccaggaacatgtctgggcaagtgagcatgggtcctgcctttattcatcaccatcctcccaaaagtcgagcaataggcaataactctgcaacctctcctcgagtggtagtcactcagcccaatacgaaatacactttcaaaattacagtctctcccaataagccccctgcagtttcaccaggggtggtgtcccctacctttgaacttacaaatcttcttaatcatcctgatcattatgtagaaaccgagaatattcagcacctcacggaccctacattagcacatgtggatagaataagtgaaacacggaaactgagtatgggatctgatgatgctgcctacacacaagctcttttggtacaccagaaggccagaatggaacgacttcaaagagaacttgagattcaaaagaaaaagctggataaattaaaatctgaggttaatgaaatggaaaataatctaactcgaaggcgcctgaaaagatcaaattctatatcccagataccttccgtaagtctttatgtaactgttg

SEQ ID NO: 305847 - DNA, 658 bp, Homo sapiens
cgacgagttcgagtttgagaccgtgctggtgcaacatatggagactccgtctctacagaaggtcttgaacatatatacagcgctggtggcacacacctgtagtcccagttactcagtagactgagaaaatgcttggacagaagagatgagtactatttccactaaggcctagaattgcctactgtacaaatagtcctgatcaggcaatatacgaatggcccaaggaagccaccaaattgattttcaggttttacatgacctgcgacaaaaattccctgaagtacctgaagttgttgtatccaggtgcatgttacagaataataataacctggatgcctgctgtgctgttctctctcaggagagtacaagatatctttatggtgaaggagacttgaatttttcagatgattctggaatttctggtctacgcaatcacatgacttctctcaacttggacttgcaatcacagaacatttaccaccatggaagagaaggaagtaggatgaatggaagtaggactctaacgcacagcattagtgaaggccccggagagcacgagacggatgacgaaccagcaccagcgaaggggaggccccggagaccacgagacagatgaggaaccagcaccagctaaggggaggccccgagacactgcgac

SEQ ID NO: 305848 - DNA, 682 bp, Homo sapiens
taataaggaggaggagagacagaggataagatgctagcagagaattagatgaaaagttttaggcagctaggaatgtggagatgtgggtagtggtggctgccaagcacaggaaaatgatcatgctgaactgtacaaaggagattgtctctgaaccttttcataggttctgacactctatatatgtcatcttatttaaaaccctctgtattaaaatgataaggatttggagacattgaaattatatagaatttaaatgtatgcatgttcatatgtttttgcctctggctcatatttccagaatacttaacagtattttaacattttgtttcttatgattctggtcctaaaaaatcaaggacgctgcttactcagaaagctaaaaaacctgagtaagtactcttaggagttatactttttatgttttctttagttaatcactaaacttgactgatcttgataaaactaaggaattagagattgctaagagggtactatctttttctaagtattccatctctcaaaacagcctatttactagtaagtggtacttaacctacattcattcagcctcctaggaaaagaaaaagatgccagaataatgatcccacagctcctacgttgaggttatgcgtttcacttggattttcacttggatttttattgactcattttacagaatatg

SEQ ID NO: 305849 - DNA, 5622 bp, Homo sapiens
  misc_feature (1)..(2): n is a, c, g, or t
  misc_feature (4)..(4): n is a, c, g, or t
  misc_feature (4598)..(4598): n is a, c, g, or t
nngncaaaaatgccagggaaaggcgagcccagagcttggtgatggagaaattgggaagccaccccccacccttcaatcttaggatggggaattcgcaactgaagccggagcttcagacttggggcgcactcccagcttagcccaggaaagagatttaagggcgcagcagtgtggatacctctcaccccggccccgaaggtctagcgagggtctaacctgggccccttgccaggcccgccccccgcccctttccagcccccggcccgtgcgccgctgcccctttaagaagcccaggtaggcaggcccggctgctggagccgctcctatggcaacccgcgagctgcggcggcttcatgaatattccggggcgcgggagcccgagcgctgccggagggcgcttcgggggaggcggccgctgatgtaagcccggcgggtcgctgggctccgctcggttgcggcgggagccccgggacgggccggacgggccggggcagaggaggcgaggcgagctcgcgggtggccagccacaaagcccgggcggcgagacagacggacagccagccctcccgcgggacgcacgcccgggacccgcgcgggccgtgcgctctgcactccggagcggttccctgagcgccgcggccgcagagcctctccggccggcgcccattgttccccgcgggggcggggcgcctggagccgggcggcgcgccgcgcccctgaacgccagagggagggagggaggcaagaagggagcgcggggtccccgcgcccagccgggcccgggaggaggtgtagcgcggcgagcccggggactcggagcgggactaggatcctccccgcggcgcgcagcctgcccaagcatgggcgcctgaggctgcccccacgccggcggcaaaggacgcgtccccacgggcggactgaccggcgggcggacctggagcccgtccgcggcgccgcgctcctgcccccggcccggtccgaccccggcccctggcgccatggacaagctgccgccgtccatgcgcaagcggctctacagcctcccgcagcaggtgggggccaaggcgtggatcatggacgaggaagaggacgccgaggaggagggggccgggggccgccaagaccccagccgcaggagcatccggctgcggccactgccctcgccctccccctcggcggccgcgggtggcacggagtcccggagctcggccctcggggcagcggacagcgaagggccggcccgcggcgcgggcaagtccagcacgaacggcgactgcaggcgcttccgcgggagcctggcctcgctgggcagccggggcggcggcagcggcggcacggggagcggcagcagtcacggacacctgcatgactccgcggaggagcggcggctcatcgccgagggcgacgcgtcccccggcgaggacaggacgcccccaggcctggcggccgagcccgagcgccccggcgcctcggcgcagcccgcagcctcgccgccgccgccccagcagccaccgcagccggcctccgcctcctgcgagcagccctcggtggacaccgctatcaaagtggagggaggcgcggctgccggcgaccagatcctcccggaggccgaggtgcgcctgggccaggccggcttcatgcagcgccagttcggggccatgctccaacccggggtcaacaaattctccctaaggatgttcggcagccagaaagccgtggagcgcgaacaggagagggtcaagtcggccggattttggattatccacccctacagtgacttcagattttactgggacctgaccatgctgctgctgatggtgggaaacctgattatcattcctgtgggcatcaccttcttcaaggatgagaacaccacaccctggattgtcttcaatgtggtgtcagacacattcttcctcatcgacttggtcctcaacttccgcacagggatcgtggtggaggacaacacagagatcatcctggacccgcagcggattaaaatgaagtacctgaaaagctggttcatggtagatttcatttcctccatccccgtggactacatcttcctcattgtggagacacgcatcgactcggaggtctacaagactgcccgggccctgcgcattgtccgcttcacgaagatcctcagcctcttacgcctgttacgcctctcccgcctcattcgatatattcaccagtgggaagagatcttccacatgacctacgacctggccagcgccgtggtgcgcatcgtgaacctcatcggcatgatgctcctgctctgccactgggacggctgcctgcagttcctggtacccatgctacaggacttccctgacgactgctgggtgtccatcaacaacatggtgaacaactcctgggggaagcagtactcctacgcgctcttcaaggccatgagccacatgctgtgcatcggctacgggcggcaggcgcccgtgggcatgtccgacgtctggctcaccatgctcagcatgatcgtgggtgccacctgctacgccatgttcattggccacgccactgccctcatccagtccctggactcctcccggcgccagtaccaggaaaagtacaagcaggtggagcagtacatgtcctttcacaagctcccgcccgacacccggcagcgcatccacgactactacgagcaccgctaccagggcaagatgttcgacgaggagagcatcctgggcgagctaagcgagcccctgcgggaggagatcatcaactttaactgtcggaagctggtggcctccatgccactgtttgccaatgcggaccccaacttcgtgacgtccatgctgaccaagctgcgtttcgaggtcttccagcctggggactacatcatccgggaaggcaccattggcaagaagatgtacttcatccagcatggcgtggtcagcgtgctcaccaagggcaacaaggagaccaagctggccgacggctcctactttggagagatctgcctgctgacccggggccggcgcacagccagcgtgagggccgacacctactgccgcctctactcgctgagcgtggacaacttcaatgaggtgctggaggagtaccccatgatgcgaagggccttcgagaccgtggcgctggaccgcctggaccgcattggcaagaagaactccatcctcctccacaaagtccagcacgacctcaactccggcgtcttcaactaccaggagaatgagatcatccagcagattgtgcagcatgaccgggagatggcccactgcgcgcaccgcgtccaggctgctgcctctgccaccccaacccccacgcccgtcatctggaccccgctgatccaggcaccactgcaggctgccgctgccaccacttctgtggccatagccctcacccaccaccctcgcctgcctgctgccatcttccgccctcccccaggatctgggctgggcaacctcggtgccgggcagacgccaaggcacctgaaacggctgcagtccctgatcccttctgcgctgggctccgcctcgcccgccagcagcccgtcccaggtggacacaccgtcttcatcctccttccacatccaacagctggctggattctctgcccccgctggactgagcccactcctgccctcatccagctcctccccaccccccggggcctgtggctccccctcggctcccacaccatcagctggcgtagccgccaccaccatagccgggtttggccacttccacaaggcgctgggtggctccctgtcctcctccgactctcccctgctcaccccgctgcagccaggcgcccgctccccgcaggctgcccagccatctcccgcgccacccggggcccggggaggcctgggactcccggagcacttcctgccacccccaccctcatccagatccccgtcatctagccccgggcagctgggccagcctcccggggagttgtccctaggtctggccactggcccactgagcacgccagagacacccccacggcagcctgagccgccgtcccttgtggcaggggcctctgggggggcttcccctgtaggctttactccccgaggaggtctcagcccccctggccacagcccaggccccccaagaaccttcccgagtgccccgccccgggcctctggctcccacggatccttgctcctgccacctgcatccagccccccaccaccccaggtcccccagcgccggggcacacccccgctcacccccggccgcctcacccaggacctcaagctcatctccgcgtctcagccagccctgcctcaggacggggcgcagactctccgcagagcctccccgcactcctcaggggagtccatggctgccttcccgctcttccccagggctgggggtggcagcgggggcagtgggagcagcgggggcctcggtccccctgggaggccctatggtgccatccccggccagcacgtcactctgcctcggaagacatcctcaggttctttgccaccccctctgtctttgtttggggcaagagccacctcttctggggggccccctctgactgctggaccccagagggaacctggggccaggcctgagccagtgcgctccaaactgccntccaatctatgagctgggcccttccttccctcttctttcttcttttctctcccttccttcttccttcaggtttaactgtgattaggagatataccaataacagtaataattatttaaaaaaccacacacaccagaaaaacaaaagacagcagaaaataaccaggtattcttagagctatagatttttggtcacttgcttttatagactattttaatactcagcactagagggagggagggggagggaggagggagcaggcaggtcccaaatgcaaaagccagagaaaggcagatggggtctccggggctgggcaggggtgggagtggccagtgttggcggttcttagagcagatgtgtcattgtgttcatttagagaaacagctgccatcagcccgttagctgtaacttggagctccactctgcccccagaaaggggctgccctggggtgtgccctggggagcctcagaagcctgcgaccttgggagaaaagggccagggccctgagggcctagcattttttctactgtaaacgtagcaagatctgtatatgaatatgtatatgtatatgtatgtaagatgtgtatatgtatagctatgtagcgctctgtagagccatgtagatagccactcacatgtgcgcacacgtgtgcggtctagtttaatcccatgttgacaggatgcccaggtcaccttacacccagcaacccgccttggcccgcaggctgtgcactgcatggtctagggacgttctctctccagtcctcagggaagaggaccccaggacttcgcagcaggccccctctctccccatctctggtctcaaagccagtcccagcctgacctctcaccacacggaagtggaagactcccctttcctagggcctcaagcacacaccgccacctctggggccgtcagtttgcccatctgtacagtgggaggtgagcggaacttctgtttattgagtctgctctgtgccaagcactggtttcgcactttacacacattaactccttcagtttca

SEQ ID NO: 305850 - DNA, 2700 bp, Homo sapiens
aaaaaaagtctgcgcggcgcggccaggcccggccgaccgcgtctcggtcttcgcgtctgccagcctggctggcagtccgtctgtccatcccgccgcgccggggcagtctaggcggagcgggggctcaggcggcggcggcctcgacgcgagtgagtgtcgtggttggggtgctggacccagagtgcctaccctcgcctgcctgggcctcagtttccacatctgcacaatgggggtgaccatccctgccctgctggctgccaggagcggctgtgagtcttcaggcgtggatgcagcctgggggaagccatagggcgctttcacaggcctggccttcaccatggcgggagggagaccgcatctgaagaggagtttctccatcatcccctgctttgtcttcgtggagtcggtgctgctgggcattgtgatcctgcttgcttaccgcctggagttcacggacaccttccctgtgcacacccagggattcttctgctatgacagtacctacgccaagccctacccagggcctgaggctgccagccgagtgcctcctgctcttgtctacgcactggtcactgccgggcccaccctcacgatcctgctgggagagctggcgcgtgcctttttccctgcaccaccttcagccgtcccagtcatcggggagagcaccatcgtgtctggggcctgctgccgcttcagccccccagtgcggaggctggtccgcttcctgggggtctactccttcggcctcttcaccacgaccatcttcgccaacgcggggcaggtggtgaccggcaatcccacgccacacttcctgtccgtgtgccgccccaactacacggccctgggctgcctgccaccttctccggatcggccaggtcccgaccgctttgtcactgaccagggtgcctgcgctggcagtcccagcctcgtggccgccgcgcgccgcgccttcccctgcaaggatgcggccctctgcgcctacgcggtcacctacacagcgatgtacgtgactctcgtgttccgcgtgaagggctcccgcctggtcaaaccctcgctctgcctggccttgctgtgcccggccttcctggtgggcgtggtccgcgtggccgagtaccgaaaccactggtcggacgtgctggctggcttcctgacaggggcggccatcgccacctttttggtcacctgcgttgtgcataactttcagagccggccaccctctggccgaaggctctctccctgggaggacctgggccaagcccccaccatggatagccccctcgaaaagaacccgaggtctgcaggccgcattcgacaccggcacggctcaccccatccaagtcgcagaactgcgcccgccgtggccacctgatccccagctgtgtctcctccagggccccagccatgtgttcgtcgccccgtgtgccccgtcctcgattgaggtctgagccgacgcccttgcccctgcccctacccctgccagcgcccacccccagccagggcccctcgccttcctcccctggacctggggggccaggcgggggtggtggacgtggccggaagctgctgctgcccacgcccctgctgcgggacctgtacaccctgagtggactctatccctcccccttccaccgggacaacttcagcccttacctgtttgccagccgtgaccacctgctgtgaggcccgaccacccacccagaatctgcccagtccccacttcttccctgccacgcgtgtgtgtgcgtgtgccacgtgagtgccaaagtcccctgccccccaagccagccagacccagacattagaagatggctagaaggacatttaggagacatctgcctctctggccctctgagatatcccgatgggcacaaatggaaggtgcgcacttgcccctactattgcccttttaagggccaaagcttgaccccattggccattgcctggctaatgagaacccctggttctcagaattttaaccaaaaggagttggctccaaccaatgggagccttcccctcacttcttagaatcctcctgcaagagggcaactccagccagtgttcagcgactgaacagccaataggagcccttggtttccagaatttctagagtgggtgggcatgattccagtcaatgggggaccgcccgtgtctaagcatgtgcaaaggagaggagggagatgaggtcattgtttgtcattgagtcttctctcagaatcagcgagcccagctgtagggtggggggcaggctcccccatggcagggtccttggggtaccccttttcctctcagcccctccctgtgtgcggcctctccacctctcacccactctctcctaatcccctacttaagtagggcttgccccacttcagaggttttggggttcagggtgctgtgtctccccttgcctgtgcccaggtcatcccaaacccttctgttatttattagggctgtgggaagggtttttcttctttttcttggaacctgcccctgttcttcacactgccccccatgcctcagcctcatacagatgtgccatcatggggggcatgggtggagcagaggggctccctcaccccgggcaggcaaaggcagtgggtagaggaggcactgcccccctttcctgccccctcctcatctttaataaagacctggcttctcatctttaataaagacctgtttgtaacagaaaaaattggccat

SEQ ID NO: 305851 - DNA, 2492 bp, Homo sapiens
aaaaaaagtctgcgcggcgcggccaggcccggccgaccgcgtctcggtcttcgcgtctgccagcctggctggcagtccgtctgtccatcccgccgcgccggggcagtctaggcggagcgggggctcaggcggcggcggcctcgacgcgagtgagtgtcgtggttggggtgctggacccagagtgcctaccctcgcctgcctgggcctcagtttccacatctgcacaatgggggtgaccatccctgccctgctggctgccaggagcggctgtgagtcttcaggcgtggatgcagcctgggggaagccatagggcgctttcacaggcctggccttcaccatggcgggagggagaccgcatctgaagaggagtttctccatcatcccctgctttgtcttcgtggagtcggtgctgctgggcattgtgatcctgcttgcttaccgcctggagttcacggacaccttccctgtgcacacccagggattcttctgctatgacagtacctacgccaagccctacccagggcctgaggctgccagccgagtgcctcctgctcttgtctacgcactggtcactgccgggcccaccctcacgatcctgctgggagagctggcgcgtgcctttttccctgcaccaccttcagccgtcccagtcatcggggagagcaccatcgtgtctggggcctgctgccgcttcagccccccagtgcggaggctggtccgcttcctgggggtctactccttcggcctcttcaccacgaccatcttcgccaacgcggggcaggtggtgaccggcaatcccacgccacacttcctgtccgtgtgccgccccaactacacggccctgggctgcctgccaccttctccggatcggccaggtcccgaccgctttgtcactgaccagggtgcctgcgctggcagtcccagcctcgtggccgccgcgcgccgcgccttcccctgcaaggatgcggccctctgcgcctacgcggtcacctacacagcgggccaccctctggccgaaggctctctccctgggaggacctgggccaagcccccaccatggatagccccctcgaaaagaacccgaggtctgcaggccgcattcgacaccggcacggctcaccccatccaagtcgcagaactgcgcccgccgtggccacctgatccccagctgtgtctcctccagggccccagccatgtgttcgtcgccccgtgtgccccgtcctcgattgaggtctgagccgacgcccttgcccctgcccctacccctgccagcgcccacccccagccagggcccctcgccttcctcccctggacctggggggccaggcgggggtggtggacgtggccggaagctgctgctgcccacgcccctgctgcgggacctgtacaccctgagtggactctatccctcccccttccaccgggacaacttcagcccttacctgtttgccagccgtgaccacctgctgtgaggcccgaccacccacccagaatctgcccagtccccacttcttccctgccacgcgtgtgtgtgcgtgtgccacgtgagtgccaaagtcccctgccccccaagccagccagacccagacattagaagatggctagaaggacatttaggagacatctgcctctctggccctctgagatatcccgatgggcacaaatggaaggtgcgcacttgcccctactattgcccttttaagggccaaagcttgaccccattggccattgcctggctaatgagaacccctggttctcagaattttaaccaaaaggagttggctccaaccaatgggagccttcccctcacttcttagaatcctcctgcaagagggcaactccagccagtgttcagcgactgaacagccaataggagcccttggtttccagaatttctagagtgggtgggcatgattccagtcaatgggggaccgcccgtgtctaagcatgtgcaaaggagaggagggagatgaggtcattgtttgtcattgagtcttctctcagaatcagcgagcccagctgtagggtggggggcaggctcccccatggcagggtccttggggtaccccttttcctctcagcccctccctgtgtgcggcctctccacctctcacccactctctcctaatcccctacttaagtagggcttgccccacttcagaggttttggggttcagggtgctgtgtctccccttgcctgtgcccaggtcatcccaaacccttctgttatttattagggctgtgggaagggtttttcttctttttcttggaacctgcccctgttcttcacactgccccccatgcctcagcctcatacagatgtgccatcatggggggcatgggtggagcagaggggctccctcaccccgggcaggcaaaggcagtgggtagaggaggcactgcccccctttcctgccccctcctcatctttaataaagacctggcttctcatctttaataaagacctgtttgtaacagaaaaaattggccat

SEQ ID NO: 305852 - DNA, 2620 bp, Homo sapiens
  misc_feature (6)..(6): n is a, c, g, or t
tgaaanagacactaggctaggtacgaggcctgggtggtggggggctcaggcggcggcggctcgacgcgagtgagtgtcgtggttggggtgctggacccagagtgcctaccctcgcctgcctgggcctcagtttccacatctgcacaatgggggtgaccatccctgccctgctggctgccaggagcggctgtgagtcttcaggcgtggatgcagcctgggggaagccatagggcgctttcacaggcctggccttcaccatggcgggagggagaccgcatctgaagaggagtttctccatcatcccctgctttgtcttcgtggagtcggtgctgctgggcattgtgatcctgcttgcttaccgcctggagttcacggacaccttccctgtgcacacccagggattcttctgctatgacagtacctacgccaagccctacccagggcctgaggctgccagccgagtgcctcctgctcttgtctacgcactggtcactgccgggcccaccctcacgatcctgctgggagagctggcgcgtgcctttttccctgcaccaccttcagccgtcccagtcatcggggagagcaccatcgtgtctggggcctgctgccgcttcagccccccagtgcggaggctggtccgcttcctgggggtctactccttcggcctcttcaccacgaccatcttcgccaacgcggggcaggtggtgaccggcaatcccacgccacacttcctgtccgtgtgccgccccaactacacggccctgggctgcctgccaccttctccggatcggccaggtcccgaccgctttgtcactgaccagggtgcctgcgctggcagtcccagcctcgtggccgccgcgcgccgcgccttcccctgcaaggatgcggccctctgcgcctacgcggtcacctacacagcgatgtacgtgactctcgtgttccgcgtgaagggctcccgcctggtcaaaccctcgctctgcctggccttgctgtgcccggccttcctggtgggcgtggtccgcgtggccgagtaccgaaaccactggtcggacgtgctggctggcttcctgacaggggcggccatcgccacctttttggtcacctgcgttgtgcataactttcagagccggccaccctctggccgaaggctctctccctgggaggacctgggccaagcccccaccatggatagccccctcgaaaagaacccgaggtctgcaggccgcattcgacaccggcacggctcaccccatccaagtcgcagaactgcgcccgccgtggccacctgatccccagctgtgtctcctccagggccccagccatgtgttcgtcgccccgtgtgccccgtcctcgattgaggtctgagccgacgcccttgcccctgcccctacccctgccagcgcccacccccagccagggcccctcgccttcctcccctggacctggggggccaggcgggggtggtggacgtggccggaagctgctgctgcccacgcccctgctgcgggacctgtacaccctgagtggactctatccctcccccttccaccgggacaacttcagcccttacctgtttgccagccgtgaccacctgctgtgaggcccgaccacccacccagaatctgcccagtccccacttcttccctgccacgcgtgtgtgtgcgtgtgccacgtgagtgccaaagtcccctgccccccaagccagccagacccagacattagaagatggctagaaggacatttaggagacatctgcctctctggccctctgagatatcccgatgggcacaaatggaaggtgcgcacttgcccctactattgcccttttaagggccaaagcttgaccccattggccattgcctggctaatgagaacccctggttctcagaattttaaccaaaaggagttggctccaaccaatgggagccttcccctcacttcttagaatcctcctgcaagagggcaactccagccagtgttcagcgactgaacagccaataggagcccttggtttccagaatttctagagtgggtgggcatgattccagtcaatgggggaccgcccgtgtctaagcatgtgcaaaggagaggagggagatgaggtcattgtttgtcattgagtcttctctcagaatcagcgagcccagctgtagggtggggggcaggctcccccatggcagggtccttggggtaccccttttcctctcagcccctccctgtgtgcggcctctccacctctcacccactctctcctaatcccctacttaagtagggcttgccccacttcagaggttttggggttcagggtgctgtgtctccccttgcctgtgcccaggtcatcccaaacccttctgttatttattagggctgtgggaagggtttttcttctttttcttggaacctgcccctgttcttcacactgccccccatgcctcagcctcatacagatgtgccatcatggggggcatgggtggagcagaggggctccctcaccccgggcaggcaaaggcagtgggtagaggaggcactgcccccctttcctgccccctcctcatctttaataaagacctggcttctcatctttaataaagacctgtttgtaacagaaaaaattggccat

SEQ ID NO: 305853 - DNA, 2609 bp, Homo sapiens
aactaatacggctagacatgctcgtggtgagggctcagcggcggcggactcgacgcgagtgagtgtcgtggttggggtgctggacccagagtgcctaccctcgcctgcctgggcctcagtttccacatctgcacaatgggggtgaccatccctgccctgctggctgccaggagcggctgtgagtcttcaggcgtggatgcagcctgggggaagccatagggcgctttcacaggcctggccttcaccatggcgggagggagaccgcatctgaagaggagtttctccatcatcccctgctttgtcttcgtggagtcggtgctgctgggcattgtgatcctgcttgcttaccgcctggagttcacggacaccttccctgtgcacacccagggattcttctgctatgacagtacctacgccaagccctacccagggcctgaggctgccagccgagtgcctcctgctcttgtctacgcactggtcactgccgggcccaccctcacgatcctgctgggagagctggcgcgtgcctttttccctgcaccaccttcagccgtcccagtcatcggggagagcaccatcgtgtctggggcctgctgccgcttcagccccccagtgcggaggctggtccgcttcctgggggtctactccttcggcctcttcaccacgaccatcttcgccaacgcggggcaggtggtgaccggcaatcccacgccacacttcctgtccgtgtgccgccccaactacacggccctgggctgcctgccaccttctccggatcggccaggtcccgaccgctttgtcactgaccagggtgcctgcgctggcagtcccagcctcgtggccgccgcgcgccgcgccttcccctgcaaggatgcggccctctgcgcctacgcggtcacctacacagcgatgtacgtgactctcgtgttccgcgtgaagggctcccgcctggtcaaaccctcgctctgcctggccttgctgtgcccggccttcctggtgggcgtggtccgcgtggccgagtaccgaaaccactggtcggacgtgctggctggcttcctgacaggggcggccatcgccacctttttggtcacctgcgttgtgcataactttcagagccggccaccctctggccgaaggctctctccctgggaggacctgggccaagcccccaccatggatagccccctcgaaaagaacccgaggtctgcaggccgcattcgacaccggcacggctcaccccatccaagtcgcagaactgcgcccgccgtggccacctgatccccagctgtgtctcctccagggccccagccatgtgttcgtcgccccgtgtgccccgtcctcgattgaggtctgagccgacgcccttgcccctgcccctacccctgccagcgcccacccccagccagggcccctcgccttcctcccctggacctggggggccaggcgggggtggtggacgtggccggaagctgctgctgcccacgcccctgctgcgggacctgtacaccctgagtggactctatccctcccccttccaccgggacaacttcagcccttacctgtttgccagccgtgaccacctgctgtgaggcccgaccacccacccagaatctgcccagtccccacttcttccctgccacgcgtgtgtgtgcgtgtgccacgtgagtgccaaagtcccctgccccccaagccagccagacccagacattagaagatggctagaaggacatttaggagacatctgcctctctggccctctgagatatcccgatgggcacaaatggaaggtgcgcacttgcccctactattgcccttttaagggccaaagcttgaccccattggccattgcctggctaatgagaacccctggttctcagaattttaaccaaaaggagttggctccaaccaatgggagccttcccctcacttcttagaatcctcctgcaagagggcaactccagccagtgttcagcgactgaacagccaataggagcccttggtttccagaatttctagagtgggtgggcatgattccagtcaatgggggaccgcccgtgtctaagcatgtgcaaaggagaggagggagatgaggtcattgtttgtcattgagtcttctctcagaatcagcgagcccagctgtagggtggggggcaggctcccccatggcagggtccttggggtaccccttttcctctcagcccctccctgtgtgcggcctctccacctctcacccactctctcctaatcccctacttaagtagggcttgccccacttcagaggttttggggttcagggtgctgtgtctccccttgcctgtgcccaggtcatcccaaacccttctgttatttattagggctgtgggaagggtttttcttctttttcttggaacctgcccctgttcttcacactgccccccatgcctcagcctcatacagatgtgccatcatggggggcatgggtggagcagaggggctccctcaccccgggcaggcaaaggcagtgggtagaggaggcactgcccccctttcctgccccctcctcatctttaataaagacctggcttctcatctttaataaagacctgtttgtaacagaaaaaattggccat

SEQ ID NO: 305854 - DNA, 2625 bp, Homo sapiens
aaaaaaagtctgcgcggcgcggccaggcccggccgaccgcgtctcggtcttcgcgtctgccagcctggctggcagtccgtctgtccatcccgccgcgccggggcagtctaggcggagcgggggctcaggcggcggcggcctcgacgcgagtgagtgtcgtggttggggtgctggacccagagtgcctaccctcgcctgcctgggcctcagtttccacatctgcacaatgggggtgaccatccctgccctgctggctgccaggagcggctgtgagtcttcaggcgtggatgcagcctgggggaagccatagggcgctttcacaggcctggccttcaccatggcgggagggagaccgcatctgaagaggagtttctccatcatcccctgctttgtcttcgtggagggattcttctgctatgacagtacctacgccaagccctacccagggcctgaggctgccagccgagtgcctcctgctcttgtctacgcactggtcactgccgggcccaccctcacgatcctgctgggagagctggcgcgtgcctttttccctgcaccaccttcagccgtcccagtcatcggggagagcaccatcgtgtctggggcctgctgccgcttcagccccccagtgcggaggctggtccgcttcctgggggtctactccttcggcctcttcaccacgaccatcttcgccaacgcggggcaggtggtgaccggcaatcccacgccacacttcctgtccgtgtgccgccccaactacacggccctgggctgcctgccaccttctccggatcggccaggtcccgaccgctttgtcactgaccagggtgcctgcgctggcagtcccagcctcgtggccgccgcgcgccgcgccttcccctgcaaggatgcggccctctgcgcctacgcggtcacctacacagcgatgtacgtgactctcgtgttccgcgtgaagggctcccgcctggtcaaaccctcgctctgcctggccttgctgtgcccggccttcctggtgggcgtggtccgcgtggccgagtaccgaaaccactggtcggacgtgctggctggcttcctgacaggggcggccatcgccacctttttggtcacctgcgttgtgcataactttcagagccggccaccctctggccgaaggctctctccctgggaggacctgggccaagcccccaccatggatagccccctcgaaaagaacccgaggtctgcaggccgcattcgacaccggcacggctcaccccatccaagtcgcagaactgcgcccgccgtggccacctgatccccagctgtgtctcctccagggccccagccatgtgttcgtcgccccgtgtgccccgtcctcgattgaggtctgagccgacgcccttgcccctgcccctacccctgccagcgcccacccccagccagggcccctcgccttcctcccctggacctggggggccaggcgggggtggtggacgtggccggaagctgctgctgcccacgcccctgctgcgggacctgtacaccctgagtggactctatccctcccccttccaccgggacaacttcagcccttacctgtttgccagccgtgaccacctgctgtgaggcccgaccacccacccagaatctgcccagtccccacttcttccctgccacgcgtgtgtgtgcgtgtgccacgtgagtgccaaagtcccctgccccccaagccagccagacccagacattagaagatggctagaaggacatttaggagacatctgcctctctggccctctgagatatcccgatgggcacaaatggaaggtgcgcacttgcccctactattgcccttttaagggccaaagcttgaccccattggccattgcctggctaatgagaacccctggttctcagaattttaaccaaaaggagttggctccaaccaatgggagccttcccctcacttcttagaatcctcctgcaagagggcaactccagccagtgttcagcgactgaacagccaataggagcccttggtttccagaatttctagagtgggtgggcatgattccagtcaatgggggaccgcccgtgtctaagcatgtgcaaaggagaggagggagatgaggtcattgtttgtcattgagtcttctctcagaatcagcgagcccagctgtagggtggggggcaggctcccccatggcagggtccttggggtaccccttttcctctcagcccctccctgtgtgcggcctctccacctctcacccactctctcctaatcccctacttaagtagggcttgccccacttcagaggttttggggttcagggtgctgtgtctccccttgcctgtgcccaggtcatcccaaacccttctgttatttattagggctgtgggaagggtttttcttctttttcttggaacctgcccctgttcttcacactgccccccatgcctcagcctcatacagatgtgccatcatggggggcatgggtggagcagaggggctccctcaccccgggcaggcaaaggcagtgggtagaggaggcactgcccccctttcctgccccctcctcatctttaataaagacctggcttctcatctttaataaagacctgtttgtaacagaaaaaattggccat

SEQ ID NO: 305855 - DNA, 2800 bp, Homo sapiens
aaaaaaagtctgcgcggcgcggccaggcccggccgaccgcgtctcggtcttcgcgtctgccagcctggctggcagtccgtctgtccatcccgccgcgccggggcagtctaggcggagcgggggctcaggcggcggcggcctcgacgcgagtgagtgtcgtggttggggtgctggacccagagtgcctaccctcgcctgcctgggcctcagtttccacatctgcacaatgggggtgaccatccctgccctgctggctgccaggagcggctgtgagtcttcaggcgtggatgcagcctgggggaagccatagggcgctttcacaggcctggccttcaccatggcgggagggagaccgcatctgaagaggagtttctccatcatcccctgctttgtcttcgtggagtcggtgctgctgggcattgtgatcctgcttgcttaccgcctggagttcacggacaccttccctgtgcacacccagggattcttctgctatgacagtacctacgccaagccctacccagggcctgaggctgccagccgagtgcctcctgctcttgtctacgcactggtcactgccgggcccaccctcacggtgagacaatgaagacctcctaggaggcaggtgggccggtaagggtgggtgaggggatgggctggaaggccagaagactccatcttggtcttgcccacagatcctgctgggagagctggcgcgtgcctttttccctgcaccaccttcagccgtcccagtcatcggggagagcaccatcgtgtctggggcctgctgccgcttcagccccccagtgcggaggctggtccgcttcctgggggtctactccttcggcctcttcaccacgaccatcttcgccaacgcggggcaggtggtgaccggcaatcccacgccacacttcctgtccgtgtgccgccccaactacacggccctgggctgcctgccaccttctccggatcggccaggtcccgaccgctttgtcactgaccagggtgcctgcgctggcagtcccagcctcgtggccgccgcgcgccgcgccttcccctgcaaggatgcggccctctgcgcctacgcggtcacctacacagcgatgtacgtgactctcgtgttccgcgtgaagggctcccgcctggtcaaaccctcgctctgcctggccttgctgtgcccggccttcctggtgggcgtggtccgcgtggccgagtaccgaaaccactggtcggacgtgctggctggcttcctgacaggggcggccatcgccacctttttggtcacctgcgttgtgcataactttcagagccggccaccctctggccgaaggctctctccctgggaggacctgggccaagcccccaccatggatagccccctcgaaaagaacccgaggtctgcaggccgcattcgacaccggcacggctcaccccatccaagtcgcagaactgcgcccgccgtggccacctgatccccagctgtgtctcctccagggccccagccatgtgttcgtcgccccgtgtgccccgtcctcgattgaggtctgagccgacgcccttgcccctgcccctacccctgccagcgcccacccccagccagggcccctcgccttcctcccctggacctggggggccaggcgggggtggtggacgtggccggaagctgctgctgcccacgcccctgctgcgggacctgtacaccctgagtggactctatccctcccccttccaccgggacaacttcagcccttacctgtttgccagccgtgaccacctgctgtgaggcccgaccacccacccagaatctgcccagtccccacttcttccctgccacgcgtgtgtgtgcgtgtgccacgtgagtgccaaagtcccctgccccccaagccagccagacccagacattagaagatggctagaaggacatttaggagacatctgcctctctggccctctgagatatcccgatgggcacaaatggaaggtgcgcacttgcccctactattgcccttttaagggccaaagcttgaccccattggccattgcctggctaatgagaacccctggttctcagaattttaaccaaaaggagttggctccaaccaatgggagccttcccctcacttcttagaatcctcctgcaagagggcaactccagccagtgttcagcgactgaacagccaataggagcccttggtttccagaatttctagagtgggtgggcatgattccagtcaatgggggaccgcccgtgtctaagcatgtgcaaaggagaggagggagatgaggtcattgtttgtcattgagtcttctctcagaatcagcgagcccagctgtagggtggggggcaggctcccccatggcagggtccttggggtaccccttttcctctcagcccctccctgtgtgcggcctctccacctctcacccactctctcctaatcccctacttaagtagggcttgccccacttcagaggttttggggttcagggtgctgtgtctccccttgcctgtgcccaggtcatcccaaacccttctgttatttattagggctgtgggaagggtttttcttctttttcttggaacctgcccctgttcttcacactgccccccatgcctcagcctcatacagatgtgccatcatggggggcatgggtggagcagaggggctccctcaccccgggcaggcaaaggcagtgggtagaggaggcactgcccccctttcctgccccctcctcatctttaataaagacctggcttctcatctttaataaagacctgtttgtaacagaaaaaattggccat

SEQ ID NO: 305856 - DNA, 2209 bp, Homo sapiens
aaaaaaagtctgcgcggcgcggccaggcccggccgaccgcgtctcggtcttcgcgtctgccagcctggctggcagtccgtctgtccatcccgccgcgccggggcagtctaggcggagcgggggctcaggcggcggcggcctcgacgcgagtgagtgtcgtggttggggtgctggacccagagtgcctaccctcgcctgcctgggcctcagtttccacatctgcacaatgggggtgaccatccctgccctgctggctgccaggagcggctgtgagtcttcaggcgtggatgcagcctgggggaagccatagggcgctttcacaggcctggccttcaccatggcgggagggagaccgcatctgaagaggagtttctccatcatcccctgctttgtcttcgtggagtgaccagggtgcctgcgctggcagtcccagcctcgtggccgccgcgcgccgcgccttcccctgcaaggatgcggccctctgcgcctacgcggtcacctacacagcgatgtacgtgactctcgtgttccgcgtgaagggctcccgcctggtcaaaccctcgctctgcctggccttgctgtgcccggccttcctggtgggcgtggtccgcgtggccgagtaccgaaaccactggtcggacgtgctggctggcttcctgacaggggcggccatcgccacctttttggtcacctgcgttgtgcataactttcagagccggccaccctctggccgaaggctctctccctgggaggacctgggccaagcccccaccatggatagccccctcgaaaagaacccgaggtctgcaggccgcattcgacaccggcacggctcaccccatccaagtcgcagaactgcgcccgccgtggccacctgatccccagctgtgtctcctccagggccccagccatgtgttcgtcgccccgtgtgccccgtcctcgattgaggtctgagccgacgcccttgcccctgcccctacccctgccagcgcccacccccagccagggcccctcgccttcctcccctggacctggggggccaggcgggggtggtggacgtggccggaagctgctgctgcccacgcccctgctgcgggacctgtacaccctgagtggactctatccctcccccttccaccgggacaacttcagcccttacctgtttgccagccgtgaccacctgctgtgaggcccgaccacccacccagaatctgcccagtccccacttcttccctgccacgcgtgtgtgtgcgtgtgccacgtgagtgccaaagtcccctgccccccaagccagccagacccagacattagaagatggctagaaggacatttaggagacatctgcctctctggccctctgagatatcccgatgggcacaaatggaaggtgcgcacttgcccctactattgcccttttaagggccaaagcttgaccccattggccattgcctggctaatgagaacccctggttctcagaattttaaccaaaaggagttggctccaaccaatgggagccttcccctcacttcttagaatcctcctgcaagagggcaactccagccagtgttcagcgactgaacagccaataggagcccttggtttccagaatttctagagtgggtgggcatgattccagtcaatgggggaccgcccgtgtctaagcatgtgcaaaggagaggagggagatgaggtcattgtttgtcattgagtcttctctcagaatcagcgagcccagctgtagggtggggggcaggctcccccatggcagggtccttggggtaccccttttcctctcagcccctccctgtgtgcggcctctccacctctcacccactctctcctaatcccctacttaagtagggcttgccccacttcagaggttttggggttcagggtgctgtgtctccccttgcctgtgcccaggtcatcccaaacccttctgttatttattagggctgtgggaagggtttttcttctttttcttggaacctgcccctgttcttcacactgccccccatgcctcagcctcatacagatgtgccatcatggggggcatgggtggagcagaggggctccctcaccccgggcaggcaaaggcagtgggtagaggaggcactgcccccctttcctgccccctcctcatctttaataaagacctggcttctcatctttaataaagacctgtttgtaacagaaaaaattggccat

SEQ ID NO: 305857 - DNA, 1734 bp, Homo sapiens
aaaaaaagtctgcgcggcgcggccaggcccggccgaccgcgtctcggtcttcgcgtctgccagcctggctggcagtccgtctgtccatcccgccgcgccggggcagtctaggcggagcgggggctcaggcggcggcggcctcgacgcgagtgagtgtcgtggttggggtgctggacccagagtgcctaccctcgcctgcctgggcctcagtttccacatctgcacaatgggggtgaccatccggccaccctctggccgaaggctctctccctgggaggacctgggccaagcccccaccatggatagccccctcgaaaagaacccgaggtctgcaggccgcattcgacaccggcacggctcaccccatccaagtcgcagaactgcgcccgccgtggccacctgatccccagctgtgtctcctccagggccccagccatgtgttcgtcgccccgtgtgccccgtcctcgattgaggtctgagccgacgcccttgcccctgcccctacccctgccagcgcccacccccagccagggcccctcgccttcctcccctggacctggggggccaggcgggggtggtggacgtggccggaagctgctgctgcccacgcccctgctgcgggacctgtacaccctgagtggactctatccctcccccttccaccgggacaacttcagcccttacctgtttgccagccgtgaccacctgctgtgaggcccgaccacccacccagaatctgcccagtccccacttcttccctgccacgcgtgtgtgtgcgtgtgccacgtgagtgccaaagtcccctgccccccaagccagccagacccagacattagaagatggctagaaggacatttaggagacatctgcctctctggccctctgagatatcccgatgggcacaaatggaaggtgcgcacttgcccctactattgcccttttaagggccaaagcttgaccccattggccattgcctggctaatgagaacccctggttctcagaattttaaccaaaaggagttggctccaaccaatgggagccttcccctcacttcttagaatcctcctgcaagagggcaactccagccagtgttcagcgactgaacagccaataggagcccttggtttccagaatttctagagtgggtgggcatgattccagtcaatgggggaccgcccgtgtctaagcatgtgcaaaggagaggagggagatgaggtcattgtttgtcattgagtcttctctcagaatcagcgagcccagctgtagggtggggggcaggctcccccatggcagggtccttggggtaccccttttcctctcagcccctccctgtgtgcggcctctccacctctcacccactctctcctaatcccctacttaagtagggcttgccccacttcagaggttttggggttcagggtgctgtgtctccccttgcctgtgcccaggtcatcccaaacccttctgttatttattagggctgtgggaagggtttttcttctttttcttggaacctgcccctgttcttcacactgccccccatgcctcagcctcatacagatgtgccatcatggggggcatgggtggagcagaggggctccctcaccccgggcaggcaaaggcagtgggtagaggaggcactgcccccctttcctgccccctcctcatctttaataaagacctggcttctcatctttaataaagacctgtttgtaacagaaaaaattggccat

SEQ ID NO: 305858 - DNA, 2297 bp, Homo sapiens
aaaaaaagtctgcgcggcgcggccaggcccggccgaccgcgtctcggtcttcgcgtctgccagcctggctggcagtccgtctgtccatcccgccgcgccggggcagtctaggcggagcgggggctcaggcggcggcggcctcgacgcgagtgagtgtcgtggttggggtgctggacccagagtgcctaccctcgcctgcctgggcctcagtttccacatctgcacaatgggggtgaccatccctgccctgctggctgccaggagcggctgtgagtcttcaggcgtggatgcagcctgggggaagccatagggcgctttcacaggcctggccttcaccatggcgggagggagaccgcatctgaagaggagtttctccatcatcccctgctttgtcttcgtggagtcggtgctgctgggcattgtgatcctgcttgcttaccgcctggagttcacggacaccttccctgtgcacacccagggattcttctgctatgacagtacctacgccaagccctacccagggcctgaggctgccagccgagtgcctcctgctcttgtctacgcactggtcactgccgggcccaccctcacgatcctgctgggagagctggcgcgtgcctttttccctgcaccaccttcagccgtcccagtcatcggggagagcaccatcgtgtctggggcctgctgccgcttcagccccccagtgcggaggctggtccgcttcctgggggtctactccttcggcctcttcaccacgaccatcttcgccaacgcggggcaggtggtgaccggcaatcccacgccacacttcctgtccgtgtgccgccccaactacacggccctgggctgcctgccaccttctccggatcggccaggtcccgaccgctttgtcactgaccagggtgcctgcgctggcagtcccagcctcgtggccgccgcgcgccgcgccttcccctgcaaggatgcggccctctgcgcctacgcggtcacctacacagcgatgtacgtgactctcgtgttccgcgtgaagggctcccgcctggtcaaaccctcgctctgcctggccttgctgtgcccggccttcctggtgggcgtggtccgcgtggccgagtaccgaaaccactggtcggacgtgctggctggcttcctgacaggggcggccatcgccacctttttggtcacctgcgttgtgcataactttcagagccggccaccctctggccgaaggctctctccctgggaggacctgggccaagcccccaccatggatagccccctcgaaaagaacccgaggtctgcaggccgcattcgacaccggcacggctcaccccatccaagtcgcagaactgcgcccgccgtggccacctgatccccagctgtgtctcctccagggccccagccatgtgttcgtcgccccgtgtgccccgtcctcgattgaggtctgagccgacgcccttgcccctgcccctacccctgccagcgcccacccccagccagggcccctcgccttcctcccctggacctggggggccaggcgggggtggtggacgtggccggaagctgctgctgcccacgcccctgctgcgggacctgtacaccctgagtggactctatccctcccccttccaccgggacaacttcagcccttacctgtttgccagccgtgaccacctgctgtgaggcccgaccacccacccagaatctgcccagtccccacttcttccctgccacgcgtgtgtgtgcgtgtgccacgtgagtgccaaagtcccctgccccccaagccagccagacccagacattagaagatggctagaaggacatttaggagacatctgcctctctggccctctgagatatcccgatgggcacaaatggaaggtgcgcacttgcccctactattgcccttttaagggccaaagcttgaccccattggccattgcctggctaatgagaacccctggttctcagaattttaaccaaaaggagttggctccaaccaatgggagccttcccctcacttcttagaatcctcctgcaagagggcaactccagccagtgttcagcgactgaacagccaataggagcccttggtttccagaatttctagagtgggtgggcatgattccagtcaatgggggaccgcccgtgtctaagcatgtgcaaaggagaggagggagatgaggtcattgtttgtcattgagtcttctctcagaatcagcgacccctcctcatctttaataaagacctggcttctcatctttaataaagacctgtttgtaacagaaaaaattggccat

SEQ ID NO: 305859 - DNA, 288 bp, Homo sapiens
ggtctcagaaccatggggaagtggagggatcacccatctctgtggacataggtcctgggcggacagccccaaagaatgaaagggagcacccccgtcttcttcccagggggacacggttaatcatgagaactgtggttgtcttttccatggggctcttcacctgatgagctccttgtggctgtggccggtagggcccagggggccactagccccttccgtctgtctctttgtctcaggaacccgaggtctgcaggccgcattcgacaccggcacggctcaccccatcca

SEQ ID NO: 305860 - DNA, 1349 bp, Homo sapiens
gttttataaatggggtagggaccaactgaaagacaggaaaataaggcccttgatgccattaatcttttatcctcttgccctcattggtatcttcatcccaccttgggtcccagtcccctctcctgttcccacaccacctgtcacatgcaagggatgatggctgtctgctcctgggtctatgctttgtggaagaaggatgctgtggagggagcatatccaagctctaaagtggcattctctcccaccctttgcagttctgcctcctgggggcattgctggcccccatccgagtgcttctggcctttatcgtcctctttctcctctggccctttgcctggcttcaagtggccggtcttagtgaggagcagcttcaggagccaattacaggatggaggaagtaagtgagggatcagcccccagagaccctacttctcttccctgctgtctattcggctccctctttgagaagaagaaaagagagcattctgaaactattctgtctagcttgggtagatgagatgagtcagccaagctcagacgtggttcccagacctcacctctaagtaatgtgccctgataggtcccaaagtggccagagaccttggccccttggtcacatcctatttaagggtaaaagaggggtgccctactttcccggtgtctgaacctgggggcgggtgagggttagaaccactgcttccgctgatacccagccttgccctggcaggactgtgtgccacaacggggtgctaggcctgagccgcctgctgtttttcctgctgggcttcctccggattcgcgttcgtggccagcgagcctctcgccttcaagcccctgtccttgttgctgccccacactccactttctttgaccccattgttctgctgccctgtgacctgcccaaagttgtgtcccgagctgagaacctttccgttcctgtcattggaggtgagagagttcaaagggggtgaagggcagggtgacaactctgggcaaaaaaagtcaggaatggagacactggagtgaagaactggcctcaaagtggggagggactgttggcaagtgaaatataaattaacaccattagtcaaccagtcttagattctgagggctgggacagagagaaggtgttggagggagttctggtcagttctctaaaaggacaactactataaagggattgtcccagggcaaagataacaggccaggcacggtggctcgcgcctataatcccagcacgttgggaggccaaggcgggcggatcacctgaggtcgggagttcgagaccagcctgaccaacatggagaaaccctgtctctactaaaaatacaaaaaaagtagccgggcgt

SEQ ID NO: 305861 - DNA, 407 bp, Homo sapiens
cggccgcggttgggcaaggagtcctggagaggacgctgcgggcttgggcgatagacaagctcgaagatgtggaaaaactgagtaggtggggatggagggctgcaggggaccctggggttggagagatgaaggacgctggggaatgcggattacattctgcagagcctgatggctaggatggagttagagtctacgggaagccgggggtgggggcgggggcgggggcgtgccgagtattcctccgaggcatgacttagagggaagacgtttctgggccgggagcctgcgaccctgtgcccttcctacactccctcttcccactccctccaacccccctccaccccgcactgcagcacctcccggtgggggcagggaggctgagagggaggttggctacaggaagtgga

SEQ ID NO: 305862 - DNA, 243 bp, Homo sapiens
  misc_feature (3)..(3): n is a, c, g, or t
  misc_feature (20)..(20): n is a, c, g, or t
  misc_feature (22)..(22): n is a, c, g, or t
  misc_feature (36)..(36): n is a, c, g, or t
  misc_feature (49)..(49): n is a, c, g, or t
  misc_feature (62)..(62): n is a, c, g, or t
  misc_feature (93)..(93): n is a, c, g, or t
  misc_feature (95)..(95): n is a, c, g, or t
ccnctcctcacacacacacncnctcacacacacacncacagggacacgncgcctaggggccncccccctatgccactccagacacaccatacncncccatcctgtttgaattttgttattgttgtttggttgttgtttttttaagttgattttaattttttgtttggttgatttttttgtaaaaaactattttatatataaatataaatctatatctatatctattaaaaaaaatgaagtcca

SEQ ID NO: 305863 - DNA, 2307 bp, Homo sapiens
tgcgccgcctgctccccgcccctcggccgcctgcaccgggcggggcccgggccagagcgccgccgccgccgctgctgcagcagcagctgctctgcagagtggtggccggggccagggccggggtgccctccctcccaccttctcccgccatgagccagggaagtccgggggactgggcccccctagatcccacccccggacccccagcatcccccaaccccttcgtgcatgagttacatctctctcgcctccagagggttaagttctgcctcctgggggcattgctggcccccatccgagtgcttctggcctttatcgtcctctttctcctctggccctttgcctggcttcaagtggccggtcttagtgaggagcagcttcaggagccaattacaggatggaggaagactgtgtgccacaacggggtgctaggcctgagccgcctgctgtttttcctgctgggcttcctccggattcgcgttcgtggccagcgagcctctcgccttcaagcccctgtccttgttgctgccccacactccactttctttgaccccattgttctgctgccctgtgacctgcccaaagttgtgtcccgagctgagaacctttccgttcctgtcattggagcccttcttcgattcaaccaagccatcctggtatcccggcatgacccggcttctcgacgcagagtggtggaggaggtccgaaggcgggccacctcaggaggcaagtggccgcaggtgctattctttcctgagggcacctgttccaacaagaaggctttgcttaagttcaaaccaggagccttcatcgcaggggtgcctgtgcagcctgtcctcatccgctaccccaacagtctggacaccaccagctgggcatggaggggtcctggagtactcaaagtcctctggctcacagcctctcagccctgcagcattgtggatgtggagttccttcctgtgtatcaccccagccctgaggagagcagggaccccaccctctatgccaacaatgttcagagggtcatggcacaggctctgggcattccagccaccgaatgtgagtttgtagggagcttacctgtgattgtggtgggccggctgaaggtggcgttggaaccacagctctgggaactgggaaaagtgcttcggaaggctgggctgtccgctggctatgtggacgctggggcagagccaggccggagtcgaatgatcagccaggaagagtttgccaggcagctacagctctctgatcctcagacggtggctggtgcctttggctacttccagcaggataccaagggtttggtggacttccgagatgtggcccttgcactagcagctctggatgggggcaggagcctggaagagctaactcgtctggcctttgaggtaatggggggtggcggtggtggggggtgcttagtggctatgctcaccccgctccaggaggcctattttggtatgctgtttccagtagcttctagatactaggcatttggtatccaacctagtgccacagtgcctaaaactgcagacccccggcctctatgttgagacctagctgggcacaagaagaaggaagaagaaggaaaaagctataaagtctacagttctgcagaaagggcactggagggtcagggaaggcttgtgcaccacccttttggaagaggaggagcctgtcaggccagtctgtggggcagggtgaggccatggcatgaggagagaacttgactcttatccctttctctcccaagctctttgctgaagagcaagcagagggtcccaaccgcctgctgtacaaagacggcttcagcaccatcctgcacctgctgctgggttcaccccaccctgctgccacagctttgcatgctgagctgtgccaggcaggatccagccaaggcctctccctctgtcagttccagaacttctccctccatgacccactctatgggaaactcttcagcacctacctgcgccccccacacacctctcgaggcacctcccagacaccaaatgcctcatccccaggcaaccccactgctctggccaatgggactgtgcaagcacccaagcagaagggagactgagtgcctcagcctctcaccccctcctcctcagggcagcgctaggggcctcccctatgcctcagccccatctctgctcctgtttgaattttgttattgttgtttggttgttgtttttttaagttgattttaattttttgtttggttgatttttttgtaaaaaactattttatatataaatataaatctatatctatatctattaaaaaaaatgaagtcca

SEQ ID NO: 305864 - DNA, 1942 bp, Homo sapiens
tgcgccgcctgctccccgcccctcggccgcctgcaccgggcggggcccgggccagagcgccgccgccgccgctgctgcagcagcagctgctctgcagagtggtggccggggccagggccggggtgccctccctcccaccttctcccgccatgagccagggaagtccgggggactgggcccccctagatcccacccccggacccccagcatcccccaaccccttcgtgcatgagttacatctctctcgcctccagagggttaagttctgcctcctgggggcattgctggcccccatccgagtgcttctggcctttatcgtcctctttctcctctggccctttgcctggcttcaagtggccggtcttagtgaggagcagcttcaggagccaattacaggatggaggaagactgtgtgccacaacggggtgctaggcctgagccgcctgctgtttttcctgctgggcttcctccggattcgcgttcgtggccagcgagcctctcgccttcaagcccctgtccttgttgctgccccacactccactttctttgaccccattgttctgctgccctgtgacctgcccaaagttgtgtcccgagctgagaacctttccgttcctgtcattggagcccttcttcgattcaaccaagccatcctggtatcccggcatgacccggcttctcgacgcagagtggtggaggaggtccgaaggcgggccacctcaggaggcaagtggccgcaggtgctattctttcctgagggcacctgttccaacaagaaggctttgcttaagttcaaaccaggagccttcatcgcaggggtgcctgtgcagcctgtcctcatccgctaccccaacagtctggacaccaccagctgggcatggaggggtcctggagtactcaaagtcctctggctcacagcctctcagccctgcagcattgtggatgtggagttccttcctgtgtatcaccccagccctgaggagagcagggaccccaccctctatgccaacaatgttcagagggtcatggcacaggctctgggcattccagccaccgaatgtgagtttgtagggagcttacctgtgattgtggtgggccggctgaaggtggcgttggaaccacagctctgggaactgggaaaagtgcttcggaaggctgggctgtccgctggctatgtggacgctggggcagagccaggccggagtcgaatgatcagccaggaagagtttgccaggcagctacagctctctgatcctcagacggtggctggtgcctttggctacttccagcaggataccaagggtttggtggacttccgagatgtggcccttgcactagcagctctggatgggggcaggagcctggaagagctaactcgtctggcctttgagctctttgctgaagagcaagcagagggtcccaaccgcctgctgtacaaagacggcttcagcaccatcctgcacctgctgctgggttcaccccaccctgctgccacagctttgcatgctgagctgtgccaggcaggatccagccaaggcctctccctctgtcagttccagaacttctccctccatgacccactctatgggaaactcttcagcacctacctgcgccccccacacacctctcgaggcacctcccagacaccaaatgcctcatccccaggcaaccccactgctctggccaatgggactgtgcaagcacccaagcagaagggagactgagtgcctcagcctctcaccccctcctcctcagggcagcgctaggggcctcccctatgcctcagccccatctctgctcctgtttgaattttgttattgttgtttggttgttgtttttttaagttgattttaattttttgtttggttgatttttttgtaaaaaactattttatatataaatataaatctatatctatatctattaaaaaaaatgaagtcca

SEQ ID NO: 305865 - DNA, 2134 bp, Homo sapiens
ggggtgggatctaggggggcccccggacccccagcatcccccaaccccttcgtgcatgagttacatctctctcgcctccagagggttaagttctgcctcctgggggcattgctggcccccatccgagtgcttctggcctttatcgtcctctttctcctctggccctttgcctggcttcaagtggccggtcttagtgaggagcagcttcaggagccaattacaggatggaggaagactgtgtgccacaacggggtgctaggcctgagccgcctgctgtttttcctgctgggcttcctccggattcgcgttcgtggccagcgagcctctcgccttcaagcccctgtccttgttgctgccccacactccactttctttgaccccattgttctgctgccctgtgacctgcccaaagttgtgtcccgagctgagaacctttccgttcctgtcattggagcccttcttcgattcaaccaagccatcctggtatcccggcatgacccggcttctcgacgcagagtggtggaggaggtccgaaggcgggccacctcaggaggcaagtggccgcaggtgctattctttcctgagggcacctgttccaacaagaaggctttgcttaagttcaaaccaggagccttcatcgcaggggtgcctgtgcagcctgtcctcatccgctaccccaacagtctggacaccaccagctgggcatggaggggtcctggagtactcaaagtcctctggctcacagcctctcagccctgcagcattgtggatgtggagttccttcctgtgtatcaccccagccctgaggagagcagggaccccaccctctatgccaacaatgttcagagggtcatggcacaggctctgggcattccagccaccgaatgtgagtttgtagggagcttacctgtgattgtggtgggccggctgaaggtggcgttggaaccacagctctgggaactgggaaaagtgcttcggaaggctgggctgtccgctggctatgtggacgctggggcagagccaggccggagtcgaatgatcagccaggaagagtttgccaggcagctacagctctctgatcctcagacggtggctggtgcctttggctacttccagcaggataccaagggtttggtggacttccgagatgtggcccttgcactagcagctctggatgggggcaggagcctggaagagctaactcgtctggcctttgaggtaatggggggtggcggtggtggggggtgcttagtggctatgctcaccccgctccaggaggcctattttggtatgctgtttccagtagcttctagatactaggcatttggtatccaacctagtgccacagtgcctaaaactgcagacccccggcctctatgttgagacctagctgggcacaagaagaaggaagaagaaggaaaaagctataaagtctacagttctgcagaaagggcactggagggtcagggaaggcttgtgcaccacccttttggaagaggaggagcctgtcaggccagtctgtggggcagggtgaggccatggcatgaggagagaacttgactcttatccctttctctcccaagctctttgctgaagagcaagcagagggtcccaaccgcctgctgtacaaagacggcttcagcaccatcctgcacctgctgctgggttcaccccaccctgctgccacagctttgcatgctgagctgtgccaggcaggatccagccaaggcctctccctctgtcagttccagaacttctccctccatgacccactctatgggaaactcttcagcacctacctgcgccccccacacacctctcgaggcacctcccagacaccaaatgcctcatccccaggcaaccccactgctctggccaatgggactgtgcaagcacccaagcagaagggagactgagtgcctcagcctctcaccccctcctcctcagggcagcgctaggggcctcccctatgcctcagccccatctctgctcctgtttgaattttgttattgttgtttggttgttgtttttttaagttgattttaattttttgtttggttgatttttttgtaaaaaactattttatatataaatataaatctatatctatatctattaaaaaaaatgaagtcca

SEQ ID NO: 305866 - DNA, 2125 bp, Homo sapiens
cggccgcggttgggcaaggagtcctggagaggacgctgcgggcttgggcgatagacaagctcgaagatgtggaaaaactgattctgcctcctgggggcattgctggcccccatccgagtgcttctggcctttatcgtcctctttctcctctggccctttgcctggcttcaagtggccggtcttagtgaggagcagcttcaggagccaattacaggatggaggaagactgtgtgccacaacggggtgctaggcctgagccgcctgctgtttttcctgctgggcttcctccggattcgcgttcgtggccagcgagcctctcgccttcaagcccctgtccttgttgctgccccacactccactttctttgaccccattgttctgctgccctgtgacctgcccaaagttgtgtcccgagctgagaacctttccgttcctgtcattggagcccttcttcgattcaaccaagccatcctggtatcccggcatgacccggcttctcgacgcagagtggtggaggaggtccgaaggcgggccacctcaggaggcaagtggccgcaggtgctattctttcctgagggcacctgttccaacaagaaggctttgcttaagttcaaaccaggagccttcatcgcaggggtgcctgtgcagcctgtcctcatccgctaccccaacagtctggacaccaccagctgggcatggaggggtcctggagtactcaaagtcctctggctcacagcctctcagccctgcagcattgtggatgtggagttccttcctgtgtatcaccccagccctgaggagagcagggaccccaccctctatgccaacaatgttcagagggtcatggcacaggctctgggcattccagccaccgaatgtgagtttgtagggagcttacctgtgattgtggtgggccggctgaaggtggcgttggaaccacagctctgggaactgggaaaagtgcttcggaaggctgggctgtccgctggctatgtggacgctggggcagagccaggccggagtcgaatgatcagccaggaagagtttgccaggcagctacagctctctgatcctcagacggtggctggtgcctttggctacttccagcaggataccaagggtttggtggacttccgagatgtggcccttgcactagcagctctggatgggggcaggagcctggaagagctaactcgtctggcctttgaggtaatggggggtggcggtggtggggggtgcttagtggctatgctcaccccgctccaggaggcctattttggtatgctgtttccagtagcttctagatactaggcatttggtatccaacctagtgccacagtgcctaaaactgcagacccccggcctctatgttgagacctagctgggcacaagaagaaggaagaagaaggaaaaagctataaagtctacagttctgcagaaagggcactggagggtcagggaaggcttgtgcaccacccttttggaagaggaggagcctgtcaggccagtctgtggggcagggtgaggccatggcatgaggagagaacttgactcttatccctttctctcccaagctctttgctgaagagcaagcagagggtcccaaccgcctgctgtacaaagacggcttcagcaccatcctgcacctgctgctgggttcaccccaccctgctgccacagctttgcatgctgagctgtgccaggcaggatccagccaaggcctctccctctgtcagttccagaacttctccctccatgacccactctatgggaaactcttcagcacctacctgcgccccccacacacctctcgaggcacctcccagacaccaaatgcctcatccccaggcaaccccactgctctggccaatgggactgtgcaagcacccaagcagaagggagactgagtgcctcagcctctcaccccctcctcctcagggcagcgctaggggcctcccctatgcctcagccccatctctgctcctgtttgaattttgttattgttgtttggttgttgtttttttaagttgattttaattttttgtttggttgatttttttgtaaaaaactattttatatataaatataaatctatatctatatctattaaaaaaaatgaagtcca

SEQ ID NO: 305867 - DNA, 2112 bp, Homo sapiens
gtgtggggagcgggcgtcggaaggacccgtgaggataggaaaatggggccatttgagccctggcaaagttctgcctcctgggggcattgctggcccccatccgagtgcttctggcctttatcgtcctctttctcctctggccctttgcctggcttcaagtggccggtcttagtgaggagcagcttcaggagccaattacaggatggaggaagactgtgtgccacaacggggtgctaggcctgagccgcctgctgtttttcctgctgggcttcctccggattcgcgttcgtggccagcgagcctctcgccttcaagcccctgtccttgttgctgccccacactccactttctttgaccccattgttctgctgccctgtgacctgcccaaagttgtgtcccgagctgagaacctttccgttcctgtcattggagcccttcttcgattcaaccaagccatcctggtatcccggcatgacccggcttctcgacgcagagtggtggaggaggtccgaaggcgggccacctcaggaggcaagtggccgcaggtgctattctttcctgagggcacctgttccaacaagaaggctttgcttaagttcaaaccaggagccttcatcgcaggggtgcctgtgcagcctgtcctcatccgctaccccaacagtctggacaccaccagctgggcatggaggggtcctggagtactcaaagtcctctggctcacagcctctcagccctgcagcattgtggatgtggagttccttcctgtgtatcaccccagccctgaggagagcagggaccccaccctctatgccaacaatgttcagagggtcatggcacaggctctgggcattccagccaccgaatgtgagtttgtagggagcttacctgtgattgtggtgggccggctgaaggtggcgttggaaccacagctctgggaactgggaaaagtgcttcggaaggctgggctgtccgctggctatgtggacgctggggcagagccaggccggagtcgaatgatcagccaggaagagtttgccaggcagctacagctctctgatcctcagacggtggctggtgcctttggctacttccagcaggataccaagggtttggtggacttccgagatgtggcccttgcactagcagctctggatgggggcaggagcctggaagagctaactcgtctggcctttgaggtaatggggggtggcggtggtggggggtgcttagtggctatgctcaccccgctccaggaggcctattttggtatgctgtttccagtagcttctagatactaggcatttggtatccaacctagtgccacagtgcctaaaactgcagacccccggcctctatgttgagacctagctgggcacaagaagaaggaagaagaaggaaaaagctataaagtctacagttctgcagaaagggcactggagggtcagggaaggcttgtgcaccacccttttggaagaggaggagcctgtcaggccagtctgtggggcagggtgaggccatggcatgaggagagaacttgactcttatccctttctctcccaagctctttgctgaagagcaagcagagggtcccaaccgcctgctgtacaaagacggcttcagcaccatcctgcacctgctgctgggttcaccccaccctgctgccacagctttgcatgctgagctgtgccaggcaggatccagccaaggcctctccctctgtcagttccagaacttctccctccatgacccactctatgggaaactcttcagcacctacctgcgccccccacacacctctcgaggcacctcccagacaccaaatgcctcatccccaggcaaccccactgctctggccaatgggactgtgcaagcacccaagcagaagggagactgagtgcctcagcctctcaccccctcctcctcagggcagcgctaggggcctcccctatgcctcagccccatctctgctcctgtttgaattttgttattgttgtttggttgttgtttttttaagttgattttaattttttgtttggttgatttttttgtaaaaaactattttatatataaatataaatctatatctatatctattaaaaaaaatgaagtcca

SEQ ID NO: 305868 - DNA, 2628 bp, Homo sapiens
gttttataaatggggtagggaccaactgaaagacaggaaaataaggcccttgatgccattaatcttttatcctcttgccctcattggtatcttcatcccaccttgggtcccagtcccctctcctgttcccacaccacctgtcacatgcaagggatgatggctgtctgctcctgggtctatgctttgtggaagaaggatgctgtggagggagcatatccaagctctaaagtggcattctctcccaccctttgcagttctgcctcctgggggcattgctggcccccatccgagtgcttctggcctttatcgtcctctttctcctctggccctttgcctggcttcaagtggccggtcttagtgaggagcagcttcaggagccaattacaggatggaggaagtaagtgagggatcagcccccagagaccctacttctcttccctgctgtctattcggctccctctttgagaagaagaaaagagagcattctgaaactattctgtctagcttgggtagatgagatgagtcagccaagctcagacgtggttcccagacctcacctctaagtaatgtgccctgataggtcccaaagtggccagagaccttggccccttggtcacatcctatttaagggtaaaagaggggtgccctactttcccggtgtctgaacctgggggcgggtgagggttagaaccactgcttccgctgatacccagccttgccctggcaggactgtgtgccacaacggggtgctaggcctgagccgcctgctgtttttcctgctgggcttcctccggattcgcgttcgtggccagcgagcctctcgccttcaagcccctgtccttgttgctgccccacactccactttctttgaccccattgttctgctgccctgtgacctgcccaaagttgtgtcccgagctgagaacctttccgttcctgtcattggagcccttcttcgattcaaccaagccatcctggtatcccggcatgacccggcttctcgacgcagagtggtggaggaggtccgaaggcgggccacctcaggaggcaagtggccgcaggtgctattctttcctgagggcacctgttccaacaagaaggctttgcttaagttcaaaccaggagccttcatcgcaggggtgcctgtgcagcctgtcctcatccgctaccccaacagtctggacaccaccagctgggcatggaggggtcctggagtactcaaagtcctctggctcacagcctctcagccctgcagcattgtggatgtggagttccttcctgtgtatcaccccagccctgaggagagcagggaccccaccctctatgccaacaatgttcagagggtcatggcacaggctctgggcattccagccaccgaatgtgagtttgtagggagcttacctgtgattgtggtgggccggctgaaggtggcgttggaaccacagctctgggaactgggaaaagtgcttcggaaggctgggctgtccgctggctatgtggacgctggggcagagccaggccggagtcgaatgatcagccaggaagagtttgccaggcagctacagctctctgatcctcagacggtggctggtgcctttggctacttccagcaggataccaagggtttggtggacttccgagatgtggcccttgcactagcagctctggatgggggcaggagcctggaagagctaactcgtctggcctttgaggtaatggggggtggcggtggtggggggtgcttagtggctatgctcaccccgctccaggaggcctattttggtatgctgtttccagtagcttctagatactaggcatttggtatccaacctagtgccacagtgcctaaaactgcagacccccggcctctatgttgagacctagctgggcacaagaagaaggaagaagaaggaaaaagctataaagtctacagttctgcagaaagggcactggagggtcagggaaggcttgtgcaccacccttttggaagaggaggagcctgtcaggccagtctgtggggcagggtgaggccatggcatgaggagagaacttgactcttatccctttctctcccaagctctttgctgaagagcaagcagagggtcccaaccgcctgctgtacaaagacggcttcagcaccatcctgcacctgctgctgggttcaccccaccctgctgccacagctttgcatgctgagctgtgccaggcaggatccagccaaggcctctccctctgtcagttccagaacttctccctccatgacccactctatgggaaactcttcagcacctacctgcgccccccacacacctctcgaggcacctcccagacaccaaatgcctcatccccaggcaaccccactgctctggccaatgggactgtgcaagcacccaagcagaagggagactgagtgcctcagcctctcaccccctcctcctcagggcagcgctaggggcctcccctatgcctcagccccatctctgctcctgtttgaattttgttattgttgtttggttgttgtttttttaagttgattttaattttttgtttggttgatttttttgtaaaaaactattttatatataaatataaatctatatctatatctattaaaaaaaatgaagtcca

SEQ ID NO: 305869 - DNA, 2307 bp, Homo sapiens; identical to SEQ ID NO: 305863

SEQ ID NO: 305870 - DNA, 1751 bp, Homo sapiens
cgaacaaaaaaaaataggctagtaagagctggtgtaaatcggccgaggaacttccgttcctgtcattggagcccttcttcgattcaaccaagccatcctggtatcccggcatgacccggcttctcgacgcagagtggtggaggaggtccgaaggcgggccacctcaggaggcaagtggccgcaggtgctattctttcctgagggcacctgttccaacaagaaggctttgcttaagttcaaaccaggagccttcatcgcaggggtgcctgtgcagcctgtcctcatccgctaccccaacagtctggacaccaccagctgggcatggaggggtcctggagtactcaaagtcctctggctcacagcctctcagccctgcagcattgtggatgtggagttccttcctgtgtatcaccccagccctgaggagagcagggaccccaccctctatgccaacaatgttcagagggtcatggcacaggctctgggcattccagccaccgaatgtgagtttgtagggagcttacctgtgattgtggtgggccggctgaaggtggcgttggaaccacagctctgggaactgggaaaagtgcttcggaaggctgggctgtccgctggctatgtggacgctggggcagagccaggccggagtcgaatgatcagccaggaagagtttgccaggcagctacagctctctgatcctcagacggtggctggtgcctttggctacttccagcaggataccaagggtttggtggacttccgagatgtggcccttgcactagcagctctggatgggggcaggagcctggaagagctaactcgtctggcctttgaggtaatggggggtggcggtggtggggggtgcttagtggctatgctcaccccgctccaggaggcctattttggtatgctgtttccagtagcttctagatactaggcatttggtatccaacctagtgccacagtgcctaaaactgcagacccccggcctctatgttgagacctagctgggcacaagaagaaggaagaagaaggaaaaagctataaagtctacagttctgcagaaagggcactggagggtcagggaaggcttgtgcaccacccttttggaagaggaggagcctgtcaggccagtctgtggggcagggtgaggccatggcatgaggagagaacttgactcttatccctttctctcccaagctctttgctgaagagcaagcagagggtcccaaccgcctgctgtacaaagacggcttcagcaccatcctgcacctgctgctgggttcaccccaccctgctgccacagctttgcatgctgagctgtgccaggcaggatccagccaaggcctctccctctgtcagttccagaacttctccctccatgacccactctatgggaaactcttcagcacctacctgcgccccccacacacctctcgaggcacctcccagacaccaaatgcctcatccccaggcaaccccactgctctggccaatgggactgtgcaagcacccaagcagaagggagactgagtgcctcagcctctcaccccctcctcctcagggcagcgctaggggcctcccctatgcctcagccccatctctgctcctgtttgaattttgttattgttgtttggttgttgtttttttaagttgattttaattttttgtttggttgatttttttgtaaaaaactattttatatataaatataaatctatatctatatctattaaaaaaaatgaagtcca

SEQ ID NO: 305871 - DNA, 1942 bp, Homo sapiens; identical to SEQ ID NO: 305864

SEQ ID NO: 305872 - DNA, 1493 bp, Homo sapiens
gctcgcaccccctatgcgcctgtcctcatccgctaccccaacagtcgacaccaccagctgggcatggaggggtcctggagtactcaaagtcctctggctcacagcctctcagccctgcagcattgtggatgtggagttccttcctgtgtatcaccccagccctgaggagagcagggaccccaccctctatgccaacaatgttcagagggtcatggcacaggctctgggcattccagccaccgaatgtgagtttgtagggagcttacctgtgattgtggtgggccggctgaaggtggcgttggaaccacagctctgggaactgggaaaagtgcttcggaaggctgggctgtccgctggctatgtggacgctggggcagagccaggccggagtcgaatgatcagccaggaagagtttgccaggcagctacagctctctgatcctcagacggtggctggtgcctttggctacttccagcaggataccaagggtttggtggacttccgagatgtggcccttgcactagcagctctggatgggggcaggagcctggaagagctaactcgtctggcctttgaggtaatggggggtggcggtggtggggggtgcttagtggctatgctcaccccgctccaggaggcctattttggtatgctgtttccagtagcttctagatactaggcatttggtatccaacctagtgccacagtgcctaaaactgcagacccccggcctctatgttgagacctagctgggcacaagaagaaggaagaagaaggaaaaagctataaagtctacagttctgcagaaagggcactggagggtcagggaaggcttgtgcaccacccttttggaagaggaggagcctgtcaggccagtctgtggggcagggtgaggccatggcatgaggagagaacttgactcttatccctttctctcccaagctctttgctgaagagcaagcagagggtcccaaccgcctgctgtacaaagacggcttcagcaccatcctgcacctgctgctgggttcaccccaccctgctgccacagctttgcatgctgagctgtgccaggcaggatccagccaaggcctctccctctgtcagttccagaacttctccctccatgacccactctatgggaaactcttcagcacctacctgcgccccccacacacctctcgaggcacctcccagacaccaaatgcctcatccccaggcaaccccactgctctggccaatgggactgtgcaagcacccaagcagaagggagactgagtgcctcagcctctcaccccctcctcctcagggcagcgctaggggcctcccctatgcctcagccccatctctgctcctgtttgaattttgttattgttgtttggttgttgtttttttaagttgattttaattttttgtttggttgatttttttgtaaaaaactattttatatataaatataaatctatatctatatctattaaaaaaaatgaagtcca

SEQ ID NO: 305873 - DNA, 2174 bp, Homo sapiens
tgcgccgcctgctccccgcccctcggccgcctgcaccgggcggggcccgggccagagcgccgccgccgccgctgctgcagcagcagctgctctgcagagtggtggccggggccagggccggggtgccctccctcccaccttctcccgccatgagccagggaagtccgggggactgggcccccctagatcccacccccggacccccagcatcccccaaccccttcgtgcatgagttacatctctctcgcctccagagggttaagttctgcctcctgggggcattgctggcccccatccgagtgcttctggcctttatcgtcctctttctcctctggccctttgcctggcttcaagtggccggtcttagtgaggagcagcttcaggagccaattacaggatggaggaagactgtgtgccacaacggggtgctaggcctgagccgcctgctgtttttcctgctgggcttcctccggattcgcgttcgtggccagcgagcctctcgccttcaagcccctgtccttgttgctgccccacactccactttctttgaccccattgttctgctgccctgtgacctgcccaaagttgtgtcccgagctgagaacctttccgttcctgtcattggagcccttcttcgattcaaccaagccatcctggtatcccggcatgacccggcttctcgacgcagagtggtggaggaggtccgaaggcgggccacctcaggaggcaagtggccgcaggtgctattctttcctgagggcacctgttccaacaagaaggctttgcttaagttcaaaccaggagccttcatcgcaggggtgcctgtgcagcctgtcctcatccgctaccccaacagtctggacaccaccagctgggcatggaggggtcctggagtactcaaagtcctctggctcacagcctctcagccctgcagcattgtggatgtggagttccttcctgtgtatcaccccagccctgaggagagcagggaccccaccctctatgccaacaatgttcagagggtcatggcacaggctctgggcattccagccaccgaatgtgagtttgtagggagcttacctgtgattgtggtgggccggctgaaggtggcgttggaaccacagctctgggaactgggaaaagtgcttcggaaggctgggataccaagggtttggtggacttccgagatgtggcccttgcactagcagctctggatgggggcaggagcctggaagagctaactcgtctggcctttgaggtaatggggggtggcggtggtggggggtgcttagtggctatgctcaccccgctccaggaggcctattttggtatgctgtttccagtagcttctagatactaggcatttggtatccaacctagtgccacagtgcctaaaactgcagacccccggcctctatgttgagacctagctgggcacaagaagaaggaagaagaaggaaaaagctataaagtctacagttctgcagaaagggcactggagggtcagggaaggcttgtgcaccacccttttggaagaggaggagcctgtcaggccagtctgtggggcagggtgaggccatggcatgaggagagaacttgactcttatccctttctctcccaagctctttgctgaagagcaagcagagggtcccaaccgcctgctgtacaaagacggcttcagcaccatcctgcacctgctgctgggttcaccccaccctgctgccacagctttgcatgctgagctgtgccaggcaggatccagccaaggcctctccctctgtcagttccagaacttctccctccatgacccactctatgggaaactcttcagcacctacctgcgccccccacacacctctcgaggcacctcccagacaccaaatgcctcatccccaggcaaccccactgctctggccaatgggactgtgcaagcacccaagcagaagggagactgagtgcctcagcctctcaccccctcctcctcagggcagcgctaggggcctcccctatgcctcagccccatctctgctcctgtttgaattttgttattgttgtttggttgttgtttttttaagttgattttaattttttgtttggttgatttttttgtaaaaaactattttatatataaatataaatctatatctatatctattaaaaaaaatgaagtcca

SEQ ID NO: 305874 - DNA, 2202 bp, Homo sapiens
aaggagctggaacaaagagcagagcagaacccaggcttccctccaggctgacatgttcctagtggccgtatcagtcactcacagtttggagtcctcagtggatgttctcacagctgttgttagatggccatcccctgagatccactgaagattcattttttaatcaggcatccagtgcattgaagagcaatgttatcatcatgaggaggaacaagggagaaataatcagtaaggactataaatttctgaaaccactttagagagtggcgaaggtggggaatcataagaccttttggggtgctgggtgagggtctttgaaggagagtcatgaaggttacgtgggaagatgacatgtagaagaaacaacaccggacagttagatggttgagagcttgagacccagctatatctgtaggacttgggcagattattttaaatatcctatagcttctctagaggaattttctcaagattcttagcaagccatgtatttctcaagatttaaccaagttccctggtcaacttccaaaaatcctaaaagattcttaatgcttatgaacaaccaacagtggtcccaaggagctttttgatctgagatgcagaatgtgaccctcaacatcctctgaagggacagagtgaccaggtatctagattccttagattgaggcggactgtccccgaaaagagcttcccccacttggcctgtagcagagcagaaacaaaaattcaaatgccatggtctcccatggagctggtacagcaggcatcctccttgtgtttttcataagaaattatgcctgtgtccccctttcaatctgttggaccagttcttctacataggctgagtcagagagaaccagtttgtctagcctggggaccaggactgccctccgctggcatgtcagagacttcatagtagcttcagcattcctgagggattcccttacattcctaggagatccctttatgggagggctttgtcaccaggtgacctgatatagcttgagaaagcctatgacctgagagaaattccagggatcctaaagagtttggagctcacagttctgaggggagcagtcacagggatcacccccattatttgctgagaagagggaggagtcaaaatccaaagagcaggaagggaggcgcagggtccccgcattgccctggtttctttttcacaccaggataccaagggtttggtggacttccgagatgtggcccttgcactagcagctctggatgggggcaggagcctggaagagctaactcgtctggcctttgaggtaatggggggtggcggtggtggggggtgcttagtggctatgctcaccccgctccaggaggcctattttggtatgctgtttccagtagcttctagatactaggcatttggtatccaacctagtgccacagtgcctaaaactgcagacccccggcctctatgttgagacctagctgggcacaagaagaaggaagaagaaggaaaaagctataaagtctacagttctgcagaaagggcactggagggtcagggaaggcttgtgcaccacccttttggaagaggaggagcctgtcaggccagtctgtggggcagggtgaggccatggcatgaggagagaacttgactcttatccctttctctcccaagctctttgctgaagagcaagcagagggtcccaaccgcctgctgtacaaagacggcttcagcaccatcctgcacctgctgctgggttcaccccaccctgctgccacagctttgcatgctgagctgtgccaggcaggatccagccaaggcctctccctctgtcagttccagaacttctccctccatgacccactctatgggaaactcttcagcacctacctgcgccccccacacacctctcgaggcacctcccagacaccaaatgcctcatccccaggcaaccccactgctctggccaatgggactgtgcaagcacccaagcagaagggagactgagtgcctcagcctctcaccccctcctcctcagggcagcgctaggggcctcccctatgcctcagccccatctctgctcctgtttgaattttgttattgttgtttggttgttgtttttttaagttgattttaattttttgtttggttgatttttttgtaaaaaactattttatatataaatataaatctatatctatatctattaaaaaaaatgaagtcca

SEQ ID NO: 305875 - DNA, 1673 bp, Homo sapiens
ggctcccggcccgccagcaccagtatcgggggtcgcacggcggctgtcccctgagccttctctcagtatgcagaatgtgaccctcaacatcctctgaagggacagagtgaccaggtatctagattccttagattgaggcggactgtccccgaaaagagcttcccccacttggcctgtagcagagcagaaacaaaaattcaaatgccatggtctcccatggagctggtacagcaggcatcctccttgtgtttttcataagaaattatgcctgtgtccccctttcaatctgttggaccagttcttctacataggctgagtcagagagaaccagtttgtctagcctggggaccaggactgccctccgctggcatgtcagagacttcatagtagcttcagcattcctgagggattcccttacattcctaggagatccctttatgggagggctttgtcaccaggtgacctgatatagcttgagaaagcctatgacctgagagaaattccagggatcctaaagagtttggagctcacagttctgaggggagcagtcacagggatcacccccattatttgctgagaagagggaggagtcaaaatccaaagagcaggaagggaggcgcagggtccccgcattgccctggtttctttttcacaccaggataccaagggtttggtggacttccgagatgtggcccttgcactagcagctctggatgggggcaggagcctggaagagctaactcgtctggcctttgaggtaatggggggtggcggtggtggggggtgcttagtggctatgctcaccccgctccaggaggcctattttggtatgctgtttccagtagcttctagatactaggcatttggtatccaacctagtgccacagtgcctaaaactgcagacccccggcctctatgttgagacctagctgggcacaagaagaaggaagaagaaggaaaaagctataaagtctacagttctgcagaaagggcactggagggtcagggaaggcttgtgcaccacccttttggaagaggaggagcctgtcaggccagtctgtggggcagggtgaggccatggcatgaggagagaacttgactcttatccctttctctcccaagctctttgctgaagagcaagcagagggtcccaaccgcctgctgtacaaagacggcttcagcaccatcctgcacctgctgctgggttcaccccaccctgctgccacagctttgcatgctgagctgtgccaggcaggatccagccaaggcctctccctctgtcagttccagaacttctccctccatgacccactctatgggaaactcttcagcacctacctgcgccccccacacacctctcgaggcacctcccagacaccaaatgcctcatccccaggcaaccccactgctctggccaatgggactgtgcaagcacccaagcagaagggagactgagtgcctcagcctctcaccccctcctcctcagggcagcgctaggggcctcccctatgcctcagccccatctctgctcctgtttgaattttgttattgttgtttggttgttgtttttttaagttgattttaattttttgtttggttgatttttttgtaaaaaactattttatatataaatataaatctatatctatatctattaaaaaaaatgaagtcca

SEQ ID NO: 305876 - DNA, 2233 bp, Homo sapiens
tgcgccgcctgctccccgcccctcggccgcctgcaccgggcggggcccgggccagagcgccgccgccgccgctgctgcagcagcagctgctctgcagagtggtggccggggccagggccggggtgccctccctcccaccttctcccgccatgagccagggaagtccgggggactgggcccccctagatcccacccccggacccccagcatcccccaaccccttcgtgcatgagttacatctctctcgcctccagagggttaagttctgcctcctgggggcattgctggcccccatccgagtgcttctggcctttatcgtcctctttctcctctggccctttgcctggcttcaagtggccggtcttagtgaggagcagcttcaggagccaattacaggatggaggaagactgtgtgccacaacggggtgctaggcctgagccgcctgctgtttttcctgctgggcttcctccggattcgcgttcgtggccagcgagcctctcgccttcaagcccctgtccttgttgctgccccacactccactttctttgaccccattgttctgctgccctgtgacctgcccaaagttgtgtcccgagctgagaacctttccgttcctgtcattggagcccttcttcgattcaaccaagccatcctggtatcccggcatgacccggcttctcgacgcagagtggtggaggaggtccgaaggcgggccacctcaggaggcaagtggccgcaggtgctattctttcctgagggcacctgttccaacaagaaggctttgcttaagttcaaaccaggagccttcatcgcaggggtgcctgtgcagcctgtcctcatccgctaccccaacagtctggacaccaccagctgggcatggaggggtcctggagtactcaaagtcctctggctcacagcctctcagccctgcagcattgtggatgtggagttccttcctgtgtatcaccccagccctgaggagagcagggaccccaccctctatgccaacaatgttcagagggtcatggcacaggctctgggcattccagccaccgaatgtgagtttgtagggagcttacctgtgattgtggtgggccggctgaaggtggcgttggaaccacagctctgggaactgggaaaagtgcttcggaaggctgggctgtccgctggctatgtggacgctggggcagagccaggccggagtcgaatgatcagccaggaagagtttgccaggcagctacagctctctgatcctcagacggtggctggtgcctttggctacttccagcaggataccaagggtttggtggacttccgagatgtggcccttgcactagcagctctggatgggggcaggagcctggaagagctaactcgtctggcctttgagctctttgctgaagagcaagcagagggtcccaaccgcctgctgtacaaagacggcttcagcaccatcctgcacctgctgctgggttcaccccaccctgctgccacagctttgcatgctgagctgtgccaggcaggatccagccaaggcctctccctctgtcagttccagaacttctccctccatgacccactctatgggaaactcttcagcacctacctgcgccccccacacacctctcgaggcacctcccagacaccaaatgcctcatccccaggcaaccccactgctctggccaatgggactgtgcaagcacccaagcagaagggagactgagtgcctcagcctctcaccccctcctcctcagggcagcgctaggggcctcccctatgcctcagccccatctctgctcctgtttgaattttgttattgttgtttggttgttgtttttttaagttgattttaattttttgtttggttgatttttttgtaaaaaactattttatatataaatataaatctatatctatatctattaaaaaaaatgaagtccagtcatattgatgttaccattacttgggaaggaaagggatgaatggttgtaggacgcccgttggaaaatcacaaatgtttccaaggttcgtcctcttggccatagctggatgaatcttcctcttcggacagggctctttcctgcacagaaatcatactgaggttccatatcctccctcctgctgtcatctcctatatgtacattttaacagacttcctcgtgaacctcttttcagcccattccctcttgctctgtcctcattaaagattaaaaaatagcttgctaccattcc

SEQ ID NO: 305877 - DNA, 1412 bp, Homo sapiens
tgcgccgcctgctccccgcccctcggccgcctgcaccgggcggggcccgggccagagcgccgccgccgccgctgctgcagcagcagctgctctgcagagtggtggccggggccagggccggggtgccctccctcccaccttctcccgccatgagccagggaagtccgggggactgggcccccctagatcccacccccggacccccagcatcccccaaccccttcgtgcatgagttacatctctctcgcctccagagggttaagttctgcctcctgggggcattgctggcccccatccgagtgcttctggcctttatcgtcctctttctcctctggccctttgcctggcttcaagtggccggtcttagtgaggagcagcttcaggagccaattacaggatggaggaagactgtgtgccacaacggggtgctaggcctgagccgcctgctgtttttcctgctgggcttcctccggattcgcgttcgtggccagcgagcctctcgccttcaagcccctgtccttgttgctgccccacactccactttctttgaccccattgttctgctgccctgtgacctgcccaaagttgtgtcccgagctgagaacctttccgttcctgtcattggagcccttcttcgattcaaccaagccatcctggtatcccggcatgacccggcttctcgacgcagagtggtggaggaggtccgaaggcgggccacctcaggaggcaagtggccgcaggtgctattctttcctgagggcacctgttccaacaagaaggctttgcttaagttcaaaccaggagccttcatcgcaggggtgcctgtgcagcctgtcctcatccgctaccccaacagtctggacaccaccagctgggcatggaggggtcctggagtactcaaagtcctctggctcacagcctctcagccctgcagcattgtggatgtggagttccttcctgtgtatcaccccagccctgaggagagcagggaccccaccctctatgccaacaatgttcagagggtcatggcacaggctctgggcattccagccaccgaatgtgagtttgtagggagcttaccgccccccacacacctctcgaggcacctcccagacaccaaatgcctcatccccaggcaaccccactgctctggccaatgggactgtgcaagcacccaagcagaagggagactgagtgcctcagcctctcaccccctcctcctcagggcagcgctaggggcctcccctatgcctcagccccatctctgctcctgtttgaattttgttattgttgtttggttgttgtttttttaagttgattttaattttttgtttggttgatttttttgtaaaaaactattttatatataaatataaatctatatctatatctattaaaaaaaatgaagtcca

SEQ ID NO: 305878 - DNA, 1226 bp, Homo sapiens
tgcgccgcctgctccccgcccctcggccgcctgcaccgggcggggcccgggccagagcgccgccgccgccgctgctgcagcagcagctgctctgcagagtggtggccggggccagggccggggtgccctccctcccaccttctcccgccatgagccagggaagtccgggggactgggcccccctagatcccacccccggacccccagcatcccccaaccccttcgtgcatgagttacatctctctcgcctccagagggttaagttctgcctcctgggggcattgctggcccccatccgagtgcttctggcctttatcgtcctctttctcctctggccctttgcctggcttcaagtggccggtcttagtgaggagcagcttcaggagccaattacaggatggaggaagactgtgtgccacaacggggtgctaggcctgagccgcctgctgtttttcctgctgggcttcctccggattcgcgttcgtggccagcgagcctctcgccttcaagcccctgtccttgttgctgccccacactccactttctttgaccccattgttctgctgccctgtgacctgcccaaagttgtgtcccgagctgagaacctttccgttcctgtcattggagcccttcttcgattcaaccaagccatcctggtatcccggcatgacccggcttctcgacgcagagtggtggaggaggtccgaaggcgggccacctcaggaggcaagtggccgcaggtgctattctttcctgagggcacctgttccaacaagaaggctttgcttaagttcaaaccaggagccttcatcgcaggggtgcctgtgcagcctgtcctcatccgctaccccaacagtctggacaccaccagctgggcatggaggggtcctggagtactcaaagtctctggctcacagctctcagccctgcagccatgtggatgtggaattcctcctgtggtataaaccagccctgaagagaagaagcaccaacctctatggcaacatgttcaaaggtccatggcacaggcctggcatcagcacgaaggagtgaggagaaaccggaatgatgggccgtgaaggggcgacacacactgaaggcaagccgaacggcgccacaaagaacgggcacagcgaaaaaaccgaatgagaacactagcacaggggtcgaacaacaagcggaaaggcaaaagaagaaaaacgaaaaagaaaacaaaatgggttccc

SEQ ID NO: 305879 - DNA, 499 bp, Homo sapiens
  misc_feature (161)..(161): n is a, c, g, or t
  misc_feature (163)..(163): n is a, c, g, or t
  misc_feature (167)..(167): n is a, c, g, or t
tcctgcacacgccgcgatccacaccaagagacaattgtgggcagagaggagccagtccatggggccgcacagcacagattaagagattcagaaattatgtgtgtatgtttgtgtgtgttatatgtgtgtgggtgctcggcgtgtgcatgcacacgccgaangnccancgccccccacacacctctcgaggcacctcccagacaccaaatgcctcatccccaggcaaccccactgctctggccaatgggactgtgcaagcacccaagcagaagggagactgagtgcctcagcctctcaccccctcctcctcagggcagcgctaggggcctcccctatgcctcagccccatctctgctcctgtttgaattttgttattgttgtttggttgttgtttttttaagttgattttaattttttgtttggttgatttttttgtaaaaaactattttatatataaatataaatctatatctatatctattaaaaaaaatgaagtcca

SEQ ID NO: 305880 - DNA, 449 bp, Homo sapiens
  misc_feature (111)..(111): n is a, c, g, or t
  misc_feature (113)..(113): n is a, c, g, or t
  misc_feature (117)..(117): n is a, c, g, or t
cgtgaagatcggcgacatggtctctcggcgtgtgcagtgtggagcttcggcgtgtgcgtgaagatcgcgattacggtctggagattcggcgtgtgcatgcacacgccgaangnccancgccccccacacacctctcgaggcacctcccagacaccaaatgcctcatccccaggcaaccccactgctctggccaatgggactgtgcaagcacccaagcagaagggagactgagtgcctcagcctctcaccccctcctcctcagggcagcgctaggggcctcccctatgcctcagccccatctctgctcctgtttgaattttgttattgttgtttggttgttgtttttttaagttgattttaattttttgtttggttgatttttttgtaaaaaactattttatatataaatataaatctatatctatatctattaaaaaaaatgaagtcca

SEQ ID NO: 305881 - DNA, 1042 bp, Homo sapiens
tgcgccgcctgctccccgcccctcggccgcctgcaccgggcggggcccgggccagagcgccgccgccgccgctgctgcagcagcagctgctctgcagagtggtggccggggccagggccggggtgccctccctcccaccttctcccgccatgagccagggaagtccgggggactgggcccccctagatcccacccccggacccccagcatcccccaaccccttcgtgcatgagttacatctctctcgcctccagagggttaagttctgcctcctgggggcattgctggcccccatccgagtgcttctggcctttatcgtcctctttctcctctggccctttgcctggcttcaagtggccggtcttagtgaggagcagcttcaggagccaattacaggatggaggaagactgtgtgccacaacggggtgctaggcctgagccgcctgctgtttttcctgctgggcttcctccggattcgcgttcgtggccagcgagcctctcgccttcaagcccctgtccttgttgctgccccacactccactttctttgaccccattgttctgctgccctgtgacctgcccaaagttgtgtcccgagctgagaacctttccgttcctgtcattggagcccttcttcgattcaaccaagccatcctggtatcccggcatgacccggcttctcgacgcagagtggtggaggaggtccgaaggcgggccacctcaggaggcaagtggccgcaggtgctattctttcctgagggcacctgttccaacaagaaggctttgcttaagttcaaaccaggagccttcatcgcaggggtgcctgtgcagcctgtcctcatccgctaccccaacagtctggacaccaccagctgggcatggaggggtcctggagtgtgagttctggtattcctgggggtgagggtggggagcagggtccatcagagaattcctggcccatcttccaatctcccgacaaggtgaatggcccttcttcatctgaggactgagagaactctagaggagacaccactttccccctg

SEQ ID NO: 305882 - DNA, 680 bp, Homo sapiens
tgcgccgcctgctccccgcccctcggccgcctgcaccgggcggggcccgggccagagcgccgccgccgccgctgctgcagcagcagctgctctgcagagtggtggccggggccagggccggggtgccctccctcccaccttctcccgccatgagccagggaagtccgggggactgggcccccctagatcccacccccggacccccagcatcccccaaccccttcgtgcatgagttacatctctctcgcctccagagggttaagttctgcctcctgggggcattgctggcccccatccgagtgcttctggcctttatcgtcctctttctcctctggccctttgcctggcttcaagtggccggtcttagtgaggagcagcttcaggagccaattacaggatggaggaagactgtgtgccacaacggggtgctaggcctgagccgcctgctgtttttcctgctgggcttcctccggattcgcgttcgtggccagcgagcctctcgccttcaagcccctgtccttgttgctgccccacactccactttctttgaccccattgttctgctgccctgtgacctgcccaaagttgtgtcccgagctgagaacctttccgttcctgtcattggctgactgggcttgctccggattcgcgttcgtggccagcgagcctctcgcgagtac

SEQ ID NO: 305883 - DNA, 904 bp, Homo sapiens
gttttataaatggggtagggaccaactgaaagacaggaaaataaggcccttgatgccattaatcttttatcctcttgccctcattggtatcttcatcccaccttgggtcccagtcccctctcctgttcccacaccacctgtcacatgcaagggatgatggctgtctgctcctgggtctatgctttgtggaagaaggatgctgtggagggagcatatccaagctctaaagtggcattctctcccaccctttgcagttctgcctcctgggggcattgctggcccccatccgagtgcttctggcctttatcgtcctctttctcctctggccctttgcctggcttcaagtggccggtcttagtgaggagcagcttcaggagccaattacaggatggaggaagtaagtgagggatcagcccccagagaccctacttctcttccctgctgtctattcggctccctctttgagaagaagaaaagagagcattctgaaactattctgtctagcttgggtagatgagatgagtcagccaagctcagacgtggttcccagacctcacctctaagtaatgtgccctgataggtcccaaagtggccagagaccttggccccttggtcacatcctatttaagggtaaaagaggggtgccctactttcccggtgtctgaacctgggggcgggtgagggttagaaccactgcttccgctgatacccagccttgccctggcaggactgtgtgccacaacggggtgctaggcctgagccgcctgctgtttttcctgctgggcttcctccggattcgcgttcgtggccagcgagcctctcgccttcaagcccctgtccttgttgctgatcctccatccatcactatccagtatttatcacgttatggggtacggagattgct

SEQ ID NO: 305884 - DNA, 603 bp, Homo sapiens
ggctctgggcattccagccaccgaatgtgagtttgtagggagcttacctgtgattgtggtgggccggctgaaggtggcgttggaaccacagctctgggaactgggaaaagtgcttcggaaggctgggtaagtggtcttggaaatgagggtatgagcagtgtcacagagagagagagagagagaataagaaggggagaaatgagaaggaagaaggaaaatcttaaaaatgaaaaaaactgggaagaaagataatagaataaataaaaggaagtggggaataaatggaaggatatgtaataatgcaggtgaaaaaagtaagaaggggccgggcacggtggctcacacctgtaatcccagcactttgggaggccaaggcgggtggatcacctgaggtcaggagttcaagaccagcctgaccaacatggcaaaaccccatctctgctaaaaatacaaaatttgccgggtttggtggcacatgcctgtaatcccagctacttgggaggctgaggcaggagaattgcttgaacctgggaggtggaggttgcagtgagccaaggtcgtgccactgcactccagcctgggtgacagagcaagactccgtca

SEQ ID NO: 305885 - DNA, 281 bp, Homo sapiens
tcctcatccgctaccccaacagtctggtgagtcttagtccaagaaagagtggaaagggggagcacaaatccaccccaaatggaaataagtgaaaactgttggtgctttaatgggatgtgcattgggggctgtgaccagaggtgggatcaggccctctgttcaaaggtgattggccagttccagggggaaaaagtaatgctcttatgccctcacctgtgtttctcccataggacaccaccagctgggcatggaggggtcctggagtgtgagttctggtattc

SEQ ID NO: 305886 - DNA, 2773 bp, Homo sapiens
tcctgtcactggcttatatggacacgtcagcccaccgtcacgtgaccgcaggctgctaaaaacagctccagcacccactccaaaccagggcctgaaacaatgtcctccaccgagagaaacgtaaaggacacttgatcacacaatccctggaataatatccaggaaacacttgctggagccactcgcagcacccttccctggcagcacacttggggacagcgaggagatgagcgcatctctgaattacaaatctttttccaaagagcagcagaccatggataacttagagaagcaactcatctgtcccatctgcttagagatgttcacgaaacctgtggtgattctcccttgtcagcacaacctgtgtaggaaatgtgccagtgatattttccaggcctctaacccgtatttgcccacaagaggaggtaccaccatggcatcagggggccgattccgctgcccatcctgtagacatgaagtggttttggatagacatggggtatatggacttcagaggaacctgctggtggaaaatatcattgacatctacaagcaggagtccaccaggccagaaaagaaatccgaccagcccatgtgcgaggaacatgaagaggagcgcatcaacatctactgtctgaactgcgaagtacccacctgctctctgtgcaaggtgtttggtgcacacaaagactgccaggtggctcccctcactcatgtgttccagagacagaagtctgagctcagtgatggcatcgccatcctcgtgggcagcaacgatcgagtccagggagtgatcagccagctggaagacacctgcaaaactatcgaggaatgttgcagaaaacagaaacaagagctttgtgagaagtttgattacctgtatggcattttggaggagaggaagaatgaaatgacccaagtcattacccgaacccaagaggagaaactggaacatgtccgtgctctgatcaaaaagtattctgatcatttggagaacgtctcaaagttggttgagtcaggaattcagtttatggatgagccagaaatggcagtgtttctgcagaatgccaaaaccctgctaaaaaaaatctcggaagcatcaaaggcatttcagatggagaaaatagaacatggctatgagaacatgaaccacttcacagtcaacctcaatagagaagaaaagataatacgtgaaattgacttttacagagaagatgaagatgaagaagaagaagaaggcggagaaggagaaaaagaaggagaaggagaagtgggaggagaagcagtagaagtggaagaggtagaaaatgttcaaacagagtttccaggagaagatgaaaacccagaaaaagcttcagagctctctcaggtggagctgcaggctgcccctggggcacttccagtttcctctccagagccacctccagccctgccacctgctgcggatgcccctgtgacacagggggaggttgtacccactggctctgagcagaccacagagtctgaaactccagtccctgcagcagcagaaactgcggatcccttgttttaccctagttggtataaaggccaaacccggaaagccaccaccaacccaccttgcaccccagggagcgaaggtctggggcaaatagggcctccaggttctgaggattcgaatgtacggaaggcagaagtggcagcagccgcagcgagtgagagggcagctgtgagtggtaaggaaactagtgcacctgcagctacttctcagattggatttgaggctcctcccctccagggacaggctgcagctccagcgagtggcagtggagctgattctgagccagctcgccatatcttctccttttcctggttgaactccctaaatgaatgatattcattccaactgctgcccctctgtctgcctggctgagatgcatgtgggcagcaggaagcccaagtgaaattaatattatgcagatgatgaaagggacctctgaacaggatttctgcaaaaatagccccaaactgcaattccatatgacttatctaacatcttggggggaaagaatattttgagaaaatagttgcagaaagcactggaaataataaacttgatcttatacaaatcttctattgtgtggaaaatgttgtgaagggtgtgtaggtgtggtacatgtgtatgtcactaacaagtggcaaatggtgaaaaaagtggtcactatgcttttgtctctcataggcactgactttttgttattatattatggtagctttcatttcctttactctttaacagtgcaggtggtcagtgaaaatcagtgtcaactcagaagtgactgatttatcaatacatggacaaaaagtaaatcattgaccaaagctatgaaatgtttcacaaagttttcctcttttgcataacagatgtcactggatgtacattcagaaatgttctttgaatttggtgacactttcatggtccagaaagctgaaggcctgggcatctcttgtgacatttttctaatattagttttagattttcacgtattaggcactttagttgaatcttccagcaaaagctgtctactttctcttttattcactgtggcaccaatctggtaaattgtagaacaattgcatgtgtttaaatatatatacaaacatatcacacattaaatatatatatatttaaatcatgctttgttaatatttgtcccaccataatgcctccttcagaacataagtgtaactttatatgaactcttaaataaatgatgtttttaaaaaaaaaaaa

SEQ ID NO: 305887 - DNA, 1820 bp, Homo sapiens
tcctgtcactggcttatatggacacgtcagcccaccgtcacgtgaccgcaggctgctaaaaacagctccagcacccactccaaaccagggcctgaaacaatgtcctccaccgagagaaacgtaaaggacacttgatcacacaatccctggaataatatccaggaaacacttgctggagccactcgcagcacccttccctggcagcacacttggggacagcgaggagatgagcgcatctctgaattacaaatctttttccaaagagcagcagaccatggataacttagagaagcaactcatctgtcccatctgcttagagatgttcacgaaacctgtggtgattctcccttgtcagcacaacctgtgtaggaaatgtgccagtgatattttccaggcctctaacccgtatttgcccacaagaggaggtaccaccatggcatcagggggccgattccgctgcccatcctgtagacatgaagtggttttggatagacatggggtatatggacttcagaggaacctgctggtggaaaatatcattgacatctacaagcaggagtccaccaggccagaaaagaaatccgaccagcccatgtgcgaggaacatgaagaggagcgcatcaacatctactgtctgaactgcgaagtacccacctgctctctgtgcaaggtgtttggtgcacacaaagactgccaggtggctcccctcactcatgtgttccagagacagaagtctgagctcagtgatggcatcgccatcctcgtgggcagcaacgatcgagtccagggagtgatcagccagctggaagacacctgcaaaactatcgaggaatgttgcagaaaacagaaacaagagctttgtgagaagtttgattacctgtatggcattttggaggagaggaagaatgaaatgacccaagtcattacccgaacccaagaggagaaactggaacatgtccgtgctctgatcaaaaagtattctgatcatttggagaacgtctcaaagttggttgagtcaggaattcagtttatggatgagccagaaatggcagtgtttctgcagaatgccaaaaccctgctaaaaaaaatctcggaagcatcaaaggcatttcagatggagaaaatagaacatggctatgagaacatgaaccacttcacagtcaacctcaatagagaagaaaagataatacgtgaaattgacttttacagagaagatgaagatgaagaagaagaagaaggcggagaaggagaaaaagaaggagaaggagaagtgggaggagaagcagtagaagtggaagaggtagaaaatgttcaaacagagtttccaggagaagatgaaaacccagaaaaagcttcagagctctctcaggtggagctgcaggctgcccctggggcacttccagtttcctctccagagccacctccagccctgccacctgctgcggatgcccctgtgacacagattggatttgaggctcctcccctccagggacaggctgcagctccagcgagtggcagtggagctgattctgagccagctcgccatatcttctccttttcctggttgaactccctaaatgaatgatattcattccaactgctgcccctctgtctgcctggctgagatgcatgtgggcagcaggaagcccaagtgaaattaatattatgcagatgatgaaagggacctctgaacaggatttctgcaaaaatagccccaaactgcaattccatatgacttatctaacatcttggggggaaagaatattttgagaaaatagttgcagaaagcactggaaataataaacttgatcttatacaaa

SEQ ID NO: 305888 - DNA, 2108 bp, Homo sapiens
tcctgtcactggcttatatggacacgtcagcccaccgtcacgtgaccgcaggctgctaaaaacagctccagcacccactccaaaccagggcctgaaacaatgtcctccaccgagagaaacgtaaaggacacttgatcacacaatccctggaataatatccaggaaacacttgctggagccactcgcagcacccttccctggcagcacacttggggacagcgaggagatgagcgcatctctgaattacaaatctttttccaaagagcagcagaccatggataacttagagaagcaactcatctgtcccatctgcttagagatgttcacgaaacctgtggtgattctcccttgtcagcacaacctgtgtaggaaatgtgccagtgatattttccaggcctctaacccgtatttgcccacaagaggaggtaccaccatggcatcagggggccgattccgctgcccatcctgtagacatgaagtggttttggatagacatggggtatatggacttcagaggaacctgctggtggaaaatatcattgacatctacaagcaggagtccaccaggccagaaaagaaatccgaccagcccatgtgcgaggaacatgaagaggagcgcatcaacatctactgtctgaactgcgaagtacccacctgctctctgtgcaaggtgtttggtgcacacaaagactgccaggtggctcccctcactcatgtgttccagagacagaagtctgagctcagtgatggcatcgccatcctcgtgggcagcaacgatcgagtccagggagtgatcagccagctggaagacacctgcaaaactatcgaggaatgttgcagaaaacagaaacaagagctttgtgagaagtttgattacctgtatggcattttggaggagaggaagaatgaaatgacccaagtcattacccgaacccaagaggagaaactggaacatgtccgtgctctgatcaaaaagtattctgatcatttggagaacgtctcaaagttggttgagtcaggaattcagtttatggatgagccagaaatggcagtgtttctgcagaatgccaaaaccctgctaaaaaaaatctcggaagcatcaaaggcatttcagatggagaaaatagaacatggctatgagaacatgaaccacttcacagtcaacctcaatagagaagaaaagataatacgtgaaattgacttttacagagaagatgaagatgaagaagaagaagaaggcggagaaggagaaaaagaaggagaaggagaagtgggaggagaagcagtagaagtggaagaggtagaaaatgttcaaacagagtttccaggagaagatgaaaacccagaaaaagcttcagagctctctcaggtggagctgcaggctgcccctggggcacttccagtttcctctccagagccacctccagccctgccacctgctgcggatgcccctgtgacacagggggaggttgtacccactggctctgagcagaccacagagtctgaaactccagtccctgcagcagcagaaactgcggatcccttgttttaccctagttggtataaaggccaaacccggaaagccaccaccaacccaccttgcaccccagggagcgaaggtctggggcaaatagggcctccaggttctgaggattcgaatgtacggaaggcagaagtggcagcagccgcagcgagtgagagggcagctgtgagtggtaaggaaactagtgcacctgcagctacttctcagattggatttgaggctcctcccctccagggacaggctgcagctccagcgagtggcagtggagctgattctgagccagctcgccatatcttctccttttcctggttgaactccctaaatgaatgatattcattccaactgctgcccctctgtctgcctggctgagatgcatgtgggcagcaggaagcccaagtgaaattaatattatgcagatgatgaaagggacctctgaacaggatttctgcaaaaatagccccaaactgcaattccatatgacttatctaacatcttggggggaaagaatattttgagaaaatagttgcagaaagcactggaaataataaacttgatcttatacaaa

SEQ ID NO: 305889 - DNA, 1109 bp, Homo sapiens
gtgaacactcacatataggtctttgtgtgaatacatgttttcatctctcttgagtaaatgaaggagtggaattgctggattgtatgattggatttgaggctcctcccctccagggacaggctgcagctccagcgagtggcagtggagctgattctgagccagctcgccatatcttctccttttcctggttgaactccctaaatgaatgatattcattccaactgctgcccctctgtctgcctggctgagatgcatgtgggcagcaggaagcccaagtgaaattaatattatgcagatgatgaaagggacctctgaacaggatttctgcaaaaatagccccaaactgcaattccatatgacttatctaacatcttggggggaaagaatattttgagaaaatagttgcagaaagcactggaaataataaacttgatcttatacaaatcttctattgtgtggaaaatgttgtgaagggtgtgtaggtgtggtacatgtgtatgtcactaacaagtggcaaatggtgaaaaaagtggtcactatgcttttgtctctcataggcactgactttttgttattatattatggtagctttcatttcctttactctttaacagtgcaggtggtcagtgaaaatcagtgtcaactcagaagtgactgatttatcaatacatggacaaaaagtaaatcattgaccaaagctatgaaatgtttcacaaagttttcctcttttgcataacagatgtcactggatgtacattcagaaatgttctttgaatttggtgacactttcatggtccagaaagctgaaggcctgggcatctcttgtgacatttttctaatattagttttagattttcacgtattaggcactttagttgaatcttccagcaaaagctgtctactttctcttttattcactgtggcaccaatctggtaaattgtagaacaattgcatgtgtttaaatatatatacaaacatatcacacattaaatatatatatatttaaatcatgctttgttaatatttgtcccaccataatgcctccttcagaacataagtgtaactttatatgaactcttaaataaatgatgtttttaaaaaaaaaaaa

SEQ ID NO: 305890 - DNA, 444 bp, Homo sapiens
gtgaacactcacatataggtctttgtgtgaatacatgttttcatctctcttgagtaaatgaaggagtggaattgctggattgtatgattggatttgaggctcctcccctccagggacaggctgcagctccagcgagtggcagtggagctgattctgagccagctcgccatatcttctccttttcctggttgaactccctaaatgaatgatattcattccaactgctgcccctctgtctgcctggctgagatgcatgtgggcagcaggaagcccaagtgaaattaatattatgcagatgatgaaagggacctctgaacaggatttctgcaaaaatagccccaaactgcaattccatatgacttatctaacatcttggggggaaagaatattttgagaaaatagttgcagaaagcactggaaataataaacttgatcttatacaaa

SEQ ID NO: 305891 - DNA, 987 bp, Homo sapiens
aacaaacaaaaaaactttataaagttgcatttactttcaagaaaaacacgtttcttttaatgatttggtttgtgtcctctttactcccaaatctagttttattttaatactaagaatcatattttttttttaagtcaaaccatttaatgtgtttcaaaactataaatgagtaactgctgaagacatgagtgtggagtttctggctggaactttgggttctgaaagtggtggacggaaaagcaccttacgtggacaatggtatattcgcagatgactgtggataaggtctgaccctgtgtttcaggaccacttgctgagaaagccctgagggatgatcttatggcaagcttaaagtagaagttcatgttgtttgtagtagcagagagtgaaaataagtctcagagaagctgcttgtggcattacccaattccttttttcttacttggcaagaacaggcctctaacccgtatttgcccacaagaggaggtaccaccatggcatcagggggccgattccgctgcccatcctgtagacatgaagtggttttggatagacatggggtatatggacttcagaggaacctgctggtggaaaatatcattgacatctacaagcaggagtccaccaggtaacactcttccactcttccatgtgtcaagcccatctgaaacttgtttttgtttgtttgttttaatgggttgctacgctgaatgcttgtttatcaatcacagactgttttatggaaaaatggttttccaagtcagtccttcccagtgagactgagagttgctcacagcaggagagaggggagttggtgcccatgcttttgtatcaatttaagaatgaagtgactcattaacaccaatccattccagatggtgatgctgaaagagacatactgctgtccccctccaccttaaagcctggtattacatccattttacacattttgcacttcacaggcactttgtagctccagatccctac

SEQ ID NO: 305892 - DNA, 1802 bp, Homo sapiens
ctcctcggattacgcatgctcagtgcaatcttcggttgcctggactagcgctccggtttttctgtgctgaacctcaggggacgccgacacacgtacacgtcccttcgatagctcagctggtagagcggaggactgtagctacttcctcagcaggagacatccttaggtcgctggttcgattccggctcgaaggagacaagtgcggtttttttctccagctcccgatgacttatggcactttccttgggtgccttcagtgacacattgcattccaacgagcagtttgaaagtctagcgctttctccccattttgggcctcccagcctgcacgggactcatctgaggctaagctgcccatagttcggggagacccacagggaaaacaaaacaagaaacagagaacttggaaacggacgctgattactttgaacgtttgctcaaccgaggaagcaggaactgttcggccccatctcaagtccgcagggcggactgcctggctctgggcagatccgaggtggataggacaaggcaaaaggtagccctggagaggccagaaaagaaatccgaccagcccatgtgcgaggaacatgaagaggagcgcatcaacatctactgtctgaactgcgaagtacccacctgctctctgtgcaaggtgtttggtgcacacaaagactgccaggtggctcccctcactcatgtgttccagagacagaagtctgagctcagtgatggcatcgccatcctcgtgggcagcaacgatcgagtccagggagtgatcagccagctggaagacacctgcaaaactatcgaggaatgttgcagaaaacagaaacaagagctttgtgagaagtttgattacctgtatggcattttggaggagaggaagaatgaaatgacccaagtcattacccgaacccaagaggagaaactggaacatgtccgtgctctgatcaaaaagtattctgatcatttggagaacgtctcaaagttggttgagtcaggaattcagtttatggatgagccagaaatggcagtgtttctgcagaatgccaaaaccctgctaaaaaaaatctcggaagcatcaaaggcatttcagatggagaaaatagaacatggctatgagaacatgaaccacttcacagtcaacctcaatagagaagaaaagataatacgtgaaattgacttttacagagaagatgaagatgaagaagaagaagaaggcggagaaggagaaaaagaaggagaaggagaagtgggaggagaagcagtagaagtggaagaggtagaaaatgttcaaacagagtttccaggagaagatgaaaacccagaaaaagcttcagagctctctcaggtggagctgcaggctgcccctggggcacttccagtttcctctccagagccacctccagccctgccacctgctgcggatgcccctgtgacacagattggatttgaggctcctcccctccagggacaggctgcagctccagcgagtggcagtggagctgattctgagccagctcgccatatcttctccttttcctggttgaactccctaaatgaatgatattcattccaactgctgcccctctgtctgcctggctgagatgcatgtgggcagcaggaagcccaagtgaaattaatattatgcagatgatgaaagggacctctgaacaggatttctgcaaaaatagccccaaactgcaattccatatgacttatctaacatcttggggggaaagaatattttgagaaaatagttgcagaaagcactggaaataataaacttgatcttatacaaa

SEQ ID NO: 305893 - DNA, 409 bp, Homo sapiens
aaattaaccgtgtcgttctccccctccattttttacacctccccccatcacattggatttgaggctcctcccctccagggacaggctgcagctccagcgagtggcagtggagctgattctgagccagctcgccatatcttctccttttcctggttgaactccctaaatgaatgatattcattccaactgctgcccctctgtctgcctggctgagatgcatgtgggcagcaggaagcccaagtgaaattaatattatgcagatgatgaaagggacctctgaacaggatttctgcaaaaatagccccaaactgcaattccatatgacttatctaacatcttggggggaaagaatattttgagaaaatagttgcagaaagcactggaaataataaacttgatcttatacaaa

SEQ ID NO: 305894 - DNA, 1383 bp, Homo sapiens
ctcctcggattacgcatgctcagtgcaatcttcggttgcctggactagcgctccggtttttctgtgctgaacctcaggggacgccgacacacgtacacgtcccttcgatagctcagctggtagagcggaggactgtagctacttcctcagcaggagacatccttaggtcgctggttcgattccggctcgaaggagacaagtgcggtttttttctccagctcccgatgacttatggcactttccttgggtgccttcagtgacacattgcattccaacgagcagtttgaaagtctagcgctttctccccattttgggcctcccagcctgcacgggactcatctgaggctaagctgcccatagttcggggagacccacagggaaaacaaaacaagaaacagagaacttggaaacggacgctgattactttgaacgtttgctcaaccgaggaagcaggaactgttcggccccatctcaagtccgcagggcggactgcctggctctgggcagatccgaggtggataggacaaggcaaaaggtagccctggagaggccagaaaagaaatccgaccagcccatgtgcgaggaacatgaagaggagcgcatcaacatctactgtctgaactgcgaagtacccacctgctctctgtgcaaggtgtttggtgcacacaaagactgccaggtggctcccctcactcatgtgttccagagacagaagtctgagctcagtgatggcatcgccatcctcgtgggcagcaacgatcgagtccagggagtgatcagccagctggaagacacctgcaaaactatcgaggtgagtcaggtgactcccacagcgtctcaaccaagcctgcaatgcctgggggtttatgacttccttagtgccacactagacatccctattctgacctttcattctttgcttctagaatggcctccttcctgatatgtctctgaaatattcacctcctgcacagaaagagacattatcacatgagtcactgaggcagatgttaccacaattactagggctgttgctgtatgtgttgttctttcttccttttgaaagattagctacaagaaaattaaatcccccatcatggaaatcagtgttgttgctattacagcaaactttcctggtggaaatccaaactgtcttaggaaatgctcatcggtgctttagacagtcataggcaggtttgagctgcacttctctgctcttacagcagtgctgcgaagtggccataaggaggagaaagatctgcctagctgtagttagagaatggctcagtggctgggagctcatggaggccaagagtttgagctcattcatctccacttgccctctgcctggcccaatgcctggcacataatcaaccctgaaaa

SEQ ID NO: 305895 - DNA, 418 bp, Homo sapiens
tgactggaccaatccaaaaagaacaaacctcttttttctctgattcccattttcttccattgcagattggatttgaggctcctcccctccagggacaggctgcagctccagcgagtggcagtggagctgattctgagccagctcgccatatcttctccttttcctggttgaactccctaaatgaatgatattcattccaactgctgcccctctgtctgcctggctgagatgcatgtgggcagcaggaagcccaagtgaaattaatattatgcagatgatgaaagggacctctgaacaggatttctgcaaaaatagccccaaactgcaattccatatgacttatctaacatcttggggggaaagaatattttgagaaaatagttgcagaaagcactggaaataataaacttgatcttat

SEQ ID NO: 305896 - DNA, 1873 bp, Homo sapiens
ccaccgtttgtttaattgctcgctcattgaaggatatctgggatgttttcagattttggctattacaaataaagcagctgtgaacaatcacatacaggttttggtgtaaacatgagttttcgtttccctgggataaatgtgtaatttctgagttcagtgtaaattccaagagtgaagtttttgggctgttacgataagtgcatatttagttctgtaggaaactgttagactcattttgcaaagtggccataccattttgcattcctgctagaaatgtatgactgatccagttcctccacactctcgacagcacttggtgttttcatctcttgtgattgttgagttgtgtagtaacatctcttgtggttttagtttgcatttctctaattagacattttttatgtgcttgtttgccatccgtatatcctcttcagtgaaatatccattcatgtcttttgcccattttctacctagattgtttttcactgttgaattttgagagctttttatgtattccagatacaagtccttcgtcaaatatgtggcttgcagagattatctcccagtctgtattttgttttgttcaacctcttaacaaggtctttgaaaagcaaaaatttctaatttttatggtttattaattttttcttttatgaattgtgcttttggtgtcaagtctaaaaattctttacttatccctagatatcccaaagattttctactatttttcctggaagttttatattatgttttacatttaagtctgtgattagtttatttgaaggctttcctgttttctaatgtaagaattaagtgctataaatttctctctcagcacttctttaaggctatgcctcacatattttgatatgctgtattttcattttcattcagtcctatgtatttttttcttttgagacttcttcttttacccatacattactgagaagtatgttattgaatttccagtagtttagatattttacttttttttttttccttttgagagagggtcttactctgtcacccaggctggagtgcagtgatacgatctcagctcactgcaacctccacctcccgggttcaagtgattctctgacctctgcctcccgagtagctgcgattacaggcgcatgccaccgtgtccggctaacttgtattttttggtagagatgaggtttcactgtgttgcccaggctggtcttgaactcctgacctcaagcgatctgtgcacctcagcctcccaaagtgctgggattacagacatgagccactgtgtcctgccaagattttactattatcttagtgttactgatttctggtttgattccattatgctcagagaaatactctatgatttcagttctcttctgtttcttgaagtttgttttatgatgtaggatgtagtttgtcttagtcagtgtttcattggtgcttagaaaaaatattctgctgttgggtggcatgttctctgggtgttaattagaccagtgggcacagcttttcttcctgaggagccgggctgggagagcctattcccactgggctctgtgagaccagggtgggaggaggattgtgattttgcccttggcgcctggctggagtagaatgaatattactgcaagtgttttctgatgttaggccatccttctcttggtactttggctagcggagttgggcttttctcggctttttctggggtcgggtggtgggctgctctggtcctgttggctgttccaggttggaggcttctgcagcacattgtcagggatctatgggggaagtaaggaagcttggaagccaccacccgtttctcatgtcttgagggccccaggcagcccacctccttttccctcctataacatgtaatata

SEQ ID NO: 305897 - DNA, 395 bp, Homo sapiens
tgctattattattattttgagacagagtcttaactctgttgcccaggcaggagtgcagtggcgagatctggactcactgcaacctctgcctcctggcttcaagcaattctcatgcttcagcctgtagctggaactacaggtcactccctctggaggaaaccagctgccactttgtgaggatactcatagtcctgtggaggcatatcctccatatggctgagacctcctgcgaacaaccatcactgacttgccagacatgagtgtgccaccttggaagcagattttccagccccagttaagccttcagatgacatcagcccctgctaatctcttgactacaacctcatgagagaccctgagccagaactagccaggtaagccactcctgaattcct

SEQ ID NO: 305898 - DNA, 1510 bp, Homo sapiens
tgctattattattattttgagacagagtcttaactctgttgcccaggcaggagtgcagtggcgagatctggactcactgcaacctctgcctcctggcttcaagcaattctcatgcttcagcctgtagctggaactacaggtcactccctctggaggaaaccagctgccactttgtgaggatactcatagtcctgtggaggcatatcctccatatggctgagacctcctgcgaacaaccatcactgacttgccagacatgagtgtgccaccttggaagcagattttccagccccagttaagccttcagatgacatcagcccctgctaatctcttgactacaacctcatgagagaccctgagccagaactagccaggcttacccctcatggttacaaagtggctgcaacagctccaggtgttctatcctttaacacagaataactcaaacaacaagacccaatattcagacaagaaggaaagggacttttggagagtgaagaaaactttcctagaaacctcaaacttctccccatgccttattggccagattgtatcccatgcccatttctaaaccaatcattggcaaagtgagtggaattgacgtgattagattaactttaccaagaatgcatcctcagagaggctgagaaaaagtccagcctcctttgaagagcctggctacctttcacctgaacaaaacaagaattctgatgaaaaatggagaatgtatgtggagcaggcacccggagtgtctatgccaggattttttttcagtgcgtttcaccggttatatttttgtctctttaccttacaagatatgtggcacgtttgcctaaaacaagccttgctttctgatttctgtgcactaggcacttaaaccttgcaaatgtcgcttacctaacagtcactgtcaaggagtacctggctaaagaatctccagctagacaaagtagaagtgtctgtgctctggcagttgaatatattgtatcaggctcaacagcacctttcaccaaaggatgagacttcacaaccattagatcttcttttattttgtttttattaaaaaaaaaaattttaacacaccattgctaacttgaagccattagatcttcttacccccaataccacaaaagtttagtggaatcaggggtataccaaggcaggtggagtaggggagctgggagtggtcagcccccagggcaggcaatgagggattgtgaatctgtgaagaattttaaagcaatgatacagctctaaatgcaatgtactatcctggacttagccctggaaaagaaaaaagatattagtggaaaaactggtaaaattcaaataatgtctgtagtttggttaatagtattataccaatgttaatttctgtgttttgataaatgtaccatggttatgtaagctggatgaaagatatgtgggaaatctctctactatttctgcaactctcctgtaaacctaaaaatgtttcaaaataaaagatttaatgctaaaattgactgaa

SEQ ID NO: 305899 - DNA, 1882 bp, Homo sapiens
gggttgcgggctgtggccccgggggctgagggcggcgcgggtgcggcggaagcagggaagccgcgaaccggccttctggctggccacagcgccctgcacggacgatcagtgaatggagattactcaagtatttatcgagaacttgcagtgggctaggcacagttcaggtccacagttatttcacttctaaataaatatggttttttaaaagtggcacgcggtggaatgtaattgagacaggatggagttcctagagaaattttacttcctcaatctgcactccaccttacttaaaatacagtcttgggtctgtaattcccttatctgactctcaaggaaatgacaaagtaatgcctagattggactaaacctcatttaacttcaaggctgacctttctcaaagttgaaccttcgtcttgtgaggaacagaaagatcaagaactctgaagcacctcgactttccacctgtgaagatgtgttcaaatttgcaacgtgcggccacacctatgaggtcactccctctggaggaaaccagctgccactttgtgaggatactcatagtcctgtggaggcatatcctccatatggctgagacctcctgcgaacaaccatcactgacttgccagacatgagtgtgccaccttggaagcagattttccagccccagttaagccttcagatgacatcagcccctgctaatctcttgactacaacctcatgagagaccctgagccagaactagccaggcttacccctcatggttacaaagtggctgcaacagctccaggtgttctatcctttaacacagaataactcaaacaacaagacccaatattcagacaagaaggaaagggacttttggagagtgaagaaaactttcctagaaacctcaaacttctccccatgccttattggccagattgtatcccatgcccatttctaaaccaatcattggcaaagtgagtggaattgacgtgattagattaactttaccaagaatgcatcctcagagaggctgagaaaaagtccagcctcctttgaagagcctggctacctttcacctgaacaaaacaagaattctgatgaaaaatggagaatgtatgtggagcaggcacccggagtgtctatgccaggattttttttcagtgcgtttcaccggttatatttttgtctctttaccttacaagatatgtggcacgtttgcctaaaacaagccttgctttctgatttctgtgcactaggcacttaaaccttgcaaatgtcgcttacctaacagtcactgtcaaggagtacctggctaaagaatctccagctagacaaagtagaagtgtctgtgctctggcagttgaatatattgtatcaggctcaacagcacctttcaccaaaggatgagacttcacaaccattagatcttcttttattttgtttttattaaaaaaaaaaattttaacacaccattgctaacttgaagccattagatcttcttacccccaataccacaaaagtttagtggaatcaggggtataccaaggcaggtggagtaggggagctgggagtggtcagcccccagggcaggcaatgagggattgtgaatctgtgaagaattttaaagcaatgatacagctctaaatgcaatgtactatcctggacttagccctggaaaagaaaaaagatattagtggaaaaactggtaaaattcaaataatgtctgtagtttggttaatagtattataccaatgttaatttctgtgttttgataaatgtaccatggttatgtaagctggatgaaagatatgtgggaaatctctctactatttctgcaactctcctgtaaacctaaaaatgtttcaaaataaaagatttaatgctaaaattgactgaa

SEQ ID NO: 305900 - DNA, 1946 bp, Homo sapiens
gtggaagaataaacacagaagaagcaaaaaaggaaggaactttctcactgaaagtttctatttaatattaagtcttaaaagtactcctggaaggacaaaaggtgttcttaataaattatattcgcaaatattggatttaatcctaccagtaatgaagcagtcagttactttctagatgtgcagaaatacgtaatgaacaaaaaaactaattcctattccattttttattaggtccacagttatttcacttctaaataaatatggttttttaaaagtggcacgcggtggaatgtaattgagacaggatggagttcctagagaaattttacttcctcaatctgcactccaccttacttaaaatacagtcttgggtctgtaattcccttatctgactctcaaggaaatgacaaagtaatgcctagattggactaaacctcatttaacttcaaggctgacctttctcaaagttgaaccttcgtcttgtgaggaacagaaagatcaagaactctgaagcacctcgactttccacctgtgaagatgtgttcaaatttgcaacgtgcggccacacctatgaggtcactccctctggaggaaaccagctgccactttgtgaggatactcatagtcctgtggaggcatatcctccatatggctgagacctcctgcgaacaaccatcactgacttgccagacatgagtgtgccaccttggaagcagattttccagccccagttaagccttcagatgacatcagcccctgctaatctcttgactacaacctcatgagagaccctgagccagaactagccaggcttacccctcatggttacaaagtggctgcaacagctccaggtgttctatcctttaacacagaataactcaaacaacaagacccaatattcagacaagaaggaaagggacttttggagagtgaagaaaactttcctagaaacctcaaacttctccccatgccttattggccagattgtatcccatgcccatttctaaaccaatcattggcaaagtgagtggaattgacgtgattagattaactttaccaagaatgcatcctcagagaggctgagaaaaagtccagcctcctttgaagagcctggctacctttcacctgaacaaaacaagaattctgatgaaaaatggagaatgtatgtggagcaggcacccggagtgtctatgccaggattttttttcagtgcgtttcaccggttatatttttgtctctttaccttacaagatatgtggcacgtttgcctaaaacaagccttgctttctgatttctgtgcactaggcacttaaaccttgcaaatgtcgcttacctaacagtcactgtcaaggagtacctggctaaagaatctccagctagacaaagtagaagtgtctgtgctctggcagttgaatatattgtatcaggctcaacagcacctttcaccaaaggatgagacttcacaaccattagatcttcttttattttgtttttattaaaaaaaaaaattttaacacaccattgctaacttgaagccattagatcttcttacccccaataccacaaaagtttagtggaatcaggggtataccaaggcaggtggagtaggggagctgggagtggtcagcccccagggcaggcaatgagggattgtgaatctgtgaagaattttaaagcaatgatacagctctaaatgcaatgtactatcctggacttagccctggaaaagaaaaaagatattagtggaaaaactggtaaaattcaaataatgtctgtagtttggttaatagtattataccaatgttaatttctgtgttttgataaatgtaccatggttatgtaagctggatgaaagatatgtgggaaatctctctactatttctgcaactctcctgtaaacctaaaaatgtttcaaaataaaagatttaatgctaaaattgactgaa

SEQ ID NO: 305901 - DNA, 323 bp, Homo sapiens
cccacagcactatatgcttcccttaaaattggcccattgccagtggcaaatcactatctactgtgatccttatcatagacattggtcatatttttacgttattagttttctgtgtatattttagtgctatagcctgccattccaagttaaacatgctcttagcatatcattttacaccgttgatctataattcattacctgagcacatgagcagaggcagggaattatacagtggtaaactacttggtgaaaccatgctttgtatttttaagatgtataattatatttaaaaacaagcaatgcttaattttgtgcctgatttt

SEQ ID NO: 305902 - DNA, 1065 bp, Homo sapiens
aaaaagaagcgatgctttctgtttcctagatataaatttacttcaacaccttttacactgaaagatattctcctaggagacagagaaatttcagctggtatttcatcttatcaattactgaattatgaagatgaatcagatgtttcactctatggaaggcgaggtaaccatattgtaaatgacgttgggattaacgttgctggatcagattccattgcagtgaaagcttcatttggtatagtaaccaaacatgaagtggaagtatcaacattactcaaagaaattactacacgaaaaattaactttgaccacagcttgatacgtcagtcaaggagcagcagaaaggcagtattgtgtgtggtcatggagagcatccgaaccacacgacagtgctcactgtctgtgcatgctggaattcgaggggaagcaatgcggtttcactttatggatgaacagaatcccaagggaagggacaaagctattgttttcccagcacatacaaccatagctttcagtgtttttgaactcttcatatacctggatggtgcctttgacctttgtgtcacttcagtgtcaaaaggaggatttgaaagggaagaaacggcaacatttgcactgctgtacaggttgagaaatatcctatttgaaagaaatagaagagtgatggatgtcatttctcgttcacagctttacttggatgatcttttttctgactactatgacaaacctctcagcatgactgatatttcactcaaagaagggacccatatccgagttaacttacttaatcacaacattcccaaagggccttgcatactctgtggaatggggaacttcaaaagggagacagtttatgggtgctttcagtgttctgttgatggtcagaagtatgtgagacttcatgcagttccttgttttgatatttggcacaagaggatgaaataaaatgaaaaatgaatacaccgtgttggtgttttaggtgcagttgtgccacaaaccttccctaaattatctaggtttgctttgatgaattaaattaaaatgagaaaagcaaaaagaaataaa

SEQ ID NO: 305903 - DNA, 937 bp, Homo sapiens
agatttcctgttaaaaaaaaaaaaaaggcttctgctccagagcattatggttgtggtagcactaatcatgggctgtaataccaaagtaagtgaaaagtgcagaggtatttcctaatatagaccaggagtttctgttggaccaattggatctctgctataaaaaatggtttaattcaagcagaataatcctttacttgggaattttttgttttgtttttggtaggattataggaaatgtttcatttctccaaaaagctatccttacatgttatgatccttaattatgttatttatttattcaatatagtttcactttatggatgaacagaatcccaagggaagggacaaagctattgttttcccagcacatacaaccatagctttcagtgtttttgaactcttcatatacctggatggtgcctttgacctttgtgtcacttcagtgtcaaaaggaggatttgaaagggaagaaacggcaacatttgcactgctgtacaggttgagaaatatcctatttgaaagaaatagaagagtgatggatgtcatttctcgttcacagctttacttggatgatcttttttctgactactatgacaaacctctcagcatgactgatatttcactcaaagaagggacccatatccgagttaacttacttaatcacaacattcccaaagggccttgcatactctgtggaatggggaacttcaaaagggagacagtttatgggtgctttcagtgttctgttgatggtcagaagtatgtgagacttcatgcagttccttgttttgatatttggcacaagaggatgaaataaaatgaaaaatgaatacaccgtgttggtgttttaggtgcagttgtgccacaaaccttccctaaattatctaggtttgctttgatgaattaaattaaaatgagaaaagcaaaaagaaataaa

SEQ ID NO: 305904 - DNA, 741 bp, Homo sapiens
aaaaagaagcgatgctttctgtttcctagatataaatttacttcaacaccttttacactgaaagatattctcctaggagacagagaaatttcagctggtatttcatcttatcaattactgaattatgaagatgaatcagatgtttcactctatggaaggcgaggtaaccatattgtaaatgacgttgggattaacgttgctggatcagattccattgcagtgaaagcttcatttggtatagtaaccaaacatgaagtggaagtatcaacattactcaaagaaattactacacgaaaaattaactttgaccacagcttgatacgtcagtcaaggagcagcagaaaggcagtattgtgtgtggtcatggagagcatccgaaccacacgacagtgctcactgtctgtgcatgctggaattcgaggggaagcaatgcgggtaaaccacacttgttgggttctcttactaactaaagtgttgccatgggaatttttttaagtattgaatttctagtcaggcttgtgtattttgtgaaatgttctgatgaaagagctgcagttgtataggattttgcacagcaatgtctgttctagaatatgaaaaaaaaaaacaaatcttgggattctaaacatgtgtaatataatgcaaaaacagtaatccttgtgaaattacgtgcatactggagtccctcaagttactatttaagtgttgttttaagaataaaaattgagtgagttgaattga

SEQ ID NO: 305905 - DNA, 699 bp, Homo sapiens
gggaattatacagtggtaaactacttggtgaaaccatgctttgtatttttaagatgtataattatatttaaaaacaagcaatgcttaattttgtgcctgattttcctctttaaaaatggatttatctgggggttgcagttgatgacgttttgattttaatatgtttgctgctgctaccaagagctttgtcaagcaagttggagatggagggagattagttcctgttccaagcctcagtgaagctgacaaatatcaacctctaagtctggtggtaaaaaagaagcgatgctttctgtttcctagatataaatttacttcaacaccttttacactgaaagatattctcctaggagacagagaaatttcagctggtaagtttaaatgtttgggagtgccaactcattcatctgtattattggcaacctaaacataggtcatatatgctacttatgttagtaatacacattttcaatgattaaagcaacttttattatgatgttagtgtaataacattattaagattaacaatgccaaaagtttgtataatatcaaatctcttattggtcaaataattttcaaatctatcaattattttataaattgttttaaccaaatcaacttagaatatgacatatttcttcatctataaaatgggatattatttgggcttacctatgttacatggtcaaatgagatgaa

SEQ ID NO: 305906 - DNA, 398 bp, Homo sapiens
tagtggattcacatatttattaatgctgtttgcattatgtatttttcattttcacttctaacacatttcttttctgtttttgtccttttagatagaagagtgatggatgtcatttctcgttcacagctttacttggatgatcttttttctgactactatgacaaacctctcagcatgactgatatttcactcaaagaagggacccatatccgagttaacttacttaatcacaacattcccaaagggccttgcatactctgtggaatggggaacttcaaaagggagacagtttatgggtgctttcagtgttctgttgatggtcagaagtatgtgagacttcatgcagttccttgttttgatatttggcacaagaggatgaaataaaatgaaaaatgaat

SEQ ID NO: 305907 - DNA, 540 bp, Homo sapiens
gtggcattctttctcaaattgatgtaaagattcagtgcagtccctatcaaaagcctaaatggcttcttagcagaaattgtcgagcttatcttaaaattcatttgggaattaaaagaacccggaatagccgtaacagtcttgaaaaaaaaaaaaaaacaaagattaggactcacgcattctggtatcagaatttattacaaagctacattaatcaagactgtgatgctgccatgtggatagacatgtagatcagtggagtagaattgagaggccaaagataaaccttcatatttatggtcaattgatttctgacaaaaatgccaagagaattcaatgaggaaatttatgttttccaaccagtagtcctgggacggttattagacattgaaatgcaaaaagatgaagttccactcctgcctctctgtagacacacacaaaaaagtgaatcatgacctaaatgtaagagctgaaatcataaaactcttaaaggaaaacatgaggaaatcttcatgaccttgggttaggccatggtttctgaga

SEQ ID NO: 305908 - DNA, 1821 bp, Homo sapiens
gattatctgagcgatagcttgcaaggttatttatttattgccatgaggattatctggatgtgtagcagattcatgcccaagcacaaaacaacccatttaaagaagatgctcggccttaaaggaaatggcggtgcggttctgtccatggcccttccttttcagccagagcagagagattcagaggatttattgaagaattttaattcagagtgtgatacacactgtggccttgatactgcacgacaagaatatttgggtaactcattaagacaggaatcagacttgaaaaaatccacctcgtcagataattcaagctctcatcatggtgaaaataaacaaaatctgactgttgatccctgtgacattttgggtggagttgataatcagcaaagactgctacacattgtctggcctcacaggtgggagcatgataaagatccagaaagcttttttaaggtattaatgcatcttaaagacttaggactcaatttccacgtgtctgtacttggagaaaccttcacagatgtcccaggttggaagctgtgtactgtgggtgttacccactttgtcctaaagatttggtttatcccgaaatatttccagctgaatatctgtattctacacctgaacagctttcaaaaaggctccagaatttctgcaagagaccagatattataagaaaacatctctataagggtgaaatcgctccgttttcttgggcagccctacatggtaaattcaggtctctgcttacaacagaacctagggaagatttgtgacagatggggctaagtcacaaacttgcagcctaaggcagaatctgaagaactttccagagtgtgcccatatttacctgatcagagagaaaagaaaatctgcagaggaagctgagcctggctgcttgtcatagctgacacagagccatctgccacaaacctgtggcggcttcagatctccaatccctgccaccaccccaactcaaattaaatacagattcctagagacgttatgatggttacacatgtcctcggcatcacatgtaggagactgttcaaaaaaaatatgtggcctgttgtataaccgcactcatgtatcccatatgtggtgccacattgaatttccggttgaatccgtttttatcctttgtactggatgacatggtgcctgaattctttcttttcgccgacacgatggcagccaaactgcagcttcaaacgctcacacttggctgggtttctacctaggttgccaggttatcatcggagccttcttgtgtcctcaaagggccacgaggcctgaaaggaggatcagaatgctttgggattaattgggcagccatcgcagaattgtttgtgggcaaagggctgctttagcacttttcttttagcaaattaatgactctcaggcacagggggttttaagtgaaggtattaataagaggtctggcaggtattcccatgattcacagagttacatttgcatttaattaatcttaaagttgcaagataaacagctgtaattcggacaaacatgacaaacacagtgaagccaactatcccataaaatgaacactgacatacttgttttaatttttttcccagcgtaaaaatagaaaaatcaaaatactcctaacaaaaccagtgattttgatagaaatatttctccaatatacttgcatccacctacaaatataaccttttcaagataaatcgcttatgatttcaatagtcaaactgctgtgtttgttgatgtaaagatgttttgaatggctagatggtaaaataaattcttaataaagtacccactgcaatttttaaaaaa

SEQ ID NO: 305909 - DNA, 927 bp, Homo sapiens
  misc_feature (893)..(893): n is a, c, g, or t
  misc_feature (926)..(926): n is a, c, g, or t
gattatctgagcgatagcttgcaaggttatttatttattgccatgaggattatctggatgtgtagcagattcatgcccaagcacaaaacaacccatttaaagaagatgctcggccttaaaggaaatggcggtgcggttctgtccatggcccttccttttcagccagagcagagagattcagaggatttattgaagaattttaattcagagtgtgatacacactgtggccttgatactgcacgacaagaatatttgggtaactcattaagacaggaatcagacttgaaaaaatccacctcgtcagataattcaagctctcatcatggtgaaaataaacaaaatctgactgttgatccctgtgacattttgggtggagttgataatcagcaaagactgctacacattgtctggcctcacaggtgggagcatgataaagatccagaaagcttttttaaggtattaatgcatcttaaagacttaggactcaatttccacgtgtctgtacttggagaaaccttcacagatgtcccagatattttttcagaggccaaaaaggcattgggatcttctgtcttacactggggctacttacccagcaaagatgactacttccaagtactgtgcatggctgatgttgtcatctcaacagctaagcatgaattctttggagtggcaatgttggaagctgtgtactgtgggtgttacccactttgtcctaaagatttggtttatcccgaaatatttccagctgaatatctgtattctacacctgaacagctttcaaaaaggctccagaatttctgcaagagaccagatattataagaaaacatctctataaggggtggaaaatcggcttcccgtttttccttggggccagccccttacattgggnaaaaattcaaggtccttctggctttaccaaccng

SEQ ID NO: 305910 - DNA, 281 bp, Homo sapiens
actgtggccttgatactgcacgacaagaatatttgggtaactcattaagacaggaatcagacttgaaaaaatccacctcgtcagataattcaagctctcatcatggtgaaaataaacaaaatctgactgttgatccctgtgacattttgggtggagttgataatcagcaaagactgctacacattgtctggcctcacaggtggtaagtcaaggcatgccaatttagtaagagttgtagaactggtaaaagaaaatatattctgttgattgacataataatt

SEQ ID NO: 305911 - DNA, 1966 bp, Homo sapiens
gattatctgagcgatagcttgcaaggttatttatttattgccatgaggattatctggatgtgtagcagattcatgcccaagcacaaaacaacccatttaaagaagatgctcggccttaaaggaaatggcggtgcggttctgtccatggcccttccttttcagccagagcagagagattcagaggatttattgaagaattttaattcagagtgtgatacacactgtggccttgatactgcacgacaagaatatttgggtaactcattaagacaggaatcagacttgaaaaaatccacctcgtcagataattcaagctctcatcatggtgaaaataaacaaaatctgactgttgatccctgtgacattttgggtggagttgataatcagcaaagactgctacacattgtctggcctcacaggtgggagcatgataaagatccagaaagcttttttaaggtattaatgcatcttaaagacttaggactcaatttccacgtgtctgtacttggagaaaccttcacagatgtcccagatattttttcagaggccaaaaaggcattgggatcttctgtcttacactggggctacttacccagcaaagatgactacttccaagtactgtgcatggctgatgttgtcatctcaacagctaagcatgaattctttggagtggcaatgttggaagctgtgtactgtgggtgttacccactttgtcctaaagatttggtttatcccgaaatatttccagctgaatatctgtattctacacctgaacagctttcaaaaaggctccagaatttctgcaagagaccagatattataagaaaacatctctataagggtgaaatcgctccgttttcttgggcagccctacatggtaaattcaggtctctgcttacaacagaacctagggaagatttgtgacagatggggctaagtcacaaacttgcagcctaaggcagaatctgaagaactttccagagtgtgcccatatttacctgatcagagagaaaagaaaatctgcagaggaagctgagcctggctgcttgtcatagctgacacagagccatctgccacaaacctgtggcggcttcagatctccaatccctgccaccaccccaactcaaattaaatacagattcctagagacgttatgatggttacacatgtcctcggcatcacatgtaggagactgttcaaaaaaaatatgtggcctgttgtataaccgcactcatgtatcccatatgtggtgccacattgaatttccggttgaatccgtttttatcctttgtactggatgacatggtgcctgaattctttcttttcgccgacacgatggcagccaaactgcagcttcaaacgctcacacttggctgggtttctacctaggttgccaggttatcatcggagccttcttgtgtcctcaaagggccacgaggcctgaaaggaggatcagaatgctttgggattaattgggcagccatcgcagaattgtttgtgggcaaagggctgctttagcacttttcttttagcaaattaatgactctcaggcacagggggttttaagtgaaggtattaataagaggtctggcaggtattcccatgattcacagagttacatttgcatttaattaatcttaaagttgcaagataaacagctgtaattcggacaaacatgacaaacacagtgaagccaactatcccataaaatgaacactgacatacttgttttaatttttttcccagcgtaaaaatagaaaaatcaaaatactcctaacaaaaccagtgattttgatagaaatatttctccaatatacttgcatccacctacaaatataaccttttcaagataaatcgcttatgatttcaatagtcaaactgctgtgtttgttgatgtaaagatgttttgaatggctagatggtaaaataaattcttaataaagtacccactgcaatttttaaaaaa

SEQ ID NO: 305912 - DNA, 917 bp, Homo sapiens
ggtttgcagagagttctcaagccttgaaatcatctctcttcacatctgacatgaacctccttctcaatagcatttctctcttaacttttctttcagaatttgttgtcatccacaatgggatcatcacaaattacaaagatctgaggaaatttctggaaagcaaaggctacgagtttgagtcagaaacagatacagagaccatcgccaagctgattaaatatgtgttcgacaacagagaaactgaggacattacgttttcaacgttggtcgagagagtcattcagcagttggaaggtgcattcgcgctggttttcaagagtgtccactacccaggagaagccgttgccacacggagaggcagccccctgctcatcggagtccggagcaaatacaagctctccacagaacagatccctatcttatacaggacgtgcactctggagaatgtgaagaatatctgtaagacacggatgaagaggctggacagctccgcctgcctgcatgctgtgggcgacaaggccgtggaattcttctttgcttctgatgcaagcgctatcatagagcacaccaaccgggtcatcttcctggaggacgatgacatcgccgcagtggctgatgggaaactctccattcaccgggtcaagcgctcggccagtgatgacccatctcgagccatccagaccttgcagatggaactgcagcaaatcatgaaaggtacttcgtgcgttactcctgaagggcaccttcgacgcagaccgaatctgtttcacaaccaggggaggtggtgacattagaagcacagacagcctggtagatgactgacatgaaggaatacaagaagactctcctgtgctggaacctgtaactcagaacccaagttgagggagaatccgcagtgattcgagactgagaatcgc

SEQ ID NO: 305913 - DNA, 3023 bp, Homo sapiens
cgccctctcggagggctccgggttataagggctggaggccgagcggacgggagctggagcccgcggagcccgcggagcccacggagcccacggaggagcccacggaggagccccagcgtccgaacgggcagaccccctcgagccgcgaaggagcccgagaagcagccacgatgtgcggaatctttgcctacatgaactacagagtcccccggacgaggaaggagatcttcgaaaccctcatcaagggcctgcagcggctggagtacagaggctacgactcggcaggtgtggcgatcgatgggaataatcacgaagtcaaagaaagacacattcagctggtcaagaaaagggggaaagtcaaggctctcgatgaagaactttacaaacaagacagcatggacttaaaagtggagtttgagacacacttcggcattgcccacacgcgctgggccacccacggggtccccagtgctgtcaacagccaccctcagcgctcagacaaaggcaacgaatttgttgtcatccacaatgggatcatcacaaattacaaagatctgaggaaatttctggaaagcaaaggctacgagtttgagtcagaaacagatacagagaccatcgccaagctgattaaatatgtgttcgacaacagagaaactgaggacattacgttttcaacgttggtcgagagagtcattcagcagttggagaggcagccccctgctcatcggagtccggagcaaatacaagctctccacagaacagatccctatcttatacaggacgtgcactctggagaatgtgaagaatatctgtaagacacggatgaagaggctggacagctccgcctgcctgcatgctgtgggcgacaaggccgtggaattcttctttgcttctgatgcaagcgctatcatagagcacaccaaccgggtcatcttcctggaggacgatgacatcgccgcagtggctgatgggaaactctccattcaccgggtcaagcgctcggccagtgatgacccatctcgagccatccagaccttgcagatggaactgcagcaaatcatgaaaggtaacttcagtgcgtttatgcagaaggagatcttcgaacagccagaatcagttttcaatactatgagaggtcgggtgaattttgaaaccaacacagtgctcctgggtggcttgaaggaccacttgaaggagattcgacgatgccgacggctcatcgtgattggctgtggaaccagctaccacgctgccgtggctacgcggcaagttttggaggaactgactgagcttcctgtgatggttgaacttgctagtgattttctggacaggaacacacctgtgttcagggatgacgtttgctttttcatcagccagtcaggcgagaccgcggacaccctcctggcgctgcgctactgtaaggaccgcggcgctctcaccgtgggcgtcaccaacaccgtgggcagctccatctctcgcgagaccgactgcggcgtccacatcaacgcagggccggagatcggcgtggccagcaccaaggcttataccagtcagttcatctctctggtgatgtttggtttgatgatgtctgaagaccgaatttcactacaaaacaggaggcaagagatcatccgtggcttgagatctttacctgagctgatcaaggaagtgctgtctctggaggagaagatccacgacttggccctggagctctacacgcagagatcgctgctggtgatggggcggggctacaactatgccacctgcctggaaggagccctgaaaattaaagagataacctacatgcactcagaaggcatcctggctggggagctgaagcacgggcccctggcactgattgacaagcagatgcccgtcatcatggtcattatgaaggatccttgcttcgccaaatgccagaacgccctgcagcaagtcacggcccgccagggtcgccccattatactgtgctccaaggacgatactgaaagttccaagtttgcgtataagacaattgagctgccccacactgtggactgcctccagggcatcctgagcgtgattccgctgcagctgctgtccttccacctggctgttctccgaggatatgacgttgacttccccagaaatctggccaagtctgtaactgtggaatgaggctgagaccgtgacaagaccatcaccacctttcatctgattccagacctgtcccaacagcagggatgctacatgggaagagaagtggacatcccacatgttctgcgtgctcctgtagagcttgacagcttccacgtgccttctacccaagtgcttttgcttacagcagatactgtttctctgtgtcctgaagtcgccagaggagaagggaatcattgtttacacatggggatcagagcagacttctccactactgtgcaatagagatacagctctcttcagagtaactgtgaaccttttataaccaacactagagttagttttaaaagacaagatatttataatgacgactgtatagcttttaagttatttttctagtatgtggctttctgtagccgtggtaacggccaaactgttcatcctagctacccatgctctgtgtccaggcttgctcctggcaggtggcattcatctcagatgtgagcacaaggcattggccctctggactcctttctccttttctttcctctctaggctgctcctgaatcctgttctctgacatccgtggagcccctcctgcatccacctatgcctcctataagtccagttgaaatctcagcctccttcaacattttcttctcgtgtgtggcccacatccctccacttctccaacttctgtttaatctgatcacggctctttttaagccctggcagcattttggtccctgctccttgcccatagtaaaacagcttgaaatatcccatgcaagagagtagtttcaagtgggcaactctgctctctatttaaaagcgtgcacaatcaaaagtactatgcaattttaggacaataaagaacatacagtttt

SEQ ID NO: 305914 - DNA, 1650 bp, Homo sapiens
gtggggccgaggctggcggagcgcggcactgagagggcccctgggcggcaggcgagaccgcggacaccctcctggcgctgcgctactgtaaggaccgcggcgctctcaccgtgggcgtcaccaacaccgtgggcagctccatctctcgcgagaccgactgcggcgtccacatcaacgcagggccggagatcggcgtggccagcaccaaggcttataccagtcagttcatctctctggtgatgtttggtttgatgatgtctgaagaccgaatttcactacaaagctgatcaaggaagtgctgtctctggaggagaagatccacgacttggccctggagctctacacgcagagatcgctgctggtgatggggcggggctacaactatgccacctgcctggaaggagccctgaaaattaaagagataacctacatgcactcagaaggcatcctggctggggagctgaagcacgggcccctggcactgattgacaagcagatgcccgtcatcatggtcattatgaaggatccttgcttcgccaaatgccagaacgccctgcagcaagtcacggcccgccagggtcgccccattatactgtgctccaaggacgatactgaaagttccaagtttgcgtataagacaattgagctgccccacactgtggactgcctccagggcatcctgagcgtgattccgctgcagctgctgtccttccacctggctgttctccgaggatatgacgttgacttccccagaaatctggccaagtctgtaactgtggaatgaggctgagaccgtgacaagaccatcaccacctttcatctgattccagacctgtcccaacagcagggatgctacatgggaagagaagtggacatcccacatgttctgcgtgctcctgtagagcttgacagcttccacgtgccttctacccaagtgcttttgcttacagcagatactgtttctctgtgtcctgaagtcgccagaggagaagggaatcattgtttacacatggggatcagagcagacttctccactactgtgcaatagagatacagctctcttcagagtaactgtgaaccttttataaccaacactagagttagttttaaaagacaagatatttataatgacgactgtatagcttttaagttatttttctagtatgtggctttctgtagccgtggtaacggccaaactgttcatcctagctacccatgctctgtgtccaggcttgctcctggcaggtggcattcatctcagatgtgagcacaaggcattggccctctggactcctttctccttttctttcctctctaggctgctcctgaatcctgttctctgacatccgtggagcccctcctgcatccacctatgcctcctataagtccagttgaaatctcagcctccttcaacattttcttctcgtgtgtggcccacatccctccacttctccaacttctgtttaatctgatcacggctctttttaagccctggcagcattttggtccctgctccttgcccatagtaaaacagcttgaaatatcccatgcaagagagtagtttcaagtgggcaactctgctctctatttaaaagcgtgcacaatcaaaagtactatgcaattttaggacaataaagaacatacagtttt

SEQ ID NO: 305915 - DNA, 1400 bp, Homo sapiens
gccaggatgaccttgatctgacctcgtgatccacctgcctcagcctcccaaagtgctgggattacaggtgtgagccaccgcacccggcccagtagaagcgtacttatgaaccattcctacctttccttcccactccaccctaaacaaataagtcccatggaattcatatatattcttgcaagaaaagttaatttttaacagtacacaccaagttacctgtgtttaaaagcatgaaccttattctttaaatcatgttaacagatcatgacacacatcaggtgcacagtaaatgtttattgagggactaaaccttatacggttaaatgaggcttctggactaaggaatctgcctccaagacgcaggtctctaggttggtgaccatggtgaacatctgtctcttgtttttaagtactctgaaaattgtctgtgagaggtagcatgttgctgagatctttggggtcctgaacagtcactttctttcattttaggttgacttccccagaaatctggccaagtctgtaactgtggaatgaggctgagaccgtgacaagaccatcaccacctttcatctgattccagacctgtcccaacagcagggatgctacatgggaagagaagtggacatcccacatgttctgcgtgctcctgtagagcttgacagcttccacgtgccttctacccaagtgcttttgcttacagcagatactgtttctctgtgtcctgaagtcgccagaggagaagggaatcattgtttacacatggggatcagagcagacttctccactactgtgcaatagagatacagctctcttcagagtaactgtgaaccttttataaccaacactagagttagttttaaaagacaagatatttataatgacgactgtatagcttttaagttatttttctagtatgtggctttctgtagccgtggtaacggccaaactgttcatcctagctacccatgctctgtgtccaggcttgctcctggcaggtggcattcatctcagatgtgagcacaaggcattggccctctggactcctttctccttttctttcctctctaggctgctcctgaatcctgttctctgacatccgtggagcccctcctgcatccacctatgcctcctataagtccagttgaaatctcagcctccttcaacattttcttctcgtgtgtggcccacatccctccacttctccaacttctgtttaatctgatcacggctctttttaagccctggcagcattttggtccctgctccttgcccatagtaaaacagcttgaaatatcccatgcaagagagtagtttcaagtgggcaactctgctctctatttaaaagcgtgcacaatcaaaagtactatgcaattttaggacaataaagaacatacagtttt

SEQ ID NO: 305916 - DNA, 584 bp, Homo sapiens
tccttctggccacgctcttctggccacgccttctggccacgcttttaaatagagagcagagttgcccacttgaaactactctcttgcatgggatatttcaagctgttttactatgggcaaggagcagggaccaaaatgctgccagggcttaaaaagagccgtgatcagattaaacagaagtggcattcatctcagatgtgagcacaaggcattggccctctggactcctttctccttttctttcctctctaggctgctcctgaatcctgttctctgacatccgtggagcccctcctgcatccacctatgcctcctataagtccagttgaaatctcagcctccttcaacattttcttctcgtgtgtggcccacatccctccacttctccaacttctgtttaatctgatcacggctctttttaagccctggcagcattttggtccctgctccttgcccatagtaaaacagcttgaaatatcccatgcaagagagtagtttcaagtgggcaactctgctctctatttaaaagcgtgcacaatcaaaagtactatgcaattttaggacaataaagaacatacagtttt

SEQ ID NO: 305917 - DNA, 2077 bp, Homo sapiens
cgccctctcggagggctccgggttataagggctggaggccgagcggacgggagctggagcccgcggagcccgcggagcccacggagcccacggaggagcccacggaggagccccagcgtccgaacgggcagaccccctcgagccgcgaaggagcccgagaagcagccacgatgtgcggaatctttgcctacatgaactacagagtcccccggacgaggaaggagatcttcgaaaccctcatcaagggcctgcagcggctggagtacagaggctacgactcggcaggtgtggcgatcgatgggaataatcacgaagtcaaagaaagacacattcagctggtcaagaaaagggggaaagtcaaggctctcgatgaagaactttacaaacaagacagcatggacttaaaagtggagtttgagacacacttcggcattgcccacacgcgctgggccacccacggggtccccagtgctgtcaacagccaccctcagcgctcagacaaaggcaacgaatttgttgtcatccacaatgggatcatcacaaattacaaagatctgaggaaatttctggaaagcaaaggctacgagtttgagtcagaaacagatacagagaccatcgccaagctgattaaatatgtgttcgacaacagagaaactgaggacattacgttttcaacgttggtcgagagagtcattcagcagttggaaggtgcattcgcgctggttttcaagagtgtccactacccaggagaagccgttgccacacggagaggcagccccctgctcatcggagtccggagcaaatacaagctctccacagaacagatccctatcttatacaggacgtgtaagtttctcaagaagtaccggaacagcacagctgctggtgtcgcaggactcggcagctgctctggcacagtcagctcccctctgaggcaaggaaaccccactctgagccagacccaacaggcgcacagctccaggtctaaaaggtttttgtgcaactgagacttggctccattttttttaagctttttatcatggacatgaatttatcatgattttgtatattgtcaaacatacacaaaagtgccattgtataacggcaactgggctttgatgtgagtgcttctttggtttgtttttgtttgcattcctctcacactgtagccatttaaatgcttttgcagtggtactgtgctattgggggatcttttacacaatttggctgacacagccaaagctaaaaattgcaaatttctcccacacatattcagaggggaaattggttccttgctgcatattatgcaaacaaaacatcccagtgggatttgcaacccattcctccatttgctaggcactctggagaatgtgaagaatatctgtaagacacggatgaagaggctggacagctccgcctgcctgcatgctgtgggcgacaaggccgtggaattcttctttgcttctgatgcaaggtaactgagccttcttctcttcgcttcctgggattacataatcaaagaatgcctgtctaaacactgccggttcttattcatccttccatgtgagctatcgtggctcagcaagtcgcagggccaaagaagagttcagccatccctgggcctgggcctggagtccttgtcctaggagcacctgcatgactgtggtaggcagccctggtggccaaaggccagatgcactggtgggcacagtgcttcgagcctgcacaaaatgaatgggttagttgccaatgttgtaaaatttggagatttcacagagaaatctgaaatctctagcttctctggaagaactagcagatcggggcatgctgtgcagccctctctcaggtggcaggtgtctggatctgctcaaaggctgccccctttagatgagacaactgtgtctagacctcagtccctcccatgcccctccctgcctttgcctggggtgagaccatttgtgaaagacagagccaagacacagggagtttttcaattgattctaaagtccatgctctcatcaatccactgaataatgattttgaaatttgagaaattctgctttatactcatttcaga

SEQ ID NO: 305918 - DNA, 303 bp, Homo sapiens
tgtgactctcactgccccgtctacccagctggcacccctgccgggctccctgtgggcctgggcaagccgcacatcgctcaccgtggaattcacatgttctggtttgtggtacttcccgtggcaccgtctgttttgctttccctcgtgatgtcaccccggatgcgctgttctgcactcagctccccgagggaccccaggacctcccgccatcaggaggggcccagggagacgcacctgggctgtggccaggctgcagcagcggctgctggaacgcgttgaccctcactgtttgtgtgttttcag

SEQ ID NO: 305919 - DNA, 199 bp, Homo sapiens
caacagagtagaccctgtctcaaaaataaaagttgatttaaaaagtgaaaataaggtccctgccacctccttctttgtgcacaggcttataccagtcagttcatctctctggtgatgtttggtttgatgatgtctgaagaccgaatttcactacaaaacaggaggcaagagatcatccgtggcttgagatctttacctg

SEQ ID NO: 305920 - DNA, 3085 bp, Homo sapiens
cgccctctcggagggctccgggttataagggctggaggccgagcggacgggagctggagcccgcggagcccgcggagcccacggagcccacggaggagcccacggaggagccccagcgtccgaacgggcagaccccctcgagccgcgaaggagcccgagaagcagccacgatgtgcggaatctttgcctacatgaactacagagtcccccggacgaggaaggagatcttcgaaaccctcatcaagggcctgcagcggctggagtacagaggctacgactcggcaggtgtggcgatcgatgggaataatcacgaagtcaaagaaagacacattcagctggtcaagaaaagggggaaagtcaaggctctcgatgaagaactttacaaacaagacagcatggacttaaaagtggagtttgagacacacttcggcattgcccacacgcgctgggccacccacggggtccccagtgctgtcaacagccaccctcagcgctcagacaaaggcaacgaatttgttgtcatccacaatgggatcatcacaaattacaaagatctgaggaaatttctggaaagcaaaggctacgagtttgagtcagaaacagatacagagaccatcgccaagctgattaaatatgtgttcgacaacagagaaactgaggacattacgttttcaacgttggtcgagagagtcattcagcagttggaaggtgcattcgcgctggttttcaagagtgtccactacccaggagaagccgttgccacacggagaggcagccccctgctcatcggagtccggagcaaatacaagctctccacagaacagatccctatcttatacaggacgtgcactctggagaatgtgaagaatatctgtaagacacggatgaagaggctggacagctccgcctgcctgcatgctgtgggcgacaaggccgtggaattcttctttgcttctgatgcaagcgctatcatagagcacaccaaccgggtcatcttcctggaggacgatgacatcgccgcagtggctgatgggaaactctccattcaccgggtcaagcgctcggccagtgatgacccatctcgagccatccagaccttgcagatggaactgcagcaaatcatgaaaggtaacttcagtgcgtttatgcagaaggagatcttcgaacagccagaatcagttttcaatactatgagaggtcgggtgaattttgaaaccaacacagtgctcctgggtggcttgaaggaccacttgaaggagattcgacgatgccgacggctcatcgtgattggctgtggaaccagctaccacgctgccgtggctacgcggcaagttttggaggaactgactgagcttcctgtgatggttgaacttgctagtgattttctggacaggaacacacctgtgttcagggatgacgtttgctttttcatcagccagtcaggcgagaccgcggacaccctcctggcgctgcgctactgtaaggaccgcggcgctctcaccgtgggcgtcaccaacaccgtgggcagctccatctctcgcgagaccgactgcggcgtccacatcaacgcagggccggagatcggcgtggccagcaccaaggcttataccagtcagttcatctctctggtgatgtttggtttgatgatgtctgaagaccgaatttcactacaaaacaggaggcaagagatcatccgtggcttgagatctttacctgagctgatcaaggaagtgctgtctctggaggagaagatccacgacttggccctggagctctacacgcagagatcgctgctggtgatggggcggggctacaactatgccacctgcctggaaggagccctgaaaattaaagagataacctacatgcactcagaaggcatcctggctggggagctgaagcacgggcccctggcactgattgacaagcagatgcccgtcatcatggtcattatgaaggatccttgcttcgccaaatgccagaacgccctgcagcaagtcacggcccgccagggtcgccccattatactgtgctccaaggacgatactgaaagttccaagtttgcgtataagacaattgagctgccccacactgtggactgcctccagggcatcctgagcgtgattccgctgcagctgctgtccttccacctggctgttctccgaggatatgacgttgacttccccagaaatctggccaagtctgtaactgtggaatgaggctgagaccgtgacaagaccatcaccacctttcatctgattccagacctgtcccaacagcagggatgctacatgggaagagaagtggacatcccacatgttctgcgtgctcctgtagagcttgacagcttccacgtgccttctacccaagtgcttttgcttacagcagatactgtttctctgtgtcctgaagtcgccagaggagaagggaatcattgtttacacatggggatcagagcagacttctccactactgtgcaatagagatacagctctcttcagagtaactgtgaaccttttataaccaacactagagttagttttaaaagacaagatatttataatgacgactgtatagcttttaagttatttttctagtatgtggctttctgtagccgtggtaacggccaaactgttcatcctagctacccatgctctgtgtccaggcttgctcctggcaggtggcattcatctcagatgtgagcacaaggcattggccctctggactcctttctccttttctttcctctctaggctgctcctgaatcctgttctctgacatccgtggagcccctcctgcatccacctatgcctcctataagtccagttgaaatctcagcctccttcaacattttcttctcgtgtgtggcccacatccctccacttctccaacttctgtttaatctgatcacggctctttttaagccctggcagcattttggtccctgctccttgcccatagtaaaacagcttgaaatatcccatgcaagagagtagtttcaagtgggcaactctgctctctatttaaaagcgtgcacaatcaaaagtactatgcaattttaggacaataaagaacatacagtttt

SEQ ID NO: 305921 - DNA, 2671 bp, Homo sapiens
ggtttgcagagagttctcaagccttgaaatcatctctcttcacatctgacatgaacctccttctcaatagcatttctctcttaacttttctttcagaatttgttgtcatccacaatgggatcatcacaaattacaaagatctgaggaaatttctggaaagcaaaggctacgagtttgagtcagaaacagatacagagaccatcgccaagctgattaaatatgtgttcgacaacagagaaactgaggacattacgttttcaacgttggtcgagagagtcattcagcagttggaaggtgcattcgcgctggttttcaagagtgtccactacccaggagaagccgttgccacacggagaggcagccccctgctcatcggagtccggagcaaatacaagctctccacagaacagatccctatcttatacaggacgtgcactctggagaatgtgaagaatatctgtaagacacggatgaagaggctggacagctccgcctgcctgcatgctgtgggcgacaaggccgtggaattcttctttgcttctgatgcaagcgctatcatagagcacaccaaccgggtcatcttcctggaggacgatgacatcgccgcagtggctgatgggaaactctccattcaccgggtcaagcgctcggccagtgatgacccatctcgagccatccagaccttgcagatggaactgcagcaaatcatgaaaggtaacttcagtgcgtttatgcagaaggagatcttcgaacagccagaatcagttttcaatactatgagaggtcgggtgaattttgaaaccaacacagtgctcctgggtggcttgaaggaccacttgaaggagattcgacgatgccgacggctcatcgtgattggctgtggaaccagctaccacgctgccgtggctacgcggcaagttttggaggaactgactgagcttcctgtgatggttgaacttgctagtgattttctggacaggaacacacctgtgttcagggatgacgtttgctttttcatcagccagtcaggcgagaccgcggacaccctcctggcgctgcgctactgtaaggaccgcggcgctctcaccgtgggcgtcaccaacaccgtgggcagctccatctctcgcgagaccgactgcggcgtccacatcaacgcagggccggagatcggcgtggccagcaccaaggcttataccagtcagttcatctctctggtgatgtttggtttgatgatgtctgaagaccgaatttcactacaaaacaggaggcaagagatcatccgtggcttgagatctttacctgagctgatcaaggaagtgctgtctctggaggagaagatccacgacttggccctggagctctacacgcagagatcgctgctggtgatggggcggggctacaactatgccacctgcctggaaggagccctgaaaattaaagagataacctacatgcactcagaaggcatcctggctggggagctgaagcacgggcccctggcactgattgacaagcagatgcccgtcatcatggtcattatgaaggatccttgcttcgccaaatgccagaacgccctgcagcaagtcacggcccgccagggtcgccccattatactgtgctccaaggacgatactgaaagttccaagtttgcgtataagacaattgagctgccccacactgtggactgcctccagggcatcctgagcgtgattccgctgcagctgctgtccttccacctggctgttctccgaggatatgacgttgacttccccagaaatctggccaagtctgtaactgtggaatgaggctgagaccgtgacaagaccatcaccacctttcatctgattccagacctgtcccaacagcagggatgctacatgggaagagaagtggacatcccacatgttctgcgtgctcctgtagagcttgacagcttccacgtgccttctacccaagtgcttttgcttacagcagatactgtttctctgtgtcctgaagtcgccagaggagaagggaatcattgtttacacatggggatcagagcagacttctccactactgtgcaatagagatacagctctcttcagagtaactgtgaaccttttataaccaacactagagttagttttaaaagacaagatatttataatgacgactgtatagcttttaagttatttttctagtatgtggctttctgtagccgtggtaacggccaaactgttcatcctagctacccatgctctgtgtccaggcttgctcctggcaggtggcattcatctcagatgtgagcacaaggcattggccctctggactcctttctccttttctttcctctctaggctgctcctgaatcctgttctctgacatccgtggagcccctcctgcatccacctatgcctcctataagtccagttgaaatctcagcctccttcaacattttcttctcgtgtgtggcccacatccctccacttctccaacttctgtttaatctgatcacggctctttttaagccctggcagcattttggtccctgctccttgcccatagtaaaacagcttgaaatatcccatgcaagagagtagtttcaagtgggcaactctgctctctatttaaaagcgtgcacaatcaaaagtactatgcaattttaggacaataaagaacatacagtttt

SEQ ID NO: 305922 - DNA, 2885 bp, Homo sapiens
cgactcccagttttcccaattaattgtcaattgcatctccccccacctctagtgaagagaggcagccccctgctcatcggagtccggagcaaatacaagctctccacagaacagatccctatcttatacaggacgtgtaagtttctcaagaagtaccggaacagcacagctgctggtgtcgcaggactcggcagctgctctggcacagtcagctcccctctgaggcaaggaaaccccactctgagccagacccaacaggcgcacagctccaggtctaaaaggtttttgtgcaactgagacttggctccattttttttaagctttttatcatggacatgaatttatcatgattttgtatattgtcaaacatacacaaaagtgccattgtataacggcaactgggctttgatgtgagtgcttctttggtttgtttttgtttgcattcctctcacactgtagccatttaaatgcttttgcagtggtactgtgctattgggggatcttttacacaatttggctgacacagccaaagctaaaaattgcaaatttctcccacacatattcagaggggaaattggttccttgctgcatattatgcaaacaaaacatcccagtgggatttgcaacccattcctccatttgctaggcactctggagaatgtgaagaatatctgtaagacacggatgaagaggctggacagctccgcctgcctgcatgctgtgggcgacaaggccgtggaattcttctttgcttctgatgcaagcgctatcatagagcacaccaaccgggtcatcttcctggaggacgatgacatcgccgcagtggctgatgggaaactctccattcaccgggtcaagcgctcggccagtgatgacccatctcgagccatccagaccttgcagatggaactgcagcaaatcatgaaaggtaacttcagtgcgtttatgcagaaggagatcttcgaacagccagaatcagttttcaatactatgagaggtcgggtgaattttgaaaccaacacagtgctcctgggtggcttgaaggaccacttgaaggagattcgacgatgccgacggctcatcgtgattggctgtggaaccagctaccacgctgccgtggctacgcggcaagttttggaggaactgactgagcttcctgtgatggttgaacttgctagtgattttctggacaggaacacacctgtgttcagggatgacgtttgctttttcatcagccagtcaggcgagaccgcggacaccctcctggcgctgcgctactgtaaggaccgcggcgctctcaccgtgggcgtcaccaacaccgtgggcagctccatctctcgcgagaccgactgcggcgtccacatcaacgcagggccggagatcggcgtggccagcaccaaggcttataccagtcagttcatctctctggtgatgtttggtttgatgatgtctgaagaccgaatttcactacaaaacaggaggcaagagatcatccgtggcttgagatctttacctgagctgatcaaggaagtgctgtctctggaggagaagatccacgacttggccctggagctctacacgcagagatcgctgctggtgatggggcggggctacaactatgccacctgcctggaaggagccctgaaaattaaagagataacctacatgcactcagaaggcatcctggctggggagctgaagcacgggcccctggcactgattgacaagcagatgcccgtcatcatggtcattatgaaggatccttgcttcgccaaatgccagaacgccctgcagcaagtcacggcccgccagggtcgccccattatactgtgctccaaggacgatactgaaagttccaagtttgcgtataagacaattgagctgccccacactgtggactgcctccagggcatcctgagcgtgattccgctgcagctgctgtccttccacctggctgttctccgaggatatgacgttgacttccccagaaatctggccaagtctgtaactgtggaatgaggctgagaccgtgacaagaccatcaccacctttcatctgattccagacctgtcccaacagcagggatgctacatgggaagagaagtggacatcccacatgttctgcgtgctcctgtagagcttgacagcttccacgtgccttctacccaagtgcttttgcttacagcagatactgtttctctgtgtcctgaagtcgccagaggagaagggaatcattgtttacacatggggatcagagcagacttctccactactgtgcaatagagatacagctctcttcagagtaactgtgaaccttttataaccaacactagagttagttttaaaagacaagatatttataatgacgactgtatagcttttaagttatttttctagtatgtggctttctgtagccgtggtaacggccaaactgttcatcctagctacccatgctctgtgtccaggcttgctcctggcaggtggcattcatctcagatgtgagcacaaggcattggccctctggactcctttctccttttctttcctctctaggctgctcctgaatcctgttctctgacatccgtggagcccctcctgcatccacctatgcctcctataagtccagttgaaatctcagcctccttcaacattttcttctcgtgtgtggcccacatccctccacttctccaacttctgtttaatctgatcacggctctttttaagccctggcagcattttggtccctgctccttgcccatagtaaaacagcttgaaatatcccatgcaagagagtagtttcaagtgggcaactctgctctctatttaaaagcgtgcacaatcaaaagtactatgcaattttaggacaataaagaacatacagtttt

SEQ ID NO: 305923 - DNA, 1567 bp, Homo sapiens
cgccctctcggagggctccgggttataagggctggaggccgagcggacgggagctggagcccgcggagcccgcggagcccacggagcccacggaggagcccacggaggagccccagcgtccgaacgggcagaccccctcgagccgcgaaggagcccgagaagcagccacgatgtgcggaatctttgcctacatgaactacagagtcccccggacgaggaaggagatcttcgaaaccctcatcaagggcctgcagcggctggagtacagaggctacgactcggcaggtgtggcgatcgatgggaataatcacgaagtcaaagaaagacacattcagctggtcaagaaaagggggaaagtcaaggctctcgatgaagaactttacaaacaagacagcatggacttaaaagtggagtttgagacacacttcggcattgcccacacgcgctgggccacccacggggtccccagtgctgtcaacagccaccctcagcgctcagacaaaggcaacgaatttgttgtcatccacaatgggatcatcacaaattacaaagatctgaggaaatttctggaaagcaaaggctacgagtttgagtcagaaacagatacagagaccatcgccaagctgattaaatatgtgttcgacaacagagaaactgaggacattacgttttcaacgttggtcgagagagtcattcagcagttggaaggtgcattcgcgctggttttcaagagtgtccactacccaggagaagccgttgccacacggagaggcagccccctgctcatcggagtccggagcaaatacaagctctccacagaacagatccctatcttatacaggacgtgcactctggagaatgtgaagaatatctgtaagacacggatgaagaggctggacagctccgcctgcctgcatgctgtgggcgacaaggccgtggaattcttctttgcttctgatgcaaggtaactgagccttcttctcttcgcttcctgggattacataatcaaagaatgcctgtctaaacactgccggttcttattcatccttccatgtgagctatcgtggctcagcaagtcgcagggccaaagaagagttcagccatccctgggcctgggcctggagtccttgtcctaggagcacctgcatgactgtggtaggcagccctggtggccaaaggccagatgcactggtgggcacagtgcttcgagcctgcacaaaatgaatgggttagttgccaatgttgtaaaatttggagatttcacagagaaatctgaaatctctagcttctctggaagaactagcagatcggggcatgctgtgcagccctctctcaggtggcaggtgtctggatctgctcaaaggctgccccctttagatgagacaactgtgtctagacctcagtccctcccatgcccctccctgcctttgcctggggtgagaccatttgtgaaagacagagccaagacacagggagtttttcaattgattctaaagtccatgctctcatcaatccactgaataatgattttgaaatttgagaaattctgctttatactcatttcaga

SEQ ID NO: 305924 - DNA, 1201 bp, Homo sapiens
cgccctctcggagggctccgggttataagggctggaggccgagcggacgggagctggagcccgcggagcccgcggagcccacggagcccacggaggagcccacggaggagccccagcgtccgaacgggcagaccccctcgagccgcgaaggagcccgagaagcagccacgatgtgcggaatctttgcctacatgaactacagagtcccccggacgaggaaggagatcttcgaaaccctcatcaagggcctgcagcggctggagtacagaggctacgactcggcaggtgtggcgatcgatgggaataatcacgaagtcaaagaaagacacattcagctggtcaagaaaagggggaaagtcaaggctctcgatgaagaactttacaaacaagacagcatggacttaaaagtggagtttgagacacacttcggcattgcccacacgcgctgggccacccacggggtccccagtgctgtcaacagccaccctcagcgctcagacaaaggcaacgaatttgttgtcatccacaatgggatcatcacaaattacaaagatctgaggaaatttctggaaagcaaaggctacgagtttgagtcagaaacagatacagagaccatcgccaagctgattaaatatgtgttcgacaacagagaaactgaggacattacgttttcaacgttggtcgagagagtcattcagcagttggaaggtgcattcgcgctggttttcaagagtgtccactacccaggagaagccgttgccacacggagaggcagccccctgctcatcggagtccggagcaaatacaagctctccacagaacagatccctatcttatacaggacgtgcactctggagaatgtgaagaatatctgtaagacacggatgaagaggctggacagctccgcctgcctgcatccacctatgcctcctataagtccagttgaaatctcagcctccttcaacattttcttctcgtgtgtggcccacatccctccacttctccaacttctgtttaatctgatcacggctctttttaagccctggcagcattttggtccctgctccttgcccatagtaaaacagcttgaaatatcccatgcaagagagtagtttcaagtgggcaactctgctctctatttaaaagcgtgcacaatcaaaagtactatgcaattttaggacaataaagaacatacagtttt

SEQ ID NO: 305925 - DNA, 277 bp, Homo sapiens
agctagcgtgagaaatgacacggagcccttttatcttcgaggtggcctgtgggtgaccgaagtcccctcgccacctggacagtgaggttccgtgtcacaaactgtccctagaagcccagctgccccatgtccctgtcgtgcctgtgactgactttagtctccatgcttgcttgttggcttcagacgcggcaagttttggaggaactgactgagcttcctgtgatggttgaacttgctagtgattttctggacaggaacacacctgtgttcagggatg

SEQ ID NO: 305926 - DNA, 5573 bp, Homo sapiens
cggctcggccgcggggcgcgcaggcggctgctgggcggcctcggtgcgcgcctcccgccttcccagagacgtggcgcgaggcccgggccctgagcacctatcgcggggatccccggcgccaggagggggtgcagccggtgggcagcgccgcgcagggaggggccgcagcatcctcgccccccagcgcgcccgggcccgagaggaggaggccggggctctccgggcctcccgccgcttagcctgatgctggaaggacgaaggtgagtgaagatggcagagaggacgtgaccagcactcacccttgtccacctgcccagtggcaccgccatgcagaagcccagcggcctgaagccccccggccgtggggggaagcactccagccccatgggccggacatctactgggtcagcttcatcctcggcggcggtggccgctagctccaaggaaggctccccactgcacaaacagtcatctggaccctcctcctccccggccgcagctgctgcccccgagaagccgggccccaaggcggcggaagtgggggatgacttcctgggggactttgtggtgggcgagcgggtgtgggtgaacggcgtgaagccaggcgtggtgcagtatctgggagagacgcagttcgcaccgggccagtgggctggcgtggtgctggacgacccggtgggcaagaatgatggcgcggtgggcggcgtgcgctacttcgagtgcccggccctccagggtatcttcacgcggccctccaagctgacccggcagcccacggccgagggctcggggagtgatgcccactccgtggagtcgctgactgcccagaacctgtcattgcattcgggcacggccacgcccccgctgaccagccgcgtcatccccctgcgggagagcgtcctcaacagctccgtgaagactggcaacgagtcgggatccaacctctcagacagcggctctgtgaagcggggcgaaaaggacctgcgcctgggggaccgcgtgctggttggcgggacgaagactggcgtggtgcggtacgtgggggagacagactttgccaagggcgagtggtgtggcgtggagctggacgagccccttgggaagaatgatggggcggtggcgggcaccaggtacttccagtgcccacccaagtttggtctcttcgcgcccatccacaaagtgatccgtatcggcttcccatctaccagcccagccaaggccaagaagaccaagcgtatggccatgggtgtgtcagcactgacccacagtcccagcagttcctccatcagctccgtcagctctgtggcctcctccgtggggggtcggcccagccgcagtggcctgctcacggagacctcttcacgctacgcccgcaagatctcgggcaccacggccttgcaggaggcactgaaggagaagcagcagcacattgagcagctgctggctgaacgagacctggaacgggctgaggtggccaaggccacaagccacatctgcgaggtggagaaggagattgccctgctcaaggcacagcatgagcagtatgttgcagaagccgaggagaagctgcagcgagcccggctgctcgtggagagcgtgcggaaagagaaggtggacctgtccaaccagctggaggaggagaggaggaaggtggaggatctgcagttccgcgtggaggaggagtccatcaccaagggagacctggagacccagacgcagctggagcacgcgcgcattggggagctggaacagagcctgctactggagaaggcgcaggccgagcggctgctccgagaattagcggacaacaggctgaccacagtggccgagaagtcgcgcgtgctgcagctggaggaggagctcaccctgcgccgaggtgaaatcgaggagctccagcagtgcctgttgcactcgggtcccccacctccggaccacccagacgccgccgagatcctgcggctacgggagcggctgctctcggccagcaaggaacaccagagggagagtggggtgctgcgggataaatacgagaaggccctgaaggcctaccaggcggaggtggacaagctccgcgcggccaacgagaagtacgcacaggaggtggcgggcctgaaggacaaggttcagcaggccaccagcgagaacatggggctaatggacaactggaaatccaagctggactcgctggcctcggaccaccagaagtccctggaggacctcaaagccaccctgaactcgggcccaggcgcccagcagaaggagatcggcgagctgaaggcagtgatggagggcatcaagatggagcaccagctggagctgggtaacttgcaggccaagcatgacctggagaccgccatgcacgtgaaggagaaggaggccctgcgagagaagctgcaggaggcccaggaggagctggctgggctgcagcggcactggcgggcccagctggaggtgcaagccagccagcaccggctggagctgcaggaggcccaggaccagcgccgggatgccgagctgcgtgtgcacgagctggaaaaactggacgtggagtaccggggccaggcgcaggctatcgagttcctcaaggagcagatctcgctggccgagaagaagatgttggactacgagcggctgcagcgggcagaagcccagggcaaacaggaggtcgagagtttgcgggagaagctcctggtggctgagaacagactccaggcggtcgaggccctgtgctcctcccagcacacccacatgattgagtcgaatgacatttcagaggagacgatcaggacgaaggaaactgtggagggcctgcaggacaagctgaacaagagggacaaagaggtgacagccttgacctcccagaccgagatgctcagggcccaagtaagtgcgctggagagcaagtgtaagtcaggcgagaagaaggtggacgccctcctgaaggagaagcggcgcctggaggcagagctggagaccgtgtcccggaagacccatgacgcctcgggccagctagtcctcatcagccaggagctgctgcggaaggagcggagcctgaacgaactgcgggtgttgctgctggaggccaatcgtcactccccagggccggagagggacctgagccgtgaggtacacaaggctgagtggcggatcaaggagcagaaactcaaggatgacatccggggcctgcgtgaaaagctgaccgggctggacaaagagaaatccctgtcggatcagaggcgctactccctcatcgacccgtcctcggcgcccgagcttctgcggctgcagcaccagctgatgagcacggaggacgccctgcgggatgcgctggaccaggctcagcaggtggagaagctgatggaggccatgaggagctgccctgacaaggcccagaccatcggcaattccggttctgcaaacggcatccaccagcaggacaaagctcagaaacaagaggacaagcactgatcctgaggggatactgtggagcagcccagtccacaccagagccccacgcggctgcccggcagtacctcctccaggcaggagccgggactgtcactttggagacaaaacagtgtttgtaacaataacgtactcaccgccgcggacaatcccccaccccgatccctcgccagaccaggacgcttcctcaagcccagccttctacagagagtgtgaacggtacagccccggcctgacccggggaccttcagcctggacacccggcagcttctggagtttgtcagtggaggcagaggggatccggccaggcccctctgtccagaaggagctgccctgaggaccatcttagcggccctgtcctctttttccgcccattctccctcgggtctccccagaggggccggcgggggctggggagggggtaagtttatccatgcagacaccaagggggagcatccagtctttaagagccaagtgggggccccttttccgaagccacttccaggccaaggcagtcgccagggcttcttgtccccaccttctgaaccttcttcaaacagtagtacaagctcccctcagccagcctgcctgcccagcgaggcccccaggttcaaggtgttggcgggggcggagggcaggggaacgggatccttctcccgctgcccaccaacaccaacacacacacacctctaagctgctggccgaagatgtcaccaaggccaaagacacagtattatgaaggtttggaaacccctctcctcacctcccaccgtgaccttgggcaaaccctggctcggagcccagggcagaggcagctcagagtggaggctctaggcaggtttgacaaaggtcagtaatacggtttcccctggggttgaccagatgttccaaaatatctgcatccacctggagatgcagctaagtgggtccttatgtacacaccacgttcacacacacacagagggaccacgtgtgcacgcatgaccgtgtgggtggcggcgtttgctgtgaaccatgctcaggccacacagagacacatacttggtttctgggactgagacccaggcctggcaggaccgtgcctacagatactgcaaacgttcctacagcctagaggtgcgtatacacacccaagtacacgcagccaggcattcaggggtgtgtttgccacatggagcatcccttcctggtcttgccaggcacctgcacagagcgtctccagccccatctcctaacgggggctgggggtaagagaaatctaactgcgctcccccaacccctcgccctgccatcttcccctcaagcctgctaagttatcccaggcctgtgcgtggtggaaaaagccagccttggccctgcagcctccacctcgccgctgggggaccaacaggttgcttacagctttgcaccccggcatcagcacaggggtccctgccccaccctccggcagctcagggagtgttttcctgtgaggcctcccccatcagtggaccagagggagaagcccgatgccccatcccggctttcccgtaacgcacaggacacgtgtgcaattcataggaacggcccagatcgccctcatgagtgccacctggtacaggtaggtggcgctcacgttcctgcccaaatgcagcccatcggggagtcacagtcagtccccccggcccccctcccagtccctgttggctttcggtagctctcgcatgcagttctattaacagccgtctagaagcgatgctttagtggcctaacccagggtcaaatacagctctttctagcaaaatcaggcagctctgccccatcggtaggggcaccgattagtctactaacagccagaggtccatctagcagggtgccgggaggagctgagcccccggaggtgggctcctggtgacgggtgtccaagaagcggtttccttgggagcttctgcctccgtgggcctctcagcccgccccgtgtggccgcccgggtgtggctcagccatgtcccctccccaggtccttcattcacccctcccctccccacagtggaattgttgaagtgtggcgagtctgtgctcgggacaataaagcttgtgacaggtccaggaccccggcagttggcttgt

SEQ ID NO: 305927 - DNA, 4392 bp, Homo sapiens
cgtggcttgtgggttgcctgtggcttgtggtgactgtggttgtgggttgactgtgcttggcatgggtgtgtcagcactgacccacagtcccagcagttcctccatcagctccgtcagctctgtggcctcctccgtggggggtcggcccagccgcagtggcctgctcacggagacctcttcacgctacgcccgcaagatctcgggcaccacggccttgcaggaggcactgaaggagaagcagcagcacattgagcagctgctggctgaacgagacctggaacgggctgaggtggccaaggccacaagccacatctgcgaggtggagaaggagattgccctgctcaaggcacagcatgagcagtatgttgcagaagccgaggagaagctgcagcgagcccggctgctcgtggagagcgtgcggaaagagaaggtggacctgtccaaccagctggaggaggagaggaggaaggtggaggatctgcagttccgcgtggaggaggagtccatcaccaagggagacctggagacccagacgcagctggagcacgcgcgcattggggagctggaacagagcctgctactggagaaggcgcaggccgagcggctgctccgagaattagcggacaacaggctgaccacagtggccgagaagtcgcgcgtgctgcagctggaggaggagctcaccctgcgccgaggtgaaatcgaggagctccagcagtgcctgttgcactcgggtcccccacctccggaccacccagacgccgccgagatcctgcggctacgggagcggctgctctcggccagcaaggaacaccagagggagagtggggtgctgcgggataaatacgagaaggccctgaaggcctaccaggcggaggtggacaagctccgcgcggccaacgagaagtacgcacaggaggtggcgggcctgaaggacaaggttcagcaggccaccagcgagaacatggggctaatggacaactggaaatccaagctggactcgctggcctcggaccaccagaagtccctggaggacctcaaagccaccctgaactcgggcccaggcgcccagcagaaggagatcggcgagctgaaggcagtgatggagggcatcaagatggagcaccagctggagctgggtaacttgcaggccaagcatgacctggagaccgccatgcacgtgaaggagaaggaggccctgcgagagaagctgcaggaggcccaggaggagctggctgggctgcagcggcactggcgggcccagctggaggtgcaagccagccagcaccggctggagctgcaggaggcccaggaccagcgccgggatgccgagctgcgtgtgcacgagctggaaaaactggacgtggagtaccggggccaggcgcaggctatcgagttcctcaaggagcagatctcgctggccgagaagaagatgttggactacgagcggctgcagcgggcagaagcccagggcaaacaggaggtcgagagtttgcgggagaagctcctggtggctgagaacagactccaggcggtcgaggccctgtgctcctcccagcacacccacatgattgagtcgaatgacatttcagaggagacgatcaggacgaaggaaactgtggagggcctgcaggacaagctgaacaagagggacaaagaggtgacagccttgacctcccagaccgagatgctcagggcccaagtaagtgcgctggagagcaagtgtaagtcaggcgagaagaaggtggacgccctcctgaaggagaagcggcgcctggaggcagagctggagaccgtgtcccggaagacccatgacgcctcgggccagctagtcctcatcagccaggagctgctgcggaaggagcggagcctgaacgaactgcgggtgttgctgctggaggccaatcgtcactccccagggccggagagggacctgagccgtgaggtacacaaggctgagtggcggatcaaggagcagaaactcaaggatgacatccggggcctgcgtgaaaagctgaccgggctggacaaagagaaatccctgtcggatcagaggcgctactccctcatcgacccgtcctcggcgcccgagcttctgcggctgcagcaccagctgatgagcacggaggacgccctgcgggatgcgctggaccaggctcagcaggtggagaagctgatggaggccatgaggagctgccctgacaaggcccagaccatcggcaattccggttctgcaaacggcatccaccagcaggacaaagctcagaaacaagaggacaagcactgatcctgaggggatactgtggagcagcccagtccacaccagagccccacgcggctgcccggcagtacctcctccaggcaggagccgggactgtcactttggagacaaaacagtgtttgtaacaataacgtactcaccgccgcggacaatcccccaccccgatccctcgccagaccaggacgcttcctcaagcccagccttctacagagagtgtgaacggtacagccccggcctgacccggggaccttcagcctggacacccggcagcttctggagtttgtcagtggaggcagaggggatccggccaggcccctctgtccagaaggagctgccctgaggaccatcttagcggccctgtcctctttttccgcccattctccctcgggtctccccagaggggccggcgggggctggggagggggtaagtttatccatgcagacaccaagggggagcatccagtctttaagagccaagtgggggccccttttccgaagccacttccaggccaaggcagtcgccagggcttcttgtccccaccttctgaaccttcttcaaacagtagtacaagctcccctcagccagcctgcctgcccagcgaggcccccaggttcaaggtgttggcgggggcggagggcaggggaacgggatccttctcccgctgcccaccaacaccaacacacacacacctctaagctgctggccgaagatgtcaccaaggccaaagacacagtattatgaaggtttggaaacccctctcctcacctcccaccgtgaccttgggcaaaccctggctcggagcccagggcagaggcagctcagagtggaggctctaggcaggtttgacaaaggtcagtaatacggtttcccctggggttgaccagatgttccaaaatatctgcatccacctggagatgcagctaagtgggtccttatgtacacaccacgttcacacacacacagagggaccacgtgtgcacgcatgaccgtgtgggtggcggcgtttgctgtgaaccatgctcaggccacacagagacacatacttggtttctgggactgagacccaggcctggcaggaccgtgcctacagatactgcaaacgttcctacagcctagaggtgcgtatacacacccaagtacacgcagccaggcattcaggggtgtgtttgccacatggagcatcccttcctggtcttgccaggcacctgcacagagcgtctccagccccatctcctaacgggggctgggggtaagagaaatctaactgcgctcccccaacccctcgccctgccatcttcccctcaagcctgctaagttatcccaggcctgtgcgtggtggaaaaagccagccttggccctgcagcctccacctcgccgctgggggaccaacaggttgcttacagctttgcaccccggcatcagcacaggggtccctgccccaccctccggcagctcagggagtgttttcctgtgaggcctcccccatcagtggaccagagggagaagcccgatgccccatcccggctttcccgtaacgcacaggacacgtgtgcaattcataggaacggcccagatcgccctcatgagtgccacctggtacaggtaggtggcgctcacgttcctgcccaaatgcagcccatcggggagtcacagtcagtccccccggcccccctcccagtccctgttggctttcggtagctctcgcatgcagttctattaacagccgtctagaagcgatgctttagtggcctaacccagggtcaaatacagctctttctagcaaaatcaggcagctctgccccatcggtaggggcaccgattagtctactaacagccagaggtccatctagcagggtgccgggaggagctgagcccccggaggtgggctcctggtgacgggtgtccaagaagcggtttccttgggagcttctgcctccgtgggcctctcagcccgccccgtgtggccgcccgggtgtggctcagccatgtcccctccccaggtccttcattcacccctcccctccccacagtggaattgttgaagtgtggcgagtctgtgctcgggacaataaagcttgtgacaggtccaggaccccggcagttggcttgt

SEQ ID NO: 305928 - DNA, 5468 bp, Homo sapiens
cggctcggccgcggggcgcgcaggcggctgctgggcggcctcggtgcgcgcctcccgccttcccagagacgtggcgcgaggcccgggccctgagcacctatcgcggggatccccggcgccaggagggggtgcagccggtgggcagcgccgcgcagggaggggccgcagcatcctcgccccccagcgcgcccgggcccgagaggaggaggccggggctctccgggcctcccgccgcttagcctgatgctggaaggacgaaggtgagtgaagatggcagagaggacgtgaccagcactcacccttgtccacctgcccagtggcaccgccatgcagaagcccagcggcctgaagccccccggccgtggggggaagcactccagccccatgggccggacatctactgggtcagcttcatcctcggcggcggtggccgctagctccaaggaaggctccccactgcacaaacagtcatctggaccctcctcctccccggccgcagctgctgcccccgagaagccgggccccaaggcggcggaagtgggggatgacttcctgggggactttgtggtgggcgagcgggtgtgggtgaacggcgtgaagccaggcgtggtgcagtatctgggagagacgcagttcgcaccgggccagtgggctggcgtggtgctggacgacccggtgggcaagaatgatggcgcggtgggcggcgtgcgctacttcgagtgcccggccctccagggtatcttcacgcggccctccaagctgacccggcagcccacggccgagggctcggggagtgatgcccactccgtggagtcgctgactgcccagaacctgtcattgcattcgggcacggccacgcccccgctgaccagccgcgtcatccccctgcgggagagcgtcctcaacagctccgtgaagactggcaacgagtcgggatccaacctctcagacagcggctctgtgaagcggggcgaaaaggacctgcgcctgggggaccgcgtgctggttggcgggacgaagactggcgtggtgcggtacgtgggggagacagactttgccaagggcgagtggtgtggcgtggagctggacgagccccttgggaagaatgatggggcggtggcgggcaccaggtacttccagtgcccacccaagtttggtctcttcgcgcccatccacaaagtgatccgtatcggcttcccatctaccagcccagccaaggccaagaagaccaagcgtatggccatgggtgtgtcagcactgacccacagtcccagcagttcctccatcagctccgtcagctctgtggcctcctccgtggggggtcggcccagccgcagtggcctgctcacggagacctcttcacgctacgcccgcaagatctcgggcaccacggccttgcaggaggcactgaaggagaagcagcagcacattgagcagctgctggctgaacgagacctggaacgggctgaggtggccaaggccacaagccacatctgcgaggtggagaaggagattgccctgctcaaggcacagcatgagcagtatgttgcagaagccgaggagaagctgcagcgagcccggctgctcgtggagagcgtgcggaaagagaaggtggacctgtccaaccagctggaggaggagaggaggaaggtggaggatctgcagttccgcgtggaggaggagtccatcaccaagggagacctggagctgaccacagtggccgagaagtcgcgcgtgctgcagctggaggaggagctcaccctgcgccgaggtgaaatcgaggagctccagcagtgcctgttgcactcgggtcccccacctccggaccacccagacgccgccgagatcctgcggctacgggagcggctgctctcggccagcaaggaacaccagagggagagtggggtgctgcgggataaatacgagaaggccctgaaggcctaccaggcggaggtggacaagctccgcgcggccaacgagaagtacgcacaggaggtggcgggcctgaaggacaaggttcagcaggccaccagcgagaacatggggctaatggacaactggaaatccaagctggactcgctggcctcggaccaccagaagtccctggaggacctcaaagccaccctgaactcgggcccaggcgcccagcagaaggagatcggcgagctgaaggcagtgatggagggcatcaagatggagcaccagctggagctgggtaacttgcaggccaagcatgacctggagaccgccatgcacgtgaaggagaaggaggccctgcgagagaagctgcaggaggcccaggaggagctggctgggctgcagcggcactggcgggcccagctggaggtgcaagccagccagcaccggctggagctgcaggaggcccaggaccagcgccgggatgccgagctgcgtgtgcacgagctggaaaaactggacgtggagtaccggggccaggcgcaggctatcgagttcctcaaggagcagatctcgctggccgagaagaagatgttggactacgagcggctgcagcgggcagaagcccagggcaaacaggaggtcgagagtttgcgggagaagctcctggtggctgagaacagactccaggcggtcgaggccctgtgctcctcccagcacacccacatgattgagtcgaatgacatttcagaggagacgatcaggacgaaggaaactgtggagggcctgcaggacaagctgaacaagagggacaaagaggtgacagccttgacctcccagaccgagatgctcagggcccaagtaagtgcgctggagagcaagtgtaagtcaggcgagaagaaggtggacgccctcctgaaggagaagcggcgcctggaggcagagctggagaccgtgtcccggaagacccatgacgcctcgggccagctagtcctcatcagccaggagctgctgcggaaggagcggagcctgaacgaactgcgggtgttgctgctggaggccaatcgtcactccccagggccggagagggacctgagccgtgaggtacacaaggctgagtggcggatcaaggagcagaaactcaaggatgacatccggggcctgcgtgaaaagctgaccgggctggacaaagagaaatccctgtcggatcagaggcgctactccctcatcgacccgtcctcggcgcccgagcttctgcggctgcagcaccagctgatgagcacggaggacgccctgcgggatgcgctggaccaggctcagcaggtggagaagctgatggaggccatgaggagctgccctgacaaggcccagaccatcggcaattccggttctgcaaacggcatccaccagcaggacaaagctcagaaacaagaggacaagcactgatcctgaggggatactgtggagcagcccagtccacaccagagccccacgcggctgcccggcagtacctcctccaggcaggagccgggactgtcactttggagacaaaacagtgtttgtaacaataacgtactcaccgccgcggacaatcccccaccccgatccctcgccagaccaggacgcttcctcaagcccagccttctacagagagtgtgaacggtacagccccggcctgacccggggaccttcagcctggacacccggcagcttctggagtttgtcagtggaggcagaggggatccggccaggcccctctgtccagaaggagctgccctgaggaccatcttagcggccctgtcctctttttccgcccattctccctcgggtctccccagaggggccggcgggggctggggagggggtaagtttatccatgcagacaccaagggggagcatccagtctttaagagccaagtgggggccccttttccgaagccacttccaggccaaggcagtcgccagggcttcttgtccccaccttctgaaccttcttcaaacagtagtacaagctcccctcagccagcctgcctgcccagcgaggcccccaggttcaaggtgttggcgggggcggagggcaggggaacgggatccttctcccgctgcccaccaacaccaacacacacacacctctaagctgctggccgaagatgtcaccaaggccaaagacacagtattatgaaggtttggaaacccctctcctcacctcccaccgtgaccttgggcaaaccctggctcggagcccagggcagaggcagctcagagtggaggctctaggcaggtttgacaaaggtcagtaatacggtttcccctggggttgaccagatgttccaaaatatctgcatccacctggagatgcagctaagtgggtccttatgtacacaccacgttcacacacacacagagggaccacgtgtgcacgcatgaccgtgtgggtggcggcgtttgctgtgaaccatgctcaggccacacagagacacatacttggtttctgggactgagacccaggcctggcaggaccgtgcctacagatactgcaaacgttcctacagcctagaggtgcgtatacacacccaagtacacgcagccaggcattcaggggtgtgtttgccacatggagcatcccttcctggtcttgccaggcacctgcacagagcgtctccagccccatctcctaacgggggctgggggtaagagaaatctaactgcgctcccccaacccctcgccctgccatcttcccctcaagcctgctaagttatcccaggcctgtgcgtggtggaaaaagccagccttggccctgcagcctccacctcgccgctgggggaccaacaggttgcttacagctttgcaccccggcatcagcacaggggtccctgccccaccctccggcagctcagggagtgttttcctgtgaggcctcccccatcagtggaccagagggagaagcccgatgccccatcccggctttcccgtaacgcacaggacacgtgtgcaattcataggaacggcccagatcgccctcatgagtgccacctggtacaggtaggtggcgctcacgttcctgcccaaatgcagcccatcggggagtcacagtcagtccccccggcccccctcccagtccctgttggctttcggtagctctcgcatgcagttctattaacagccgtctagaagcgatgctttagtggcctaacccagggtcaaatacagctctttctagcaaaatcaggcagctctgccccatcggtaggggcaccgattagtctactaacagccagaggtccatctagcagggtgccgggaggagctgagcccccggaggtgggctcctggtgacgggtgtccaagaagcggtttccttgggagcttctgcctccgtgggcctctcagcccgccccgtgtggccgcccgggtgtggctcagccatgtcccctccccaggtccttcattcacccctcccctccccacagtggaattgttgaagtgtggcgagtctgtgctcgggacaataaagcttgtgacaggtccaggaccccggcagttggcttgt

SEQ ID NO: 305929 - DNA, 5489 bp, Homo sapiens
cggctcggccgcggggcgcgcaggcggctgctgggcggcctcggtgcgcgcctcccgccttcccagagacgtggcgcgaggcccgggccctgagcacctatcgcggggatccccggcgccaggagggggtgcagccggtgggcagcgccgcgcagggaggggccgcagcatcctcgccccccagcgcgcccgggcccgagaggaggaggccggggctctccgggcctcccgccgcttagcctgatgctggaaggacgaaggtgagtgaagatggcagagaggacgtgaccagcactcacccttgtccacctgcccagtggcaccgccatgcagaagcccagcggcctgaagccccccggccgtggggggaagcactccagccccatgggccggacatctactgggtcagcttcatcctcggcggcggtggccgctagctccaaggaaggctccccactgcacaaacagtcatctggaccctcctcctccccggccgcagctgctgcccccgagaagccgggccccaaggcggcggaagtgggggatgacttcctgggggactttgtggtgggcgagcgggtgtgggtgaacggcgtgaagccaggcgtggtgcagtatctgggagagacgcagttcgcaccgggccagtgggctggcgtggtgctggacgacccggtgggcaagaatgatggcgcggtgggcggcgtgcgctacttcgagtgcccggccctccagggtatcttcacgcggccctccaagctgacccggcagcccacggccgagggctcggggagtgatgcccactccgtggagtcgctgactgcccagaacctgtcattgcattcgggcacggccacgcccccgctgaccagccgcgtcatccccctgcgggagagcgtcctcaacagctccgtgaagactggcaacgagtcgggatccaacctctcagacagcggctctgtgaagcggggcgaaaaggacctgcgcctgggggaccgcgtgctggttggcgggacgaagactggcgtggtgcggtacgtgggggagacagactttgccaagggcgagtggtgtggcgtggagctggacgagccccttgggaagaatgatggggcggtggcgggcaccaggtacttccagtgcccacccaagtttggtctcttcgcgcccatccacaaagtgatccgtatcggcttcccatctaccagcccagccaaggccaagaagaccaagcgtatggccatgggtgtgtcagcactgacccacagtcccagcagttcctccatcagctccgtcagctctgtggcctcctccgtggggggtcggcccagccgcagtggcctgctcacggagacctcttcacgctacgcccgcaagatctcgggcaccacggccttgcaggaggcactgaaggagaagcagcagcacattgagcagctgctggctgaacgagacctggaacgggctgaggtggccaaggccacaagccacatctgcgaggtggagaaggagattgccctgctcaaggcacagcatgagcagtatgttgcagaagccgaggagaagctgcagcgagcccggctgctcgtggagagcgtgcggaaagagaaggtggacctgtccaaccagctggaggaggagaggaggaaggtggaggatctgcagttccgcgtggaggaggagtccatcaccaagggagacctggagacccagacgcagctggagcacgcgcgcattggggagctggaacagagcctgctactggagaaggcgcaggccgagcggctgctccgagaattagcggacaacaggctgaccacagtggccgagaagtcgcgcgtgctgcagctggaggaggagctcaccctgcgccgaggtgaaatcgaggagctccagcagtgcctgttgcactcgggtcccccacctccggaccacccagacgccgccgagatcctgcggctacgggagcggctgctctcggccagcaaggaacaccagagggagagtggggtgctgcgggataaatacgagaaggccctgaaggcctaccaggcggaggtggacaagctccgcgcggccaacgagaagtacgcacaggaggtggcgggcctgaaggacaaggttcagcaggccaccagcgagaacatggggctaatggacaactggaaatccaagctggactcgctggcctcggaccaccagaagtccctggaggacctcaaagccaccctgaactcgggcccaggcgcccagcagaaggagatcggcgagctgaaggcagtgatggagggcatcaagatggagcaccagctggagctgggtaacttgcaggccaagcatgacctggagaccgccatgcacgtgaaggagaaggaggccctgcgagagaagctgcaggaggcccaggaggagctggctgggctgcagcggcactggcgggcccagctggaggtgcaagccagccagcaccggctggagctgcaggaggcccaggaccagcgccgggatgccgagctgcgtgtgcacgagctggaaaaactggacgtggagtaccggggccaggcgcaggctatcgagttcctcaaggagcagatctcgctggccgagaagaagatgttggactacgagcggctgcagcgggcagaagcccagggcaaacaggagatgattgagtcgaatgacatttcagaggagacgatcaggacgaaggaaactgtggagggcctgcaggacaagctgaacaagagggacaaagaggtgacagccttgacctcccagaccgagatgctcagggcccaagtaagtgcgctggagagcaagtgtaagtcaggcgagaagaaggtggacgccctcctgaaggagaagcggcgcctggaggcagagctggagaccgtgtcccggaagacccatgacgcctcgggccagctagtcctcatcagccaggagctgctgcggaaggagcggagcctgaacgaactgcgggtgttgctgctggaggccaatcgtcactccccagggccggagagggacctgagccgtgaggtacacaaggctgagtggcggatcaaggagcagaaactcaaggatgacatccggggcctgcgtgaaaagctgaccgggctggacaaagagaaatccctgtcggatcagaggcgctactccctcatcgacccgtcctcggcgcccgagcttctgcggctgcagcaccagctgatgagcacggaggacgccctgcgggatgcgctggaccaggctcagcaggtggagaagctgatggaggccatgaggagctgccctgacaaggcccagaccatcggcaattccggttctgcaaacggcatccaccagcaggacaaagctcagaaacaagaggacaagcactgatcctgaggggatactgtggagcagcccagtccacaccagagccccacgcggctgcccggcagtacctcctccaggcaggagccgggactgtcactttggagacaaaacagtgtttgtaacaataacgtactcaccgccgcggacaatcccccaccccgatccctcgccagaccaggacgcttcctcaagcccagccttctacagagagtgtgaacggtacagccccggcctgacccggggaccttcagcctggacacccggcagcttctggagtttgtcagtggaggcagaggggatccggccaggcccctctgtccagaaggagctgccctgaggaccatcttagcggccctgtcctctttttccgcccattctccctcgggtctccccagaggggccggcgggggctggggagggggtaagtttatccatgcagacaccaagggggagcatccagtctttaagagccaagtgggggccccttttccgaagccacttccaggccaaggcagtcgccagggcttcttgtccccaccttctgaaccttcttcaaacagtagtacaagctcccctcagccagcctgcctgcccagcgaggcccccaggttcaaggtgttggcgggggcggagggcaggggaacgggatccttctcccgctgcccaccaacaccaacacacacacacctctaagctgctggccgaagatgtcaccaaggccaaagacacagtattatgaaggtttggaaacccctctcctcacctcccaccgtgaccttgggcaaaccctggctcggagcccagggcagaggcagctcagagtggaggctctaggcaggtttgacaaaggtcagtaatacggtttcccctggggttgaccagatgttccaaaatatctgcatccacctggagatgcagctaagtgggtccttatgtacacaccacgttcacacacacacagagggaccacgtgtgcacgcatgaccgtgtgggtggcggcgtttgctgtgaaccatgctcaggccacacagagacacatacttggtttctgggactgagacccaggcctggcaggaccgtgcctacagatactgcaaacgttcctacagcctagaggtgcgtatacacacccaagtacacgcagccaggcattcaggggtgtgtttgccacatggagcatcccttcctggtcttgccaggcacctgcacagagcgtctccagccccatctcctaacgggggctgggggtaagagaaatctaactgcgctcccccaacccctcgccctgccatcttcccctcaagcctgctaagttatcccaggcctgtgcgtggtggaaaaagccagccttggccctgcagcctccacctcgccgctgggggaccaacaggttgcttacagctttgcaccccggcatcagcacaggggtccctgccccaccctccggcagctcagggagtgttttcctgtgaggcctcccccatcagtggaccagagggagaagcccgatgccccatcccggctttcccgtaacgcacaggacacgtgtgcaattcataggaacggcccagatcgccctcatgagtgccacctggtacaggtaggtggcgctcacgttcctgcccaaatgcagcccatcggggagtcacagtcagtccccccggcccccctcccagtccctgttggctttcggtagctctcgcatgcagttctattaacagccgtctagaagcgatgctttagtggcctaacccagggtcaaatacagctctttctagcaaaatcaggcagctctgccccatcggtaggggcaccgattagtctactaacagccagaggtccatctagcagggtgccgggaggagctgagcccccggaggtgggctcctggtgacgggtgtccaagaagcggtttccttgggagcttctgcctccgtgggcctctcagcccgccccgtgtggccgcccgggtgtggctcagccatgtcccctccccaggtccttcattcacccctcccctccccacagtggaattgttgaagtgtggcgagtctgtgctcgggacaataaagcttgtgacaggtccaggaccccggcagttggcttgt

SEQ ID NO: 305930 - DNA, 1608 bp, Homo sapiens
cggctcggccgcggggcgcgcaggcggctgctgggcggcctcggtgcgcgcctcccgccttcccagagacgtggcgcgaggcccgggccctgagcacctatcgcggggatccccggcgccaggagggggtgcagccggtgggcagcgccgcgcagggaggggccgcagcatcctcgccccccagcgcgcccgggcccgagaggaggaggccggggctctccgggcctcccgccgcttagcctgatgctggaaggacgaaggtgagtgaagatggcagagaggacgtgaccagcactcacccttgtccacctgcccagtggcaccgccatgcagaagcccagcggcctgaagccccccggccgtggggggaagcactccagccccatgggccggacatctactgggtcagcttcatcctcggcggcggtggccgctagctccaaggaaggctccccactgcacaaacagtcatctggaccctcctcctccccggccgcagctgctgcccccgagaagccgggccccaaggcggcggaagtgggggatgacttcctgggggactttgtggtgggcgagcgggtgtgggtgaacggcgtgaagccaggcgtggtgcagtatctgggagagacgcagttcgcaccgggccagtgggctggcgtggtgctggacgacccggtgggcaagaatgatggcgcggtgggcggcgtgcgctacttcgagtgcccggccctccagggtatcttcacgcggccctccaagctgacccggcagcccacggccgagggctcggggagtgatgcccactccgtggagtcgctgactgcccagaacctgtcattgcattcgggcacggccacgcccccgctgaccagccgcgtcatccccctgcgggagagcgtcctcaacagctccgtgaagactggcaacgagtcgggatccaacctctcagacagcggctctgtgaagcggggcgaaaaggacctgcgcctgggggaccgcgtgctggttggcgggacgaagactggcgtggtgcggtacgtgggggagacagactttgccaagggcgagtggtgtggcgtggagctggacgagccccttgggaagaatgatggggcggtggcgggcaccaggtacttccagtgcccacccaagtttggtctcttcgcgcccatccacaaagtgatccgtatcggcttcccatctaccagcccagccaaggccaagaagaccaagcgtatggccatgggtgtgtcagcactgacccacagtcccagcagttcctccatcagctccgtcagctctgtggcctcctccgtggggggtcggcccagccgcagtggcctgctcacggagacctcttcacgctacgcccgcaagatctcgggcaccacggccttgcaggaggcactgaaggagaagcagcagcacattgagcagctgctggctgaacgagacctggaacgggctgaggtggccaaggccacaagccacatctgcgaggtggagaaggagattgccctccccacagtggaattgttgaagtgtggcgagtctgtgctcgggacaataaagcttgtgacaggtccaggaccccggcagttggcttgt

SEQ ID NO: 305931 - DNA, 2931 bp, Homo sapiens
  misc_feature (9)..(9): n is a, c, g, or t
  misc_feature (11)..(12): n is a, c, g, or t
  misc_feature (14)..(14): n is a, c, g, or t
caggctagntnngngccggggttaatcggccgaggggcggcgggagtgcgagctgggcccgtgtttcggccgccgccatggccgcggtggacctggagaagctgcgggcgtcgggcgcgggcaaggccatcggcgtcctgaccagcggcggcgacgcgcaaggcatgaacgctgctgtccgggctgtgacgcgcatgggcatttatgtgggtgccaaagtcttcctcatctacgagggctatgagggcctcgtggagggaggtgagaacatcaagcaggccaactggctgagcgtctccaacatcatccagctgggcggcactatcattggcagcgctcgctgcaaggcctttaccaccagggaggggcgccgggcagcggcctacaacctggtccagcacggcatcaccaacctgtgcgtcatcggcggggatggcagccttacaggtgccaacatcttccgcagcgagtggggcagcctgctggaggagctggtggcggaaggtaagatctcagagactacagcccggacctactcgcacctgaacatcgcgggcctagtgggctccatcgataacgacttctgcggcaccgacatgaccatcggcacggactcggccctccaccgcatcatggaggtcatcgatgccatcaccaccactgcccagagccaccagaggaccttcgtgctggaagtgatgggccggcactgcgggtacctggcgctggtatctgcactggcctcaggggccgactggctgttcatccccgaggctccacccgaggacggctgggagaacttcatgtgtgagaggctgggtgagactcggagccgtgggtcccgactgaacatcatcatcatcgctgagggtgccattgaccgcaacgggaagcccatctcgtccagctacgtgaaggacctggtggttcagaggctgggcttcgacacccgtgtaactgtgctgggccacgtgcagcggggagggacgccctctgccttcgaccggatcctgagcagcaagatgggcatggaggcggtgatggcgctgctggaagccacgcctgacacgccggcctgcgtggtcaccctctcggggaaccagtcagtgcggctgcccctcatggagtgcgtgcagatgaccaaggaagtgcagaaagccatggatgacaagaggtttgacgaggccacccagctccgtggtgggagcttcgagaacaactggaacatttacaagctcctcgcccaccagaagccccccaaggagaagtctaacttctccctggccatcctgaatgtgggggccccggcggctggcatgaatgcggccgtgcgctcggcggtgcggaccggcatctcccatggacacacagtatacgtggtgcacgatggcttcgaaggcctagccaagggtcaggtgcaagaagtaggctggcacgacgtggccggctggttggggcgtggtggctccatgctggggaccaagaggaccctgcccaagggccagctggagtccattgtggagaacatccgcatctatggtattcacgccctgctggtggtcggtgggtttgaggcctatgaaggggtgctgcagctggtggaggctcgcgggcgctacgaggagctctgcatcgtcatgtgtgtcatcccagccaccatcagcaacaacgtccctggcaccgacttcagcctgggctccgacactgctgtaaatgccgccatggagagctgtgaccgcatcaaacagtctgcctcggggaccaagcgccgtgtgttcatcgtggagaccatggggggttactgtggctacctggccaccgtgactggcattgctgtgggggccgacgccgcctacgtcttcgaggaccctttcaacatccacgacttaaaggtcaacgtggagcacatgacggagaagatgaagacagacattcagaggggcctggtgctgcggaacgagaagtgccatgactactacaccacggagttcctgtacaacctgtactcatcagagggcaagggcgtcttcgactgcaggaccaatgtcctgggccacctgcagcagggtggcgctccaaccccctttgaccggaactatgggaccaagctgggggtgaaggccatgctgtggttgtcggagaagctgcgcgaggtttaccgcaagggacgggtgttcgccaatgccccagactcggcctgcgtgatcggcctgaagaagaaggcggtggccttcagccccgtcactgagctcaagaaagacactgatttcgagcaccgcatgccacgggagcagtggtggctgagcctgcggctcatgctgaagatgctggcacaataccgcatcagtatggccgcctacgtgtcaggggagctggagcacgtgacccgccgcaccctgagcatggacaagggcttctgaggccagccatgcccacgcccctccccagcccccacccatgccagcgcagcgccagggctcagatggggcctgggctgttgtgtctggagcctgcaggcaggtgggggctgcgtccctgctcagcccatcccctgcctctatccctggccacctgccaggcctccctccggctggtgtcttgagaccagcctgccaggccctccagcaggaggacagagtgccctggggcatccaccttcctgcccaggggacgtggcgctgtcggtgtttggaggctgctgccccctggctttggcgccccatgggccctcagcgtctccccatgctgggctcactacatgggccagcccttgctctacctggccggtaggctgctggcgcctaggttgtgttgagagggggatgcccctggccctgcctcactgtgacctgctcctgcccacgtgcagcacctgtcaccttttctagaaataaaatcaccctgactgtggggtgcatcggtctccggaga

SEQ ID NO: 305932 - DNA, 331 bp, Homo sapiens
ggtggttcacatacacagcacagaggcacgggcaccatgggagagggcagcactcctgccttctgaggggacgtggcgctgtcggtgtttggaggctgctgccccctggctttggcgccccatgggccctcagcgtctccccatgctgggctcactacatgggccagcccttgctctacctggccggtaggctgctggcgcctaggttgtgttgagagggggatgcccctggccctgcctcactgtgacctgctcctgcccacgtgcagcacctgtcaccttttctagaaataaaatcaccctgactgtggggtgcatcggtctccggaga

SEQ ID NO: 305933 - DNA, 288 bp, Homo sapiens
  misc_feature (257)..(257): n is a, c, g, or t
cgagctcggtaccccccgactagcccgccagggctcagatggggcctgggctgttgtgtctggagcctgcaggcaggtgggggctgcgtccctgctcagcccatcccctgcctctatccctggccacctgccaggcctccctccggctggtgtcttgagaccagcctgccaggccctccagcaggaggacagagtgccctggggcatccaccttcctgcccaggggacgtggcgctgtcggtcgggctgtcgggctntcgggggtaccagctcaattctatcatgtac

SEQ ID NO: 305934 - DNA, 900 bp, Homo sapiens
ctgtgtgtgggctcgggagggttctttactttctccggaaagcttcacaaggttccgattaaccccagtgctggggaggggcaggggaggaaggggactcggaagctggaggacgagaaagaagggaggcggaggaggcagaggtgtaggtgctggacggcatcgctgaacgtggtgtcctggcactgggcaagctgtcactaaataatgaataaatgacagcccttcccccttgccctccatggagtggatctggggtcagagtgggttggaggagactcctgaccctccttagagtccagtttccctggtaggcatcctgagatgacaccaggctgactgcctggcccagccccaggggattgagcaggtgggtcctggcgtccagcacggggcacatgacaggtcagcagggagcagggctgggcggccgccggcagagcctgtccccggcccaccctggcctcggtgctgcccttgacctgccccgtccctactgctgcaggcctatgaaggggtgctgcagctggtggaggctcgcgggcgctacgaggagctctgcatcgtcatgtgtgtcatcccagccaccatcagcaacaacgtccctggcaccgacttcagcctgggctccgacactgctgtaaatgccgccatggaggtacggggctcctggacaccggcctgccatgcccaggcccttgtggggtggggctgagctacggaggctgctggaggggatagtgtgtggtgagcacctgggagggctgccagggttggggtttgtggggcacaggcccgggtgaaggggctcagctccctgccatagccacttccaggtccaggggggccctgcgttgttcctcgctactgtgatgagctcagatggggagactgaggcgg

SEQ ID NO: 305935 - DNA, 2903 bp, Homo sapiens
  misc_feature (9)..(9): n is a, c, g, or t
  misc_feature (11)..(12): n is a, c, g, or t
  misc_feature (14)..(14): n is a, c, g, or t
caggctagntnngngccggggttaatcggccgagggttcggccgccgccatggccgcggtggacctggagaagctgcgggcgtcgggcgcgggcaaggccatcggcgtcctgaccagcggcggcgacgcgcaaggcatgaacgctgctgtccgggctgtgacgcgcatgggcatttatgtgggtgccaaagtcttcctcatctacgagggctatgagggcctcgtggagggaggtgagaacatcaagcaggccaactggctgagcgtctccaacatcatccagctgggcggcactatcattggcagcgctcgctgcaaggcctttaccaccagggaggggcgccgggcagcggcctacaacctggtccagcacggcatcaccaacctgtgcgtcatcggcggggatggcagccttacaggtgccaacatcttccgcagcgagtggggcagcctgctggaggagctggtggcggaaggtaagatctcagagactacagcccggacctactcgcacctgaacatcgcgggcctagtgggctccatcgataacgacttctgcggcaccgacatgaccatcggcacggactcggccctccaccgcatcatggaggtcatcgatgccatcaccaccactgcccagagccaccagaggaccttcgtgctggaagtgatgggccggcactgcgggtacctggcgctggtatctgcactggcctcaggggccgactggctgttcatccccgaggctccacccgaggacggctgggagaacttcatgtgtgagaggctgggtgagactcggagccgtgggtcccgactgaacatcatcatcatcgctgagggtgccattgaccgcaacgggaagcccatctcgtccagctacgtgaaggacctggtggttcagaggctgggcttcgacacccgtgtaactgtgctgggccacgtgcagcggggagggacgccctctgccttcgaccggatcctgagcagcaagatgggcatggaggcggtgatggcgctgctggaagccacgcctgacacgccggcctgcgtggtcaccctctcggggaaccagtcagtgcggctgcccctcatggagtgcgtgcagatgaccaaggaagtgcagaaagccatggatgacaagaggtttgacgaggccacccagctccgtggtgggagcttcgagaacaactggaacatttacaagctcctcgcccaccagaagccccccaaggagaagtctaacttctccctggccatcctgaatgtgggggccccggcggctggcatgaatgcggccgtgcgctcggcggtgcggaccggcatctcccatggacacacagtatacgtggtgcacgatggcttcgaaggcctagccaagggtcaggtgcaagaagtaggctggcacgacgtggccggctggttggggcgtggtggctccatgctggggaccaagaggaccctgcccaagggccagctggagtccattgtggagaacatccgcatctatggtattcacgccctgctggtggtcggtgggtttgaggcctatgaaggggtgctgcagctggtggaggctcgcgggcgctacgaggagctctgcatcgtcatgtgtgtcatcccagccaccatcagcaacaacgtccctggcaccgacttcagcctgggctccgacactgctgtaaatgccgccatggagagctgtgaccgcatcaaacagtctgcctcggggaccaagcgccgtgtgttcatcgtggagaccatggggggttactgtggctacctggccaccgtgactggcattgctgtgggggccgacgccgcctacgtcttcgaggaccctttcaacatccacgacttaaaggtcaacgtggagcacatgacggagaagatgaagacagacattcagaggggcctggtgctgcggaacgagaagtgccatgactactacaccacggagttcctgtacaacctgtactcatcagagggcaagggcgtcttcgactgcaggaccaatgtcctgggccacctgcagcagggtggcgctccaaccccctttgaccggaactatgggaccaagctgggggtgaaggccatgctgtggttgtcggagaagctgcgcgaggtttaccgcaagggacgggtgttcgccaatgccccagactcggcctgcgtgatcggcctgaagaagaaggcggtggccttcagccccgtcactgagctcaagaaagacactgatttcgagcaccgcatgccacgggagcagtggtggctgagcctgcggctcatgctgaagatgctggcacaataccgcatcagtatggccgcctacgtgtcaggggagctggagcacgtgacccgccgcaccctgagcatggacaagggcttctgaggccagccatgcccacgcccctccccagcccccacccatgccagcgcagcgccagggctcagatggggcctgggctgttgtgtctggagcctgcaggcaggtgggggctgcgtccctgctcagcccatcccctgcctctatccctggccacctgccaggcctccctccggctggtgtcttgagaccagcctgccaggccctccagcaggaggacagagtgccctggggcatccaccttcctgcccaggggacgtggcgctgtcggtgtttggaggctgctgccccctggctttggcgccccatgggccctcagcgtctccccatgctgggctcactacatgggccagcccttgctctacctggccggtaggctgctggcgcctaggttgtgttgagagggggatgcccctggccctgcctcactgtgacctgctcctgcccacgtgcagcacctgtcaccttttctagaaataaaatcaccctgactgtggggtgcatcggtctccggaga

SEQ ID NO: 305936 - DNA, 3599 bp, Homo sapiens
  misc_feature (9)..(9): n is a, c, g, or t
  misc_feature (11)..(12): n is a, c, g, or t
  misc_feature (14)..(14): n is a, c, g, or t
caggctagntnngngccggggttaatcggccgaggggcggcgggagtgcgagctgggcccgtgtttcggccgccgccatggccgcggtggacctggagaagctgcgggcgtcgggcgcgggcaaggccatcggcgtcctgaccagcggcggcgacgcgcaaggcatgaacgctgctgtccgggctgtgacgcgcatgggcatttatgtgggtgccaaagtcttcctcatctacgagggctatgagggcctcgtggagggaggtgagaacatcaagcaggccaactggctgagcgtctccaacatcatccagctgggcggcactatcattggcagcgctcgctgcaaggcctttaccaccagggaggggcgccgggcagcggcctacaacctggtccagcacggcatcaccaacctgtgcgtcatcggcggggatggcagccttacaggtgccaacatcttccgcagcgagtggggcagcctgctggaggagctggtggcggaaggtaagatctcagagactacagcccggacctactcgcacctgaacatcgcgggcctagtgggctccatcgataacgacttctgcggcaccgacatgaccatcggcacggactcggccctccaccgcatcatggaggtcatcgatgccatcaccaccactgcccagagccaccagaggaccttcgtgctggaagtgatgggccggcactgcgggtacctggcgctggtatctgcactggcctcaggggccgactggctgttcatccccgaggctccacccgaggacggctgggagaacttcatgtgtgagaggctgggtgagactcggagccgtgggtcccgactgaacatcatcatcatcgctgagggtgccattgaccgcaacgggaagcccatctcgtccagctacgtgaaggacctggtggttcagaggctgggcttcgacacccgtgtaactgtgctgggccacgtgcagcggggagggacgccctctgccttcgaccggatcctgagcagcaagatgggcatggaggcggtgatggcgctgctggaagccacgcctgacacgccggcctgcgtggtcaccctctcggggaaccagtcagtgcggctgcccctcatggagtgcgtgcagatgaccaaggaagtgcagaaagccatggatgacaagaggtttgacgaggccacccagctccgtggtgggtaagccccctcagcagacccctgcactcttacatggctgggtcccggtgccaggcagcatgtgctgcagtggcgctatgcacgcctggcctgggtcatccttctaggcaccgcgtctgaagatcgagggaggaaggggcctgcgggtggtacaggaggcgggctgggaggtgtggtaccacaggagaccctgggcggtggcacgggcagggcccagtgcacagggatctgggcatggcgaggggatgagaagctgtggatacaagcccaggacatggggtggccccgcgggggctgggaaggctggcagatgttgggtgtgggtaccacccccctgcaggcgtcctggcggccgggtcaggctggattggacgtctgggttcccatgcgtgcctccacccgctaccaaggtggccaaccctcccttgagctggatgccggccacgtgctttgctgcacgggctggcgtggcctcgtgttgtgttgggggtctcgcaccttctgtggaaggtgccctgcctggcatgcgcggtgtctgctgcctcatggctgagcttccatcgggccgtgtgcctgtgaccagcctcctgggctctgtcacggctgcgctgtggctgtacgccgtggcgctgcagggctgtgcatggtgtgacccgaatcccttccaggagcttcgagaacaactggaacatttacaagctcctcgcccaccagaagccccccaaggagaagtctaacttctccctggccatcctgaatgtgggggccccggcggctggcatgaatgcggccgtgcgctcggcggtgcggaccggcatctcccatggacacacagtatacgtggtgcacgatggcttcgaaggcctagccaagggtcaggtgcaagaagtaggctggcacgacgtggccggctggttggggcgtggtggctccatgctggggaccaagaggaccctgcccaagggccagctggagtccattgtggagaacatccgcatctatggtattcacgccctgctggtggtcggtgggtttgaggcctatgaaggggtgctgcagctggtggaggctcgcgggcgctacgaggagctctgcatcgtcatgtgtgtcatcccagccaccatcagcaacaacgtccctggcaccgacttcagcctgggctccgacactgctgtaaatgccgccatggagagctgtgaccgcatcaaacagtctgcctcggggaccaagcgccgtgtgttcatcgtggagaccatggggggttactgtggctacctggccaccgtgactggcattgctgtgggggccgacgccgcctacgtcttcgaggaccctttcaacatccacgacttaaaggtcaacgtggagcacatgacggagaagatgaagacagacattcagaggggcctggtgctgcggaacgagaagtgccatgactactacaccacggagttcctgtacaacctgtactcatcagagggcaagggcgtcttcgactgcaggaccaatgtcctgggccacctgcagcagggtggcgctccaaccccctttgaccggaactatgggaccaagctgggggtgaaggccatgctgtggttgtcggagaagctgcgcgaggtttaccgcaagggacgggtgttcgccaatgccccagactcggcctgcgtgatcggcctgaagaagaaggcggtggccttcagccccgtcactgagctcaagaaagacactgatttcgagcaccgcatgccacgggagcagtggtggctgagcctgcggctcatgctgaagatgctggcacaataccgcatcagtatggccgcctacgtgtcaggggagctggagcacgtgacccgccgcaccctgagcatggacaagggcttctgaggccagccatgcccacgcccctccccagcccccacccatgccagcgcagcgccagggctcagatggggcctgggctgttgtgtctggagcctgcaggcaggtgggggctgcgtccctgctcagcccatcccctgcctctatccctggccacctgccaggcctccctccggctggtgtcttgagaccagcctgccaggccctccagcaggaggacagagtgccctggggcatccaccttcctgcccaggggacgtggcgctgtcggtgtttggaggctgctgccccctggctttggcgccccatgggccctcagcgtctccccatgctgggctcactacatgggccagcccttgctctacctggccggtaggctgctggcgcctaggttgtgttgagagggggatgcccctggccctgcctcactgtgacctgctcctgcccacgtgcagcacctgtcaccttttctagaaataaaatcaccctgactgtggggtgcatcggtctccggaga

SEQ ID NO: 305937 - DNA, 3409 bp, Homo sapiens
  misc_feature (9)..(9): n is a, c, g, or t
  misc_feature (11)..(12): n is a, c, g, or t
  misc_feature (14)..(14): n is a, c, g, or t
caggctagntnngngccggggttaatcggccgaggggcggcgggagtgcgagctgggcccgtgtttcggccgccgccatggccgcggtggacctggagaagctgcgggcgtcgggcgcgggcaaggccatcggcgtcctgaccagcggcggcgacgcgcaaggtcccctgacaagcccaccaggccccctgctgagatggctgtgaccctgggctgacccgcccagtggcacattgactccgcctggagctggggagaccagagaggccctgtggttggacggtggcctgggtgcgctgctcctgccctctccttgccctgcctcagctgctgcctgccagaggcgtggcacctcacctcacacctgctccctgctgctgagccccacgccaagctggagagcggatgagaagcatgtgtaaccagggtagaggtcgagagtcctctcgtgggggtctccatgttcaagggagctgccgaggcttgagcaggagcccccagcaggaaactggctttgccaaggcccccgctgggacagactgtttctttcactgcagtcctgggagccgagggcaaggggacaggaaagaggaagtgacctcagagcctggtggcaccagcatcatgtccaggctggggggcatgaacgctgctgtccgggctgtgacgcgcatgggcatttatgtgggtgccaaagtcttcctcatctacgagggctatgagggcctcgtggagggaggtgagaacatcaagcaggccaactggctgagcgtctccaacatcatccagctgggcggcactatcattggcagcgctcgctgcaaggcctttaccaccagggaggggcgccgggcagcggcctacaacctggtccagcacggcatcaccaacctgtgcgtcatcggcggggatggcagccttacaggtgccaacatcttccgcagcgagtggggcagcctgctggaggagctggtggcggaaggtaagatctcagagactacagcccggacctactcgcacctgaacatcgcgggcctagtgggctccatcgataacgacttctgcggcaccgacatgaccatcggcacggactcggccctccaccgcatcatggaggtcatcgatgccatcaccaccactgcccagagccaccagaggaccttcgtgctggaagtgatgggccggcactgcgggtacctggcgctggtatctgcactggcctcaggggccgactggctgttcatccccgaggctccacccgaggacggctgggagaacttcatgtgtgagaggctgggtgagactcggagccgtgggtcccgactgaacatcatcatcatcgctgagggtgccattgaccgcaacgggaagcccatctcgtccagctacgtgaaggacctggtggttcagaggctgggcttcgacacccgtgtaactgtgctgggccacgtgcagcggggagggacgccctctgccttcgaccggatcctgagcagcaagatgggcatggaggcggtgatggcgctgctggaagccacgcctgacacgccggcctgcgtggtcaccctctcggggaaccagtcagtgcggctgcccctcatggagtgcgtgcagatgaccaaggaagtgcagaaagccatggatgacaagaggtttgacgaggccacccagctccgtggtgggagcttcgagaacaactggaacatttacaagctcctcgcccaccagaagccccccaaggagaagtctaacttctccctggccatcctgaatgtgggggccccggcggctggcatgaatgcggccgtgcgctcggcggtgcggaccggcatctcccatggacacacagtatacgtggtgcacgatggcttcgaaggcctagccaagggtcaggtgcaagaagtaggctggcacgacgtggccggctggttggggcgtggtggctccatgctggggaccaagaggaccctgcccaagggccagctggagtccattgtggagaacatccgcatctatggtattcacgccctgctggtggtcggtgggtttgaggcctatgaaggggtgctgcagctggtggaggctcgcgggcgctacgaggagctctgcatcgtcatgtgtgtcatcccagccaccatcagcaacaacgtccctggcaccgacttcagcctgggctccgacactgctgtaaatgccgccatggagagctgtgaccgcatcaaacagtctgcctcggggaccaagcgccgtgtgttcatcgtggagaccatggggggttactgtggctacctggccaccgtgactggcattgctgtgggggccgacgccgcctacgtcttcgaggaccctttcaacatccacgacttaaaggtcaacgtggagcacatgacggagaagatgaagacagacattcagaggggcctggtgctgcggaacgagaagtgccatgactactacaccacggagttcctgtacaacctgtactcatcagagggcaagggcgtcttcgactgcaggaccaatgtcctgggccacctgcagcagggtggcgctccaaccccctttgaccggaactatgggaccaagctgggggtgaaggccatgctgtggttgtcggagaagctgcgcgaggtttaccgcaagggacgggtgttcgccaatgccccagactcggcctgcgtgatcggcctgaagaagaaggcggtggccttcagccccgtcactgagctcaagaaagacactgatttcgagcaccgcatgccacgggagcagtggtggctgagcctgcggctcatgctgaagatgctggcacaataccgcatcagtatggccgcctacgtgtcaggggagctggagcacgtgacccgccgcaccctgagcatggacaagggcttctgaggccagccatgcccacgcccctccccagcccccacccatgccagcgcagcgccagggctcagatggggcctgggctgttgtgtctggagcctgcaggcaggtgggggctgcgtccctgctcagcccatcccctgcctctatccctggccacctgccaggcctccctccggctggtgtcttgagaccagcctgccaggccctccagcaggaggacagagtgccctggggcatccaccttcctgcccaggggacgtggcgctgtcggtgtttggaggctgctgccccctggctttggcgccccatgggccctcagcgtctccccatgctgggctcactacatgggccagcccttgctctacctggccggtaggctgctggcgcctaggttgtgttgagagggggatgcccctggccctgcctcactgtgacctgctcctgcccacgtgcagcacctgtcaccttttctagaaataaaatcaccctgactgtggggtgcatcggtctccggaga

SEQ ID NO: 305938 - DNA, 2697 bp, Homo sapiens
  misc_feature (9)..(9): n is a, c, g, or t
  misc_feature (11)..(12): n is a, c, g, or t
  misc_feature (14)..(14): n is a, c, g, or t
caggctagntnngngccggggttaatcggccgaggggcggcgggagtgcgagctgggcccgtgtttcggccgccgccatggccgcggtggacctggagaagctgcgggcgtcgggcgcgggcaaggccatcggcgtcctgaccagcggcggcgacgcgcaaggcatgaacgctgctgtccgggctgtgacgcgcatgggcatttatgtgggtgccaaagtcttcctcatctacgagggctatgagggcctcgtggagggaggtgagaacatcaagcaggccaactggctgagcgtctccaacatcatccagctgggcggcactatcattggcagcgctcgctgcaaggcctttaccaccagggaggggcgccgggcagcggcctacaacctggtccagcacggcatcaccaacctgtgcgtcatcggcggggatggcagccttacaggtgccaacatcttccgcagcgagtggggcagcctgctggaggagctggtggcggaaggtaagatctcagagactacagcccggacctactcgcacctgaacatcgcgggcctagtgggctccatcgataacgacttctgcggcaccgacatgaccatcggcacggactcggccctccaccgcatcatggaggtcatcgatgccatcaccaccactgcccagagccaccagaggaccttcgtgctggaagtgatgggccggcactgcgggtacctggcgctggtatctgcactggcctcaggggccgactggctgttcatccccgaggctccacccgaggacggctgggagaacttcatgtgtgagaggctgggtgagactcggagccgtgggtcccgactgaacatcatcatcatcgctgagggtgccattgaccgcaacgggaagcccatctcgtccagctacgtgaaggacctggtggttcagaggctgggcttcgacacccgtgtaactgtgctgggccacgtgcagcggggagggacgccctctgccttcgaccggatcctgagcagcaagatgggcatggaggcggtgatggcgctgctggaagccacgcctgacacgccggcctgcgtggtcaccctctcggggaaccagtcagtgcggctgcccctcatggagtgcgtgcagatgaccaaggaagtgcagaaagccatggatgacaagaggtttgacgaggccacccagctccgtggtgggagcttcgagaacaactggaacatttacaagctcctcgcccaccagaagccccccaaggagaagtctaacttctccctggccatcctgaatgtgggggccccggcggctggcatgaatgcggccgtgcgctcggcggtgcggaccggcatctcccatggacacacagtatacgtggtgcacgatggcttcgaaggcctagccaagggtcagccagccaccatcagcaacaacgtccctggcaccgacttcagcctgggctccgacactgctgtaaatgccgccatggagagctgtgaccgcatcaaacagtctgcctcggggaccaagcgccgtgtgttcatcgtggagaccatggggggttactgtggctacctggccaccgtgactggcattgctgtgggggccgacgccgcctacgtcttcgaggaccctttcaacatccacgacttaaaggtcaacgtggagcacatgacggagaagatgaagacagacattcagaggggcctggtgctgcggaacgagaagtgccatgactactacaccacggagttcctgtacaacctgtactcatcagagggcaagggcgtcttcgactgcaggaccaatgtcctgggccacctgcagcagggtggcgctccaaccccctttgaccggaactatgggaccaagctgggggtgaaggccatgctgtggttgtcggagaagctgcgcgaggtttaccgcaagggacgggtgttcgccaatgccccagactcggcctgcgtgatcggcctgaagaagaaggcggtggccttcagccccgtcactgagctcaagaaagacactgatttcgagcaccgcatgccacgggagcagtggtggctgagcctgcggctcatgctgaagatgctggcacaataccgcatcagtatggccgcctacgtgtcaggggagctggagcacgtgacccgccgcaccctgagcatggacaagggcttctgaggccagccatgcccacgcccctccccagcccccacccatgccagcgcagcgccagggctcagatggggcctgggctgttgtgtctggagcctgcaggcaggtgggggctgcgtccctgctcagcccatcccctgcctctatccctggccacctgccaggcctccctccggctggtgtcttgagaccagcctgccaggccctccagcaggaggacagagtgccctggggcatccaccttcctgcccaggggacgtggcgctgtcggtgtttggaggctgctgccccctggctttggcgccccatgggccctcagcgtctccccatgctgggctcactacatgggccagcccttgctctacctggccggtaggctgctggcgcctaggttgtgttgagagggggatgcccctggccctgcctcactgtgacctgctcctgcccacgtgcagcacctgtcaccttttctagaaataaaatcaccctgactgtggggtgcatcggtctccggaga

SEQ ID NO: 305939 - DNA, 3236 bp, Homo sapiens
  misc_feature (9)..(9): n is a, c, g, or t
  misc_feature (11)..(12): n is a, c, g, or t
  misc_feature (14)..(14): n is a, c, g, or t
caggctagntnngngccggggttaatcggccgaggggcggcgggagtgcgagctgggcccgtgtttcggccgccgccatggccgcggtggacctggagaagctgcgggcgtcgggcgcgggcaaggccatcggcgtcctgaccagcggcggcgacgcgcaaggcatgaacgctgctgtccgggctgtgacgcgcatgggcatttatgtgggtgccaaagtcttcctcatctacgagggctatgagggcctcgtggagggaggtgagaacatcaagcaggccaactggctgagcgtctccaacatcatccagctgggcggcactatcattggcagcgctcgctgcaaggcctttaccaccagggaggggcgccgggcagcggcctacaacctggtccagcacggcatcaccaacctgtgcgtcatcggcggggatggcagccttacaggtgccaacatcttccgcagcgagtggggcagcctgctggaggagctggtggcggaaggtaagatctcagagactacagcccggacctactcgcacctgaacatcgcgggcctagtgggctccatcgataacgacttctgcggcaccgacatgaccatcggcacggactcggccctccaccgcatcatggaggtcatcgatgccatcaccaccactgcccagagccaccagaggaccttcgtgctggaagtgatgggccggcactgcgggtacctggcgctggtatctgcactggcctcaggggccgactggctgttcatccccgaggctccacccgaggacggctgggagaacttcatgtgtgagaggctgggtgagactcggagccgtgggtcccgactgaacatcatcatcatcgctgagggtgccattgaccgcaacgggaagcccatctcgtccagctacgtgaaggacctggtggttcagaggctgggcttcgacacccgtgtaactgtgctgggccacgtgcagcggggagggacgccctctgccttcgaccggatcctgagcagcaagatgggcatggaggcggtgatggcgctgctggaagccacgcctgacacgccggcctgcgtggtcaccctctcggggaaccagtcagtgcggctgcccctcatggagtgcgtgcagatgaccaaggaagtgcagaaagccatggatgacaagaggtttgacgaggccacccagctccgtggtgggagcttcgagaacaactggaacatttacaagctcctcgcccaccagaagccccccaaggagaagtctaacttctccctggccatcctgaatgtgggggccccggcggctggcatgaatgcggccgtgcgctcggcggtgcggaccggcatctcccatggacacacagtatacgtggtgcacgatggcttcgaaggcctagccaagggtcaggtgcaagaagtaggctggcacgacgtggccggctggttggggcgtggtggctccatgctggggaccaagaggaccctgcccaagggccagctggagtccattgtggagaacatccgcatctatggtattcacgccctgctggtggtcggtgggtttgaggcctatgaaggggtgctgcagctggtggaggctcgcgggcgctacgaggagctctgcatcgtcatgtgtgtcatcccagccaccatcagcaacaacgtccctggcaccgacttcagcctgggctccgacactgctgtaaatgccgccatggagagctgtgaccgcatcaaacagtctgcctcggggaccaagcgccgtgtgttcatcgtggagaccatggggggttactgtggctacctggccaccgtgactggcattgctgtgggggccgacgccgcctacgtcttcgaggaccctttcaacatccacgacttaaaggtcaacgtggagcacatgacggagaagatgaagacagacattcagaggggcctggtgctgcggaacgagaagtgccatgactactacaccacggagttcctgtacaacctgtactcatcagagggcaagggcgtcttcgactgcaggaccaatgtcctgggccacctgcagcagggtggcgctccaaccccctttgaccggaactatgggaccaagctgggggtgaaggccatgctgtggttgtcggagaagctgcgcgaggtttaccgcaagggacgggtgttcgccaatgccccagactcggcctgcgtgatcggcctgaagaagaaggcggtggccttcagccccgtcactgagctcaagaaagacactgatttcgagcaccgcatgccacgggagcagtggtggctgagcctgcggctcatgctgaagatgctggcacaataccgcatcagtatggccgcctacgtgtcaggggagctggagcacgtgacccgccgcaccctgagcatggacaagggcttctgaggccagccatgcccacgcccctccccagcccccacccatgccagcgcagcgccagggctcagatggggcctgggctgttgtgtctggagcctgcaggcaggtgggggctgcgtccctgctcagcccatcccctgcctctatccctggccacctgccaggcctccctccggctggtgtcttgagaccagcctgccaggccctccagcaggaggacagagtgccctggggcatccaccttcctgcccaggggacgtggcgctgtcggtgtttggaggctgctgccccctggctttggcgccccatgggccctcagcgtctccccatgctgggctcactacatgggccagcccttgctctacctggccggtaggctgctggcgcctaggttgtgttgagagggggatgcccctggccctgcctcactgtgacctgctcctgcccacgtgcagcacctgtcaccttttctagaaataaaatcaccctgactgtggggtgcatcggtctccggagaaaaaaaaaaaggcacagaagacagacgaagaacacaatgtgttgtgtgtgcgcgactatggccacgctgcgaaagacggaccttcgaaaacgcacaaaaacggcgatggcgccagaagaggcgacacccgacacgatggtagaaacggaggcaacgatgtacgaaacgaggtagaccaccaacaaggacaacgagcgagcgagacaggagaaccaaagaggtcgagagaaaccacaccagataaaagaacagcgcggcgggtggaccagagcggaatgtgcgatcgaaagagcgcaccagcgcga

SEQ ID NO: 305940 - DNA, 2993 bp, Homo sapiens
gatggtggcagatactctggctgctacgtgagaacagtgtgccgatccctggggtttctcaaggcgtggcacctcacctcacacctgctccctgctgctgagccccacgccaagctggagagcggatgagaagcatgtgtaaccagggtagaggtcgagagtcctctcgtgggggtctccatgttcaagggagctgccgaggcttgagcaggagcccccagcaggcatgaacgctgctgtccgggctgtgacgcgcatgggcatttatgtgggtgccaaagtcttcctcatctacgagggctatgagggcctcgtggagggaggtgagaacatcaagcaggccaactggctgagcgtctccaacatcatccagctgggcggcactatcattggcagcgctcgctgcaaggcctttaccaccagggaggggcgccgggcagcggcctacaacctggtccagcacggcatcaccaacctgtgcgtcatcggcggggatggcagccttacaggtgccaacatcttccgcagcgagtggggcagcctgctggaggagctggtggcggaaggtaagatctcagagactacagcccggacctactcgcacctgaacatcgcgggcctagtgggctccatcgataacgacttctgcggcaccgacatgaccatcggcacggactcggccctccaccgcatcatggaggtcatcgatgccatcaccaccactgcccagagccaccagaggaccttcgtgctggaagtgatgggccggcactgcgggtacctggcgctggtatctgcactggcctcaggggccgactggctgttcatccccgaggctccacccgaggacggctgggagaacttcatgtgtgagaggctgggtgagactcggagccgtgggtcccgactgaacatcatcatcatcgctgagggtgccattgaccgcaacgggaagcccatctcgtccagctacgtgaaggacctggtggttcagaggctgggcttcgacacccgtgtaactgtgctgggccacgtgcagcggggagggacgccctctgccttcgaccggatcctgagcagcaagatgggcatggaggcggtgatggcgctgctggaagccacgcctgacacgccggcctgcgtggtcaccctctcggggaaccagtcagtgcggctgcccctcatggagtgcgtgcagatgaccaaggaagtgcagaaagccatggatgacaagaggtttgacgaggccacccagctccgtggtgggagcttcgagaacaactggaacatttacaagctcctcgcccaccagaagccccccaaggagaagtctaacttctccctggccatcctgaatgtgggggccccggcggctggcatgaatgcggccgtgcgctcggcggtgcggaccggcatctcccatggacacacagtatacgtggtgcacgatggcttcgaaggcctagccaagggtcaggtgcaagaagtaggctggcacgacgtggccggctggttggggcgtggtggctccatgctggggaccaagaggaccctgcccaagggccagctggagtccattgtggagaacatccgcatctatggtattcacgccctgctggtggtcggtgggtttgaggcctatgaaggggtgctgcagctggtggaggctcgcgggcgctacgaggagctctgcatcgtcatgtgtgtcatcccagccaccatcagcaacaacgtccctggcaccgacttcagcctgggctccgacactgctgtaaatgccgccatggagagctgtgaccgcatcaaacagtctgcctcggggaccaagcgccgtgtgttcatcgtggagaccatggggggttactgtggctacctggccaccgtgactggcattgctgtgggggccgacgccgcctacgtcttcgaggaccctttcaacatccacgacttaaaggtcaacgtggagcacatgacggagaagatgaagacagacattcagaggggcctggtgctgcggaacgagaagtgccatgactactacaccacggagttcctgtacaacctgtactcatcagagggcaagggcgtcttcgactgcaggaccaatgtcctgggccacctgcagcagggtggcgctccaaccccctttgaccggaactatgggaccaagctgggggtgaaggccatgctgtggttgtcggagaagctgcgcgaggtttaccgcaagggacgggtgttcgccaatgccccagactcggcctgcgtgatcggcctgaagaagaaggcggtggccttcagccccgtcactgagctcaagaaagacactgatttcgagcaccgcatgccacgggagcagtggtggctgagcctgcggctcatgctgaagatgctggcacaataccgcatcagtatggccgcctacgtgtcaggggagctggagcacgtgacccgccgcaccctgagcatggacaagggcttctgaggccagccatgcccacgcccctccccagcccccacccatgccagcgcagcgccagggctcagatggggcctgggctgttgtgtctggagcctgcaggcaggtgggggctgcgtccctgctcagcccatcccctgcctctatccctggccacctgccaggcctccctccggctggtgtcttgagaccagcctgccaggccctccagcaggaggacagagtgccctggggcatccaccttcctgcccaggggacgtggcgctgtcggtgtttggaggctgctgccccctggctttggcgccccatgggccctcagcgtctccccatgctgggctcactacatgggccagcccttgctctacctggccggtaggctgctggcgcctaggttgtgttgagagggggatgcccctggccctgcctcactgtgacctgctcctgcccacgtgcagcacctgtcaccttttctagaaataaaatcaccctgactgtggggtgcatcggtctccggaga

SEQ ID NO: 305941 - DNA, 3112 bp, Homo sapiens
  misc_feature (9)..(9): n is a, c, g, or t
  misc_feature (11)..(12): n is a, c, g, or t
  misc_feature (14)..(14): n is a, c, g, or t
caggctagntnngngccggggttaatcggccgaggggcggcgggagtgcgagctgggcccgtgtttcggccgccgccatggccgcggtggacctggagaagctgcgggcgtcgggcgcgggcaaggccatcggcgtcctgaccagcggcggcgacgcgcaaggtcccctgacaagcccaccaggccccctgctgagatggctgtgaccctgggctgacccgcccagtggcacattgactccgcctggagctggggagaccagagaggccctgtggttggacggtggcctgggtgcgctgctcctgccctctccttgccctgcctcagctgctgcctgccagaggcatgaacgctgctgtccgggctgtgacgcgcatgggcatttatgtgggtgccaaagtcttcctcatctacgagggctatgagggcctcgtggagggaggtgagaacatcaagcaggccaactggctgagcgtctccaacatcatccagctgggcggcactatcattggcagcgctcgctgcaaggcctttaccaccagggaggggcgccgggcagcggcctacaacctggtccagcacggcatcaccaacctgtgcgtcatcggcggggatggcagccttacaggtgccaacatcttccgcagcgagtggggcagcctgctggaggagctggtggcggaaggtaagatctcagagactacagcccggacctactcgcacctgaacatcgcgggcctagtgggctccatcgataacgacttctgcggcaccgacatgaccatcggcacggactcggccctccaccgcatcatggaggtcatcgatgccatcaccaccactgcccagagccaccagaggaccttcgtgctggaagtgatgggccggcactgcgggtacctggcgctggtatctgcactggcctcaggggccgactggctgttcatccccgaggctccacccgaggacggctgggagaacttcatgtgtgagaggctgggtgagactcggagccgtgggtcccgactgaacatcatcatcatcgctgagggtgccattgaccgcaacgggaagcccatctcgtccagctacgtgaaggacctggtggttcagaggctgggcttcgacacccgtgtaactgtgctgggccacgtgcagcggggagggacgccctctgccttcgaccggatcctgagcagcaagatgggcatggaggcggtgatggcgctgctggaagccacgcctgacacgccggcctgcgtggtcaccctctcggggaaccagtcagtgcggctgcccctcatggagtgcgtgcagatgaccaaggaagtgcagaaagccatggatgacaagaggtttgacgaggccacccagctccgtggtgggagcttcgagaacaactggaacatttacaagctcctcgcccaccagaagccccccaaggagaagtctaacttctccctggccatcctgaatgtgggggccccggcggctggcatgaatgcggccgtgcgctcggcggtgcggaccggcatctcccatggacacacagtatacgtggtgcacgatggcttcgaaggcctagccaagggtcaggtgcaagaagtaggctggcacgacgtggccggctggttggggcgtggtggctccatgctggggaccaagaggaccctgcccaagggccagctggagtccattgtggagaacatccgcatctatggtattcacgccctgctggtggtcggtgggtttgaggcctatgaaggggtgctgcagctggtggaggctcgcgggcgctacgaggagctctgcatcgtcatgtgtgtcatcccagccaccatcagcaacaacgtccctggcaccgacttcagcctgggctccgacactgctgtaaatgccgccatggagagctgtgaccgcatcaaacagtctgcctcggggaccaagcgccgtgtgttcatcgtggagaccatggggggttactgtggctacctggccaccgtgactggcattgctgtgggggccgacgccgcctacgtcttcgaggaccctttcaacatccacgacttaaaggtcaacgtggagcacatgacggagaagatgaagacagacattcagaggggcctggtgctgcggaacgagaagtgccatgactactacaccacggagttcctgtacaacctgtactcatcagagggcaagggcgtcttcgactgcaggaccaatgtcctgggccacctgcagcagggtggcgctccaaccccctttgaccggaactatgggaccaagctgggggtgaaggccatgctgtggttgtcggagaagctgcgcgaggtttaccgcaagggacgggtgttcgccaatgccccagactcggcctgcgtgatcggcctgaagaagaaggcggtggccttcagccccgtcactgagctcaagaaagacactgatttcgagcaccgcatgccacgggagcagtggtggctgagcctgcggctcatgctgaagatgctggcacaataccgcatcagtatggccgcctacgtgtcaggggagctggagcacgtgacccgccgcaccctgagcatggacaagggcttctgaggccagccatgcccacgcccctccccagcccccacccatgccagcgcagcgccagggctcagatggggcctgggctgttgtgtctggagcctgcaggcaggtgggggctgcgtccctgctcagcccatcccctgcctctatccctggccacctgccaggcctccctccggctggtgtcttgagaccagcctgccaggccctccagcaggaggacagagtgccctggggcatccaccttcctgcccaggggacgtggcgctgtcggtgtttggaggctgctgccccctggctttggcgccccatgggccctcagcgtctccccatgctgggctcactacatgggccagcccttgctctacctggccggtaggctgctggcgcctaggttgtgttgagagggggatgcccctggccctgcctcactgtgacctgctcctgcccacgtgcagcacctgtcaccttttctagaaataaaatcaccctgactgtggggtgcatcggtctccggaga

SEQ ID NO: 305942 - DNA, 3137 bp, Homo sapiens
  misc_feature (9)..(9): n is a, c, g, or t
  misc_feature (11)..(12): n is a, c, g, or t
  misc_feature (14)..(14): n is a, c, g, or t
caggctagntnngngccggggttaatcggccgaggggcggcgggagtgcgagctgggcccgtgtttcggccgccgccatggccgcggtggacctggagaagctgcgggcgtcgggcgcgggcaaggccatcggcgtcctgaccagcggcggcgacgcgcaaggcatgaacgctgctgtccgggctgtgacgcgcatgggcatttatgtgggtgccaaagtcttcctcatctacgagggctatgagggcctcgtggagggaggtgagaacatcaagcaggccaactggctgagcgtctccaacatcatccagctgggcggcactatcattggcagcgctcgctgcaaggcctttaccaccagggaggggcgccgggcagcggcctacaacctggtccagcacggcatcaccaacctgtgcgtcatcggcggggatggcagccttacaggtgccaacatcttccgcagcgagtggggcagcctgctggaggagctggtggcggaaggtaagatctcagagactacagcccggacctactcgcacctgaacatcgcgggcctagtgggctccatcgataacgacttctgcggcaccgacatgaccatcggcacggactcggccctccaccgcatcatggaggtcatcgatgccatcaccaccactgcccagagccaccagaggaccttcgtgctggaagtgatgggccggcactgcgggtacctggcgctggtatctgcactggcctcaggggccgactggctgttcatccccgaggctccacccgaggacggctgggagaacttcatgtgtgagaggctgggtgagactcggagccgtgggtcccgactgaacatcatcatcatcgctgagggtgccattgaccgcaacgggaagcccatctcgtccagctacgtgaaggacctggtggttcagaggctgggcttcgacacccgtgtaactgtgctgggccacgtgcagcggggagggacgccctctgccttcgaccggatcctgagcagcaagatgggcatggaggcggtgatggcgctgctggaagccacgcctgacacgccggcctgcgtggtcaccctctcggggaaccagtcagtgcggctgcccctcatggagtgcgtgcagatgaccaaggaagtgcagaaagccatggatgacaagaggtttgacgaggccacccagctccgtggtgggagcttcgagaacaactggaacatttacaagctcctcgcccaccagaagccccccaaggagaagtctaacttctccctggccatcctgaatgtgggggccccggcggctggcatgaatgcggccgtgcgctcggcggtgcggaccggcatctcccatggacacacagtatacgtggtgcacgatggcttcgaaggcctagccaagggtcaggtgcaagaagtaggctggcacgacgtggccggctggttggggcgtggtggctccatgctggggaccaagaggaccctgcccaagggccagctggagtccattgtggagaacatccgcatctatggtattcacgccctgctggtggtcggtgggtttgaggcctatgaaggggtgctgcagctggtggaggctcgcgggcgctacgaggagctctgcatcgtcatgtgtgtcatcccagccaccatcagcaacaacgtccctggcaccgacttcagcctgggctccgacactgctgtaaatgccgccatggagagctgtgaccgcatcaaacagtctgcctcggggaccaagcgccgtgtgttcatcgtggagaccatggggggttactgtggctacctggccaccgtgactggcattgctgtgggggccgacgccgcctacgtcttcgaggaccctttcaacatccacgacttaaaggtcaacgtggagcacatgacggagaagatgaagacagacattcagaggggcctggtgctgcggaacgagaagtgccatgactactacaccacggagttcctgtacaacctgtactcatcagagggcaagggcgtcttcgactgcaggaccaatgtcctgggccacctgcagcagggtggcgctccaaccccctttgaccggaactatgggaccaagctgggggtgaaggccatgctgtggttgtcggagaagctgcgcgaggtttaccgcaagggacgggtgttcgccaatgccccagactcggcctgcgtgatcggcctgaagaagaaggcggtggccttcagccccgtcactgagctcaagaaagacactgatttcgagcaccgcatgccacgggagcagtggtggctgagcctgcggctcatgctgaagatgctggcacaataccgcatcagtatggccgcctacgtgtcaggggagctggagcacgtgacccgccgcaccctgagcatggacaagggcttctgaggccagccatgcccacgcccctccccagcccccacccatgccagcgcagcgccagggctcagatggggcctgggctgttgtgtctggagcctgcaggcaggtgggggctgcgtccctgctcagcccatcccctgcctctatccctggccacctgccaggcctccctccggctggtgtcttgagaccagcctgccaggccctccagcaggaggacagagtgccctggggcatccaccttcctgcccaggggacgtggcgctgtcggtgtttggaggctgctgccccctggctttggcgccccatgggccctcagcgtctccccatgctgggctcactacatgggccagcccttgctctacctggccggtaggctgctggcgcctaggttgtgttgagagggggatgcccctggccctgcctcactgtgacctgctcctgcccacgtgcagcacctgtcaccttttctagaaataaaatcaccctgactgtggggtgcatcggtctccggagaaaaaaaaaaaacaacacaaacaacaacacacccaaaaagagaaaaaaaaacgacacaaccacaaacacacaacaacaccaagaacacacacaagaccacaacaaaaacacgagccgcacaaccaccacacaaaaccacgcgaccgcgacggagcacacaagccacagaccgcggacgacccgcaagctacacacaacacagcgcac

SEQ ID NO: 305943 - DNA, 2654 bp, Homo sapiens
  misc_feature (9)..(9): n is a, c, g, or t
  misc_feature (11)..(12): n is a, c, g, or t
  misc_feature (14)..(14): n is a, c, g, or t
caggctagntnngngccggggttaatcggccgaggggcggcgggagtgcgagctgggcccgtgtttcggccgccgccatggccgcggtggacctggagaagctgcgggcgtcgggcgcgggcaaggccatcggcgtcctgaccagcggcggcgacgcgcaaggcatgaacgctgctgtccgggctgtgacgcgcatgggcatttatgtgggtgccaaagtcttcctcatctacgagggctatgagggcctcgtggagggaggtgagaacatcaagcaggccaactggctgagcgtctccaacatcatccagctgggcggcactatcattggcagcgctcgctgcaaggcctttaccaccagggaggggcgccgggcagcggcctacaacctggtccagcacggcatcaccaacctgtgcgtcatcggcggggatggcagccttacaggtgccaacatcttccgcagcgagtggggcagcctgctggaggagctggtggcggaaggtaagatctcagagactacagcccggacctactcgcacctgaacatcgcgggcctagtgggctccatcgataacgacttctgcggcaccgacatgaccatcggcacggactcggccctccaccgcatcatggaggtcatcgatgccatcaccaccactgcccagagccaccagaggaccttcgtgctggaagtgatgggccggcactgcgggtacctggcgctggtatctgcactggcctcaggggccgactggctgttcatccccgaggctccacccgaggacggctgggagaacttcatgtgtgagaggctgggtgagactcggagccgtgggtcccgactgaacatcatcatcataccaaggaagtgcagaaagccatggatgacaagaggtttgacgaggccacccagctccgtggtgggagcttcgagaacaactggaacatttacaagctcctcgcccaccagaagccccccaaggagaagtctaacttctccctggccatcctgaatgtgggggccccggcggctggcatgaatgcggccgtgcgctcggcggtgcggaccggcatctcccatggacacacagtatacgtggtgcacgatggcttcgaaggcctagccaagggtcaggtgcaagaagtaggctggcacgacgtggccggctggttggggcgtggtggctccatgctggggaccaagaggaccctgcccaagggccagctggagtccattgtggagaacatccgcatctatggtattcacgccctgctggtggtcggtgggtttgaggcctatgaaggggtgctgcagctggtggaggctcgcgggcgctacgaggagctctgcatcgtcatgtgtgtcatcccagccaccatcagcaacaacgtccctggcaccgacttcagcctgggctccgacactgctgtaaatgccgccatggagagctgtgaccgcatcaaacagtctgcctcggggaccaagcgccgtgtgttcatcgtggagaccatggggggttactgtggctacctggccaccgtgactggcattgctgtgggggccgacgccgcctacgtcttcgaggaccctttcaacatccacgacttaaaggtcaacgtggagcacatgacggagaagatgaagacagacattcagaggggcctggtgctgcggaacgagaagtgccatgactactacaccacggagttcctgtacaacctgtactcatcagagggcaagggcgtcttcgactgcaggaccaatgtcctgggccacctgcagcagggtggcgctccaaccccctttgaccggaactatgggaccaagctgggggtgaaggccatgctgtggttgtcggagaagctgcgcgaggtttaccgcaagggacgggtgttcgccaatgccccagactcggcctgcgtgatcggcctgaagaagaaggcggtggccttcagccccgtcactgagctcaagaaagacactgatttcgagcaccgcatgccacgggagcagtggtggctgagcctgcggctcatgctgaagatgctggcacaataccgcatcagtatggccgcctacgtgtcaggggagctggagcacgtgacccgccgcaccctgagcatggacaagggcttctgaggccagccatgcccacgcccctccccagcccccacccatgccagcgcagcgccagggctcagatggggcctgggctgttgtgtctggagcctgcaggcaggtgggggctgcgtccctgctcagcccatcccctgcctctatccctggccacctgccaggcctccctccggctggtgtcttgagaccagcctgccaggccctccagcaggaggacagagtgccctggggcatccaccttcctgcccaggggacgtggcgctgtcggtgtttggaggctgctgccccctggctttggcgccccatgggccctcagcgtctccccatgctgggctcactacatgggccagcccttgctctacctggccggtaggctgctggcgcctaggttgtgttgagagggggatgcccctggccctgcctcactgtgacctgctcctgcccacgtgcagcacctgtcaccttttctagaaataaaatcaccctgactgtggggtgcatcggtctccggaga

SEQ ID NO: 305944 - DNA, 2853 bp, Homo sapiens
  misc_feature (9)..(9): n is a, c, g, or t
  misc_feature (11)..(12): n is a, c, g, or t
  misc_feature (14)..(14): n is a, c, g, or t
caggctagntnngngccggggttaatcggccgaggggcggcgggagtgcgagctgggcccgtgtttcggccgccgccatggccgcggtggacctggagaagctgcgggcgtcgggcgcgggcaaggccatcggcgtcctgaccagcggcggcgacgcgcaaggcatgaacgctgctgtccgggctgtgacgcgcatgggcatttatgtgggtgccaaagtcttcctcatctacgagggcggcactatcattggcagcgctcgctgcaaggcctttaccaccagggaggggcgccgggcagcggcctacaacctggtccagcacggcatcaccaacctgtgcgtcatcggcggggatggcagccttacaggtgccaacatcttccgcagcgagtggggcagcctgctggaggagctggtggcggaaggtaagatctcagagactacagcccggacctactcgcacctgaacatcgcgggcctagtgggctccatcgataacgacttctgcggcaccgacatgaccatcggcacggactcggccctccaccgcatcatggaggtcatcgatgccatcaccaccactgcccagagccaccagaggaccttcgtgctggaagtgatgggccggcactgcgggtacctggcgctggtatctgcactggcctcaggggccgactggctgttcatccccgaggctccacccgaggacggctgggagaacttcatgtgtgagaggctgggtgagactcggagccgtgggtcccgactgaacatcatcatcatcgctgagggtgccattgaccgcaacgggaagcccatctcgtccagctacgtgaaggacctggtggttcagaggctgggcttcgacacccgtgtaactgtgctgggccacgtgcagcggggagggacgccctctgccttcgaccggatcctgagcagcaagatgggcatggaggcggtgatggcgctgctggaagccacgcctgacacgccggcctgcgtggtcaccctctcggggaaccagtcagtgcggctgcccctcatggagtgcgtgcagatgaccaaggaagtgcagaaagccatggatgacaagaggtttgacgaggccacccagctccgtggtgggagcttcgagaacaactggaacatttacaagctcctcgcccaccagaagccccccaaggagaagtctaacttctccctggccatcctgaatgtgggggccccggcggctggcatgaatgcggccgtgcgctcggcggtgcggaccggcatctcccatggacacacagtatacgtggtgcacgatggcttcgaaggcctagccaagggtcaggtgcaagaagtaggctggcacgacgtggccggctggttggggcgtggtggctccatgctggggaccaagaggaccctgcccaagggccagctggagtccattgtggagaacatccgcatctatggtattcacgccctgctggtggtcggtgggtttgaggcctatgaaggggtgctgcagctggtggaggctcgcgggcgctacgaggagctctgcatcgtcatgtgtgtcatcccagccaccatcagcaacaacgtccctggcaccgacttcagcctgggctccgacactgctgtaaatgccgccatggagagctgtgaccgcatcaaacagtctgcctcggggaccaagcgccgtgtgttcatcgtggagaccatggggggttactgtggctacctggccaccgtgactggcattgctgtgggggccgacgccgcctacgtcttcgaggaccctttcaacatccacgacttaaaggtcaacgtggagcacatgacggagaagatgaagacagacattcagaggggcctggtgctgcggaacgagaagtgccatgactactacaccacggagttcctgtacaacctgtactcatcagagggcaagggcgtcttcgactgcaggaccaatgtcctgggccacctgcagcagggtggcgctccaaccccctttgaccggaactatgggaccaagctgggggtgaaggccatgctgtggttgtcggagaagctgcgcgaggtttaccgcaagggacgggtgttcgccaatgccccagactcggcctgcgtgatcggcctgaagaagaaggcggtggccttcagccccgtcactgagctcaagaaagacactgatttcgagcaccgcatgccacgggagcagtggtggctgagcctgcggctcatgctgaagatgctggcacaataccgcatcagtatggccgcctacgtgtcaggggagctggagcacgtgacccgccgcaccctgagcatggacaagggcttctgaggccagccatgcccacgcccctccccagcccccacccatgccagcgcagcgccagggctcagatggggcctgggctgttgtgtctggagcctgcaggcaggtgggggctgcgtccctgctcagcccatcccctgcctctatccctggccacctgccaggcctccctccggctggtgtcttgagaccagcctgccaggccctccagcaggaggacagagtgccctggggcatccaccttcctgcccaggggacgtggcgctgtcggtgtttggaggctgctgccccctggctttggcgccccatgggccctcagcgtctccccatgctgggctcactacatgggccagcccttgctctacctggccggtaggctgctggcgcctaggttgtgttgagagggggatgcccctggccctgcctcactgtgacctgctcctgcccacgtgcagcacctgtcaccttttctagaaataaaatcaccctgactgtggggtgcatcggtctccggaga

SEQ ID NO: 305945 - DNA, 3105 bp, Homo sapiens
  misc_feature (397)..(397): n is a, c, g, or t
  misc_feature (427)..(427): n is a, c, g, or t
cgttccccctgctctcagcatatgtggggcgcctcagtgcccggcccaagctcaaggccttcctggcctcccctgagtacgtgtccggccacgtggccggacacgtacacggagttcctgtacaacctgtactcatcagagggcaagggcgtcttcgactgcaggaccaatgtcctgggccacctgcagcagggtggcgctccaaccccctttgaccggaactatgggaccaagctgggggtgaaggccatgctgtggttgtcggagaagctgcgcgaggtttaccgcaagggacgggtgttcgccaatgccccagactcggcttgcgtgatcggcctgaagaagaaggcggtggccttcagccccgtcactgagctcaagaaagacactgatttcnagcaccgcatgccacgggagcagtggtggntgagcctgcggctcatgctgaagatgctggcacaataccgcatcagtatggccgcctacgtgtcaggggagctggtggcggaagtgacccgccgcaccctgagcatggacaggggcgccgggcagcggcctacaacctggtccagcacggcatcaccaacctgtgcgtcatcggcggggatggcagccttacaggtgccaacatcttccgcagcgagtggggcagcctgctggaggagctggtggcggaaggtaagatctcagagactacagcccggacctactcgcacctgaacatcgcgggcctagtgggctccatcgataacgacttctgcggcaccgacatgaccatcggcacggactcggccctccaccgcatcatggaggtcatcgatgccatcaccaccactgcccagagccaccagaggaccttcgtgctggaagtgatgggccggcactgcgggtacctggcgctggtatctgcactggcctcaggggccgactggctgttcatccccgaggctccacccgaggacggctgggagaacttcatgtgtgagaggctgggtgagactcggagccgtgggtcccgactgaacatcatcatcatcgctgagggtgccattgaccgcaacgggaagcccatctcgtccagctacgtgaaggacctggtggttcagaggctgggcttcgacacccgtgtaactgtgctgggccacgtgcagcggggagggacgccctctgccttcgaccggatcctgagcagcaagatgggcatggaggcggtgatggcgctgctggaagccacgcctgacacgccggcctgcgtggtcaccctctcggggaaccagtcagtgcggctgcccctcatggagtgcgtgcagatgaccaaggaagtgcagaaagccatggatgacaagaggtttgacgaggccacccagctccgtggtgggagcttcgagaacaactggaacatttacaagctcctcgcccaccagaagccccccaaggagaagtctaacttctccctggccatcctgaatgtgggggccccggcggctggcatgaatgcggccgtgcgctcggcggtgcggaccggcatctcccatggacacacagtatacgtggtgcacgatggcttcgaaggcctagccaagggtcaggtgcaagaagtaggctggcacgacgtggccggctggttggggcgtggtggctccatgctggggaccaagaggaccctgcccaagggccagctggagtccattgtggagaacatccgcatctatggtattcacgccctgctggtggtcggtgggtttgaggcctatgaaggggtgctgcagctggtggaggctcgcgggcgctacgaggagctctgcatcgtcatgtgtgtcatcccagccaccatcagcaacaacgtccctggcaccgacttcagcctgggctccgacactgctgtaaatgccgccatggagagctgtgaccgcatcaaacagtctgcctcggggaccaagcgccgtgtgttcatcgtggagaccatggggggttactgtggctacctggccaccgtgactggcattgctgtgggggccgacgccgcctacgtcttcgaggaccctttcaacatccacgacttaaaggtcaacgtggagcacatgacggagaagatgaagacagacattcagaggggcctggtgctgcggaacgagaagtgccatgactactacaccacggagttcctgtacaacctgtactcatcagagggcaagggcgtcttcgactgcaggaccaatgtcctgggccacctgcagcagggtggcgctccaaccccctttgaccggaactatgggaccaagctgggggtgaaggccatgctgtggttgtcggagaagctgcgcgaggtttaccgcaagggacgggtgttcgccaatgccccagactcggcctgcgtgatcggcctgaagaagaaggcggtggccttcagccccgtcactgagctcaagaaagacactgatttcgagcaccgcatgccacgggagcagtggtggctgagcctgcggctcatgctgaagatgctggcacaataccgcatcagtatggccgcctacgtgtcaggggagctggagcacgtgacccgccgcaccctgagcatggacaagggcttctgaggccagccatgcccacgcccctccccagcccccacccatgccagcgcagcgccagggctcagatggggcctgggctgttgtgtctggagcctgcaggcaggtgggggctgcgtccctgctcagcccatcccctgcctctatccctggccacctgccaggcctccctccggctggtgtcttgagaccagcctgccaggccctccagcaggaggacagagtgccctggggcatccaccttcctgcccaggggacgtggcgctgtcggtgtttggaggctgctgccccctggctttggcgccccatgggccctcagcgtctccccatgctgggctcactacatgggccagcccttgctctacctggccggtaggctgctggcgcctaggttgtgttgagagggggatgcccctggccctgcctcactgtgacctgctcctgcccacgtgcagcacctgtcaccttttctagaaataaaatcaccctgactgtggggtgcatcggtctccggaga

SEQ ID NO: 305946 - DNA, 2938 bp, Homo sapiens
  misc_feature (397)..(397): n is a, c, g, or t
  misc_feature (427)..(427): n is a, c, g, or t
cgttccccctgctctcagcatatgtggggcgcctcagtgcccggcccaagctcaaggccttcctggcctcccctgagtacgtgtccggccacgtggccggacacgtacacggagttcctgtacaacctgtactcatcagagggcaagggcgtcttcgactgcaggaccaatgtcctgggccacctgcagcagggtggcgctccaaccccctttgaccggaactatgggaccaagctgggggtgaaggccatgctgtggttgtcggagaagctgcgcgaggtttaccgcaagggacgggtgttcgccaatgccccagactcggcttgcgtgatcggcctgaagaagaaggcggtggccttcagccccgtcactgagctcaagaaagacactgatttcnagcaccgcatgccacgggagcagtggtggntgagcctgcggctcatgctgaagatgctggcacaataccgcatcagtatggccgcctacgtgtcaggggagctggtggcggaaggtaagatctcagagactacagcccggacctactcgcacctgaacatcgcgggcctagtgggctccatcgataacgacttctgcggcaccgacatgaccatcggcacggactcggccctccaccgcatcatggaggtcatcgatgccatcaccaccactgcccagagccaccagaggaccttcgtgctggaagtgatgggccggcactgcgggtacctggcgctggtatctgcactggcctcaggggccgactggctgttcatccccgaggctccacccgaggacggctgggagaacttcatgtgtgagaggctgggtgagactcggagccgtgggtcccgactgaacatcatcatcatcgctgagggtgccattgaccgcaacgggaagcccatctcgtccagctacgtgaaggacctggtggttcagaggctgggcttcgacacccgtgtaactgtgctgggccacgtgcagcggggagggacgccctctgccttcgaccggatcctgagcagcaagatgggcatggaggcggtgatggcgctgctggaagccacgcctgacacgccggcctgcgtggtcaccctctcggggaaccagtcagtgcggctgcccctcatggagtgcgtgcagatgaccaaggaagtgcagaaagccatggatgacaagaggtttgacgaggccacccagctccgtggtgggagcttcgagaacaactggaacatttacaagctcctcgcccaccagaagccccccaaggagaagtctaacttctccctggccatcctgaatgtgggggccccggcggctggcatgaatgcggccgtgcgctcggcggtgcggaccggcatctcccatggacacacagtatacgtggtgcacgatggcttcgaaggcctagccaagggtcaggtgcaagaagtaggctggcacgacgtggccggctggttggggcgtggtggctccatgctggggaccaagaggaccctgcccaagggccagctggagtccattgtggagaacatccgcatctatggtattcacgccctgctggtggtcggtgggtttgaggcctatgaaggggtgctgcagctggtggaggctcgcgggcgctacgaggagctctgcatcgtcatgtgtgtcatcccagccaccatcagcaacaacgtccctggcaccgacttcagcctgggctccgacactgctgtaaatgccgccatggagagctgtgaccgcatcaaacagtctgcctcggggaccaagcgccgtgtgttcatcgtggagaccatggggggttactgtggctacctggccaccgtgactggcattgctgtgggggccgacgccgcctacgtcttcgaggaccctttcaacatccacgacttaaaggtcaacgtggagcacatgacggagaagatgaagacagacattcagaggggcctggtgctgcggaacgagaagtgccatgactactacaccacggagttcctgtacaacctgtactcatcagagggcaagggcgtcttcgactgcaggaccaatgtcctgggccacctgcagcagggtggcgctccaaccccctttgaccggaactatgggaccaagctgggggtgaaggccatgctgtggttgtcggagaagctgcgcgaggtttaccgcaagggacgggtgttcgccaatgccccagactcggcctgcgtgatcggcctgaagaagaaggcggtggccttcagccccgtcactgagctcaagaaagacactgatttcgagcaccgcatgccacgggagcagtggtggctgagcctgcggctcatgctgaagatgctggcacaataccgcatcagtatggccgcctacgtgtcaggggagctggagcacgtgacccgccgcaccctgagcatggacaagggcttctgaggccagccatgcccacgcccctccccagcccccacccatgccagcgcagcgccagggctcagatggggcctgggctgttgtgtctggagcctgcaggcaggtgggggctgcgtccctgctcagcccatcccctgcctctatccctggccacctgccaggcctccctccggctggtgtcttgagaccagcctgccaggccctccagcaggaggacagagtgccctggggcatccaccttcctgcccaggggacgtggcgctgtcggtgtttggaggctgctgccccctggctttggcgccccatgggccctcagcgtctccccatgctgggctcactacatgggccagcccttgctctacctggccggtaggctgctggcgcctaggttgtgttgagagggggatgcccctggccctgcctcactgtgacctgctcctgcccacgtgcagcacctgtcaccttttctagaaataaaatcaccctgactgtggggtgcatcggtctccggaga

SEQ ID NO: 305947 - DNA, 2231 bp, Homo sapiens
  misc_feature (9)..(9): n is a, c, g, or t
  misc_feature (11)..(12): n is a, c, g, or t
  misc_feature (14)..(14): n is a, c, g, or t
caggctagntnngngccggggttaatcggccgaggggcggcgggagtgcgagctgggcccgtgtttcggccgccgccatggccgcggtggacctggagaagctgcgggcgtcgggcgcgggcaaggccatcggcgtcctgaccagcggcggcgacgcgcaagcgctgagggtgccattgaccgcaacgggaagcccatctcgtccagctacgtgaaggacctggtggttcagaggctgggcttcgacacccgtgtaactgtgctgggccacgtgcagcggggagggacgccctctgccttcgaccggatcctgagcagcaagatgggcatggaggcggtgatggcgctgctggaagccacgcctgacacgccggcctgcgtggtcaccctctcggggaaccagtcagtgcggctgcccctcatggagtgcgtgcagatgaccaaggaagtgcagaaagccatggatgacaagaggtttgacgaggccacccagctccgtggtgggagcttcgagaacaactggaacatttacaagctcctcgcccaccagaagccccccaaggagaagtctaacttctccctggccatcctgaatgtgggggccccggcggctggcatgaatgcggccgtgcgctcggcggtgcggaccggcatctcccatggacacacagtatacgtggtgcacgatggcttcgaaggcctagccaagggtcaggtgcaagaagtaggctggcacgacgtggccggctggttggggcgtggtggctccatgctggggaccaagaggaccctgcccaagggccagctggagtccattgtggagaacatccgcatctatggtattcacgccctgctggtggtcggtgggtttgaggcctatgaaggggtgctgcagctggtggaggctcgcgggcgctacgaggagctctgcatcgtcatgtgtgtcatcccagccaccatcagcaacaacgtccctggcaccgacttcagcctgggctccgacactgctgtaaatgccgccatggagagctgtgaccgcatcaaacagtctgcctcggggaccaagcgccgtgtgttcatcgtggagaccatggggggttactgtggctacctggccaccgtgactggcattgctgtgggggccgacgccgcctacgtcttcgaggaccctttcaacatccacgacttaaaggtcaacgtggagcacatgacggagaagatgaagacagacattcagaggggcctggtgctgcggaacgagaagtgccatgactactacaccacggagttcctgtacaacctgtactcatcagagggcaagggcgtcttcgactgcaggaccaatgtcctgggccacctgcagcagggtggcgctccaaccccctttgaccggaactatgggaccaagctgggggtgaaggccatgctgtggttgtcggagaagctgcgcgaggtttaccgcaagggacgggtgttcgccaatgccccagactcggcctgcgtgatcggcctgaagaagaaggcggtggccttcagccccgtcactgagctcaagaaagacactgatttcgagcaccgcatgccacgggagcagtggtggctgagcctgcggctcatgctgaagatgctggcacaataccgcatcagtatggccgcctacgtgtcaggggagctggagcacgtgacccgccgcaccctgagcatggacaagggcttctgaggccagccatgcccacgcccctccccagcccccacccatgccagcgcagcgccagggctcagatggggcctgggctgttgtgtctggagcctgcaggcaggtgggggctgcgtccctgctcagcccatcccctgcctctatccctggccacctgccaggcctccctccggctggtgtcttgagaccagcctgccaggccctccagcaggaggacagagtgccctggggcatccaccttcctgcccaggggacgtggcgctgtcggtgtttggaggctgctgccccctggctttggcgccccatgggccctcagcgtctccccatgctgggctcactacatgggccagcccttgctctacctggccggtaggctgctggcgcctaggttgtgttgagagggggatgcccctggccctgcctcactgtgacctgctcctgcccacgtgcagcacctgtcaccttttctagaaataaaatcaccctgactgtggggtgcatcggtctccggaga

SEQ ID NO: 305948 - DNA, 2882 bp, Homo sapiens
  misc_feature (9)..(9): n is a, c, g, or t
  misc_feature (11)..(12): n is a, c, g, or t
  misc_feature (14)..(14): n is a, c, g, or t
caggctagntnngngccggggttaatcggccgaggggcggcgggagtgcgagctgggcccgtgtttcggccgccgccatggccgcggtggacctggagaagctgcgggcgtcgggcgcgggcaaggccatcggcgtcctgaccagcggcggcgacgcgcaaggcatgaacgctgctgtccgggctgtgacgcgcatgggcatttatgtgggtgccaaagtcttcctcatctacgagggctatgagggcctcgtggagggaggtgagaacatcaagcaggccaactggctgagcgtctccaacatcatccagctgggcggcactatcattggcagcgctcgctgcaaggcctttaccaccagggaggggcgccgggcagcggcctacaacctggtccagcacggcatcaccaacctgtgcgtcatcggcggggatggcagccttacaggtgccaacatcttccgcagcgagtggggcagcctgctggaggagctggtggcggaaggtaagatctcagagactacagcccggacctactcgcacctgaacatcgcgggcctagtgggctccatcgataacgacttctgcggcaccgacatgaccatcggcacggactcggccctccaccgcatcatggaggtcatcgatgccatcaccaccactgcccagagccaccagaggaccttcgtgctggaagtgatgggccggcactgcgggtacctggcgctggtatctgcactggcctcaggggccgactggctgttcatccccgaggctccacccgaggacggctgggagaacttcatgtgtgagaggctgggtgagactcggagccgtgggtcccgactgaacatcatcatcatcgctgagggtgccattgaccgcaacgggaagcccatctcgtccagctacgtgaaggacctggtggttcagaggctgggcttcgacacccgtgtaactgtgctgggccacgtgcagcggggagggacgccctctgccttcgaccggatcctgagcagcaagatgggcatggaggcggtgatggcgctgctggaagccacgcctgacacgccggcctgcgtggtcaccctctcggggaaccagtcagtgcggctgcccctcatggagtgcgtgcagatgaccaaggaagtgcagaaagccatggatgacaagaggtttgacgaggccacccagctccgtggtgggagcttcgagaacaactggaacatttacaagctcctcgcccaccagaagccccccaaggagaagtctaacttctccctggccatcctgaatgtgggggccccggcggctggcatgaatgcggccgtgcgctcggcggtgcggaccggcatctcccatggacacacagtatacgtggtgcacgatggcttcgaaggcctagccaagggtcaggtgcaagaagtaggctggcacgacgtggccggctggttggggcgtggtggctccatgctggggaccaagaggaccctgcccaagggccagctggagtccattgtggagaacatccgcatctatggtattcacgccctgctggtggtcggtgggtttgaggcctatgaaggggtgctgcagctggtggaggctcgcgggcgctacgaggagctctgcatcgtcatgtgtgtcatcccagccaccatcagcaacaacgtccctggcaccgacttcagcctgggctccgacactgctgtaaatgccgccatggagagctgtgaccgcatcaaacagtctgcctcggggaccaagcgccgtgtgttcatcgtggagaccatggggggttactgtggctacctggccaccgtgactggcattgctgtgggggccgacgccgcctacgtcttcgaggaccctttcaacatccacgacttaaaggtcaacgtggagcacatgacggagaagatgaagacagacattcagaggggcctggtgctgcggaacgagaagtgccatgactactacaccacggagttcctgtacaacctgtactcatcagagggcaagggcgtcttcgactgcaggaccaatgtcctgggccacctgcagcagggtggcgctccaaccccctttgaccggaactatgggaccaagctgggggtgaaggccatgctgtggttgtcggagaagctgcgcgaggtttaccgcaagggacgggtgttcgccaatgccccagactcggcctgcgtgatcggcctgaagaagaaggcggtggccttcagccccgtcactgagctcaagaaagacactgatttcgagcaccgcatgccacgggagcagtggtggctgagcctgcggctcatgctgaagatgctggcacaataccgcatcagtatggccgcctacgtgtcaggggagctggagcacgtgacccgccgcaccctgagcatggacaagggcttctgaggccagccatgcccacgcccctccccagcccccacccatgccagcgcagcgccagggctcagatggggcctgggctgttgtgtctggagcctgcaggcaggtgggggctgcgtccctgctcagcccatcccctgcctctatccctggccacctgccaggcctccctccggctggtgtcttgagaccagcctgccaggccctccagcaggaggacagagtgccctggggcatccaccttcctgcccaggggacgtggcgctgtcggtgtttggaggctgctgccccctggctttggcgccccatgggccctcagcgtctccccatgctgggctcactacatgggccagcccttgctctacctggccctgcctcactgtgacctgctcctgcccacgtgcagcacctgtcaccttttctagaaataaaatcaccctgactgtggggtgcatcggtctccggaga

SEQ ID NO: 305949 - DNA, 2079 bp, Homo sapiens
tgacgcggtcgccaactatgaacactgcaaccgtggacatgcccatctcgtccagctacgtgaaggacctggtggttcagaggctgggcttcgacacccgtgtaactgtgctgggccacgtgcagcggggagggacgccctctgccttcgaccggatcctgagcagcaagatgggcatggaggcggtgatggcgctgctggaagccacgcctgacacgccggcctgcgtggtcaccctctcggggaaccagtcagtgcggctgcccctcatggagtgcgtgcagatgaccaaggaagtgcagaaagccatggatgacaagaggtttgacgaggccacccagctccgtggtgggagcttcgagaacaactggaacatttacaagctcctcgcccaccagaagccccccaaggagaagtctaacttctccctggccatcctgaatgtgggggccccggcggctggcatgaatgcggccgtgcgctcggcggtgcggaccggcatctcccatggacacacagtatacgtggtgcacgatggcttcgaaggcctagccaagggtcaggtgcaagaagtaggctggcacgacgtggccggctggttggggcgtggtggctccatgctggggaccaagaggaccctgcccaagggccagctggagtccattgtggagaacatccgcatctatggtattcacgccctgctggtggtcggtgggtttgaggcctatgaaggggtgctgcagctggtggaggctcgcgggcgctacgaggagctctgcatcgtcatgtgtgtcatcccagccaccatcagcaacaacgtccctggcaccgacttcagcctgggctccgacactgctgtaaatgccgccatggagagctgtgaccgcatcaaacagtctgcctcggggaccaagcgccgtgtgttcatcgtggagaccatggggggttactgtggctacctggccaccgtgactggcattgctgtgggggccgacgccgcctacgtcttcgaggaccctttcaacatccacgacttaaaggtcaacgtggagcacatgacggagaagatgaagacagacattcagaggggcctggtgctgcggaacgagaagtgccatgactactacaccacggagttcctgtacaacctgtactcatcagagggcaagggcgtcttcgactgcaggaccaatgtcctgggccacctgcagcagggtggcgctccaaccccctttgaccggaactatgggaccaagctgggggtgaaggccatgctgtggttgtcggagaagctgcgcgaggtttaccgcaagggacgggtgttcgccaatgccccagactcggcctgcgtgatcggcctgaagaagaaggcggtggccttcagccccgtcactgagctcaagaaagacactgatttcgagcaccgcatgccacgggagcagtggtggctgagcctgcggctcatgctgaagatgctggcacaataccgcatcagtatggccgcctacgtgtcaggggagctggagcacgtgacccgccgcaccctgagcatggacaagggcttctgaggccagccatgcccacgcccctccccagcccccacccatgccagcgcagcgccagggctcagatggggcctgggctgttgtgtctggagcctgcaggcaggtgggggctgcgtccctgctcagcccatcccctgcctctatccctggccacctgccaggcctccctccggctggtgtcttgagaccagcctgccaggccctccagcaggaggacagagtgccctggggcatccaccttcctgcccaggggacgtggcgctgtcggtgtttggaggctgctgccccctggctttggcgccccatgggccctcagcgtctccccatgctgggctcactacatgggccagcccttgctctacctggccggtaggctgctggcgcctaggttgtgttgagagggggatgcccctggccctgcctcactgtgacctgctcctgcccacgtgcagcacctgtcaccttttctagaaataaaatcaccctgactgtggggtgcatcggtctccggaga

SEQ ID NO: 305950 - DNA, 2296 bp, Homo sapiens
  misc_feature (9)..(9): n is a, c, g, or t
  misc_feature (11)..(12): n is a, c, g, or t
  misc_feature (14)..(14): n is a, c, g, or t
caggctagntnngngccggggttaatcggccgaggggcggcgggagtgcgagctgggcccgtgtttcggccgccgccatggccgcggtggacctggagaagctgcgggcgtcgggcgcgggcaaggccatcggcgtcctgaccagcggcggcgacgcgcaaggcatgaacgctgctgtccgggctgtgacgcgcatgggcatttatgtgggtgccaaagtcttcctcatctacgagggctatgagggcctcgtggagggaggtgagaacatcaagcaggccaactggctgagcgtctccaacatcatccagctgggcggcactatcattggcagcgctcgctgcaaggcctttaccaccagggaggggcgccgggcagcggcctacaacctggtccagcacggcatcaccaacctgtgcgtcatcggcggggatggcagccttacaggtgccaacatcttccgcagcgagtggggcagcctgctggaggagctggtggcggaagaccaaggaagtgcagaaagccatggatgacaagaggtttgacgaggccacccagctccgtggtgggagcttcgagaacaactggaacatttacaagctcctcgcccaccagaagccccccaaggagaagtctaacttctccctggccatcctgaatgtgggggccccggcggctggcatgaatgcggccgtgcgctcggcggtgcggaccggcatctcccatggacacacagtatacgtggtgcacgatggcttcgaaggcctagccaagggtcaggtgcaagaagtaggctggcacgacgtggccggctggttggggcgtggtggctccatgctggggaccaagaggaccctgcccaagggccagctggagtccattgtggagaacatccgcatctatggtattcacgccctgctggtggtcggtgggtttgaggcctatgaaggggtgctgcagctggtggaggctcgcgggcgctacgaggagctctgcatcgtcatgtgtgtcatcccagccaccatcagcaacaacgtccctggcaccgacttcagcctgggctccgacactgctgtaaatgccgccatggagagctgtgaccgcatcaaacagtctgcctcggggaccaagcgccgtgtgttcatcgtggagaccatggggggttactgtggctacctggccaccgtgactggcattgctgtgggggccgacgccgcctacgtcttcgaggaccctttcaacatccacgacttaaaggtcaacgtggagcacatgacggagaagatgaagacagacattcagaggggcctggtgctgcggaacgagaagtgccatgactactacaccacggagttcctgtacaacctgtactcatcagagggcaagggcgtcttcgactgcaggaccaatgtcctgggccacctgcagcagggtggcgctccaaccccctttgaccggaactatgggaccaagctgggggtgaaggccatgctgtggttgtcggagaagctgcgcgaggtttaccgcaagggacgggtgttcgccaatgccccagactcggcctgcgtgatcggcctgaagaagaaggcggtggccttcagccccgtcactgagctcaagaaagacactgatttcgagcaccgcatgccacgggagcagtggtggctgagcctgcggctcatgctgaagatgctggcacaataccgcatcagtatggccgcctacgtgtcaggggagctggagcacgtgacccgccgcaccctgagcatggacaagggcttctgaggccagccatgcccacgcccctccccagcccccacccatgccagcgcagcgccagggctcagatggggcctgggctgttgtgtctggagcctgcaggcaggtgggggctgcgtccctgctcagcccatcccctgcctctatccctggccacctgccaggcctccctccggctggtgtcttgagaccagcctgccaggccctccagcaggaggacagagtgccctggggcatccaccttcctgcccaggggacgtggcgctgtcggtgtttggaggctgctgccccctggctttggcgccccatgggccctcagcgtctccccatgctgggctcactacatgggccagcccttgctctacctggccggtaggctgctggcgcctaggttgtgttgagagggggatgcccctggccctgcctcactgtgacctgctcctgcccacgtgcagcacctgtcaccttttctagaaataaaatcaccctgactgtggggtgcatcggtctccggaga

SEQ ID NO: 305951 - DNA, 2779 bp, Homo sapiens
  misc_feature (9)..(9): n is a, c, g, or t
  misc_feature (11)..(12): n is a, c, g, or t
  misc_feature (14)..(14): n is a, c, g, or t
caggctagntnngngccggggttaatcggccgaggggcggcgggagtgcgagctgggcccgtgtttcggccgccgccatggccgcggtggacctggagaagctgcgggcgtcgggcgcgggcaaggccatcggcgtcctgaccagcggcggcgacgcgcaaggcatgaacgctgctgtccgggctgtgacgcgcatgggcatttatgtgggtgccaaagtcttcctcatctacgagggctatgagggcctcgtggagggaggtgagaacatcaagcaggccaactggctgagcgtctccaacatcatccagctgggcggcactatcattggcagcgctcgctgcaaggcctttaccaccagggaggggcgccgggcagcggcctacaacctggtccagcacggcatcaccaacctgtgcgtcatcggcggggatggcagccttacaggtgccaacatcttccgcagcgagtggggcagcctgctggaggagctggtggcggaaggtaagatctcagagactacagcccggacctactcgcacctgaacatcgcgggcctagtgggctccatcgataacgacttctgcggcaccgacatgaccatcggcacggactcggccctccaccgcatcatggaggtcatcgatgccatcaccaccactgcccagagccaccagaggaccttcgtgctggaagtgatgggccggcactgcgggtacctggcgctggtatctgcactggcctcaggggccgactggctgttcatccccgaggctccacccgaggacggctgggagaacttcatgtgtgagaggctgggtgagactcggagccgtgggtcccgactgaacatcatcatcatcgctgagggtgccattgaccgcaacgggaagcccatctcgtccagctacgtgaaggacctggtggttcagaggctgggcttcgacacccgtgtaactgtgctgggccacgtgcagcggggagggacgccctctgccttcgaccggatcctgagcagcaagatgggcatggaggcggtgatggcgctgctggaagccacgcctgacacgccggcctgcgtggtcaccctctcggggaaccagtcagtgcggctgcccctcatggagtgcgtgcagatgaccaaggaagtgcagaaagccatggatgacaagaggtttgacgaggccacccagctccgtggtgggagcttcgagaacaactggaacatttacaagctcctcgcccaccagaagccccccaaggagaagtctaacttctccctggccatcctgaatgtgggggccccggcggctggcatgaatgcggccgtgcgctcggcggtgcggaccggcatctcccatggacacacagtatacgtggtgcacgatggcttcgaaggcctagccaagggtcaggtgcaagaagtaggctggcacgacgtggccggctggttggggcgtggtggctccatgctggggaccaagaggaccctgcccaagggccagctggagtccattgtggagaacatccgcatctatggtattcacgccctgctggtggtcggtgggtttgaggcctatgaaggggtgctgcagctggtggaggctcgcgggcgctacgaggagctctgcatcgtcatgtgtgtcatcccagccaccatcagcaacaacgtccctggcaccgacttcagcctgggctccgacactgctgtaaatgccgccatggagagctgtgaccgcatcaaacagtctgcctcggggaccaagcgccgtgtgttcatcgtggagaccatggggggttactgtggctacctggccaccgtgactggcattgctgtgggggccgacgccgcctacgtcttcgaggaccctttcaacatccacgacttaaaggtcaacgtggagcacatgacggagaagatgaagacagacattcagaggggcctggtgctgcggaacgagaagtgccatgactactacaccacggagttcctgtacaacctgtactcatcagagggcaagggcgtcttcgactgcaggaccaatgtcctgggccacctgcagcagggtggcgctccaaccccctttgaccggaactatgggaccaagctgggggtgaaggccatgctgtggttgtcggagaagctgcgcgaggtttaccgcaagggacgggtgttcgccaatgccccagactcggcctgcgtgatcggcctgaagaagaaggcggtggccttcagccccgtcactgagctcaagaaagacactgatttcgagcaccgcatgccacgggagcagtggtggctgagcctgcggctcatgctgaagatgctggcacaataccgcatcagtatggccgcctacgtgtcaggggagctggagcacgtgacccgccgcaccctgagcatggacaagggcttctgaggccagccatgcccacgcccctccccagcccccacccatgccagcgcagcgccagggctcagatggggcctgggctgttgtgtctggagcctgcaggcaggtgggggctgcgtccctgctcagcccatcccctgcctctatccctggccacctgccaggcctccctccggctggtgtcttgagaccagctgcagctcagggagacgagtgctgggatcaacttctgccggagtggctgtgttgagggggccggtggcccaggcccagtccagggtcaatgaaccgtacgggagttggcaatgtgagggccccgcgacgccggccttaaacggggggaaaagggcgggctttttgttgta

SEQ ID NO: 305952 - DNA, 3606 bp, Homo sapiens
  misc_feature (397)..(397): n is a, c, g, or t
  misc_feature (427)..(427): n is a, c, g, or t
cgttccccctgctctcagcatatgtggggcgcctcagtgcccggcccaagctcaaggccttcctggcctcccctgagtacgtgtccggccacgtggccggacacgtacacggagttcctgtacaacctgtactcatcagagggcaagggcgtcttcgactgcaggaccaatgtcctgggccacctgcagcagggtggcgctccaaccccctttgaccggaactatgggaccaagctgggggtgaaggccatgctgtggttgtcggagaagctgcgcgaggtttaccgcaagggacgggtgttcgccaatgccccagactcggcttgcgtgatcggcctgaagaagaaggcggtggccttcagccccgtcactgagctcaagaaagacactgatttcnagcaccgcatgccacgggagcagtggtggntgagcctgcggctcatgctgaagatgctggcacaataccgcatcagtatggccgcctacgtgtcaggggagctggtggcggaaggtaagatctcagagactacagcccggacctactcgcacctgaacatcgcgggcctagtgggctccatcgataacgacttctgcggcaccgacatgaccatcggcacggactcggccctccaccgcatcatggaggtcatcgatgccatcaccaccactgcccagagccaccagaggaccttcgtgctggaagtgatgggccggcactgcgggtacctggcgctggtatctgcactggcctcaggggccgactggctgttcatccccgaggctccacccgaggacggctgggagaacttcatgtgtgagaggctgggtgagactcggagccgtgggtcccgactgaacatcatcatcatcgctgagggtgccattgaccgcaacgggaagcccatctcgtccagctacgtgaaggacctggtggttcagaggctgggcttcgacacccgtgtaactgtgctgggccacgtgcagcggggagggacgccctctgccttcgaccggatcctgagcagcaagatgggcatggaggcggtgatggcgctgctggaagccacgcctgacacgccggcctgcgtggtcaccctctcggggaaccagtcagtgcggctgcccctcatggagtgcgtgcagatgaccaaggaagtgcagaaagccatggatgacaagaggtttgacgaggccacccagctccgtggtgggtaagccccctcagcagacccctgcactcttacatggctgggtcccggtgccaggcagcatgtgctgcagtggcgctatgcacgcctggcctgggtcatccttctaggcaccgcgtctgaagatcgagggaggaaggggcctgcgggtggtacaggaggcgggctgggaggtgtggtaccacaggagaccctgggcggtggcacgggcagggcccagtgcacagggatctgggcatggcgaggggatgagaagctgtggatacaagcccaggacatggggtggccccgcgggggctgggaaggctggcagatgttgggtgtgggtaccacccccctgcaggcgtcctggcggccgggtcaggctggattggacgtctgggttcccatgcgtgcctccacccgctaccaaggtggccaaccctcccttgagctggatgccggccacgtgctttgctgcacgggctggcgtggcctcgtgttgtgttgggggtctcgcaccttctgtggaaggtgccctgcctggcatgcgcggtgtctgctgcctcatggctgagcttccatcgggccgtgtgcctgtgaccagcctcctgggctctgtcacggctgcgctgtggctgtacgccgtggcgctgcagggctgtgcatggtgtgacccgaatcccttccaggagcttcgagaacaactggaacatttacaagctcctcgcccaccagaagccccccaaggagaagtctaacttctccctggccatcctgaatgtgggggccccggcggctggcatgaatgcggccgtgcgctcggcggtgcggaccggcatctcccatggacacacagtatacgtggtgcacgatggcttcgaaggcctagccaagggtcaggtgcaagaagtaggctggcacgacgtggccggctggttggggcgtggtggctccatgctggggaccaagaggaccctgcccaagggccagctggagtccattgtggagaacatccgcatctatggtattcacgccctgctggtggtcggtgggtttgaggcctatgaaggggtgctgcagctggtggaggctcgcgggcgctacgaggagctctgcatcgtcatgtgtgtcatcccagccaccatcagcaacaacgtccctggcaccgacttcagcctgggctccgacactgctgtaaatgccgccatggagagctgtgaccgcatcaaacagtctgcctcggggaccaagcgccgtgtgttcatcgtggagaccatggggggttactgtggctacctggccaccgtgactggcattgctgtgggggccgacgccgcctacgtcttcgaggaccctttcaacatccacgacttaaaggtcaacgtggagcacatgacggagaagatgaagacagacattcagaggggcctggtgctgcggaacgagaagtgccatgactactacaccacggagttcctgtacaacctgtactcatcagagggcaagggcgtcttcgactgcaggaccaatgtcctgggccacctgcagcagggtggcgctccaaccccctttgaccggaactatgggaccaagctgggggtgaaggccatgctgtggttgtcggagaagctgcgcgaggtttaccgcaagggacgggtgttcgccaatgccccagactcggcctgcgtgatcggcctgaagaagaaggcggtggccttcagccccgtcactgagctcaagaaagacactgatttcgagcaccgcatgccacgggagcagtggtggctgagcctgcggctcatgctgaagatgctggcacaataccgcatcagtatggccgcctacgtgtcaggggagctggagcacgtgacccgccgcaccctgagcatggacaagggcttctgaggccagccatgcccacgcccctccccagcccccacccatgccagcgcagcgccagggctcagatggggcctgggctgttgtgtctggagcctgcaggcaggtgggggctgcgtccctgctcagcccatcccctgcctctatccctggccacctgccaggcctccctccggctggtgtcttgagaccagcctgccaggccctccagcaggaggacagagtgccctggggcatccaccttcctgcccaggggacgtggcgctgtcggtgtttggaggctgctgccccctggctttggcgccccatgggccctcagcgtctccccatgctgggctcactacatgggccagcccttgctctacctggccggtaggctgctggcgcctaggttgtgttgagagggggatgcccctggccctgcctcactgtgacctgctcctgcccacgtgcagcacctgtcaccttttctagaaataaaatcaccctgactgtggggtgcatcggtctccggaga

SEQ ID NO: 305953 - DNA, 1998 bp, Homo sapiens
cataatgtctatgtagaggctggcttaatcggcagaggcttggctctgctctggcctcaggggccgactggctgttcatccccgaggctccacccgaggacggctgggagaacttcatgtgtgagaggctgggtgagccggcctgcgtggtcaccctctcggggaaccagtcagtgcggctgcccctcatggagtgcgtgcagatgaccaaggaagtgcagaaagccatggatgacaagaggtttgacgaggccacccagctccgtggtgggagcttcgagaacaactggaacatttacaagctcctcgcccaccagaagccccccaaggagaagtctaacttctccctggccatcctgaatgtgggggccccggcggctggcatgaatgcggccgtgcgctcggcggtgcggaccggcatctcccatggacacacagtatacgtggtgcacgatggcttcgaaggcctagccaagggtcaggtgcaagaagtaggctggcacgacgtggccggctggttggggcgtggtggctccatgctggggaccaagaggaccctgcccaagggccagctggagtccattgtggagaacatccgcatctatggtattcacgccctgctggtggtcggtgggtttgaggcctatgaaggggtgctgcagctggtggaggctcgcgggcgctacgaggagctctgcatcgtcatgtgtgtcatcccagccaccatcagcaacaacgtccctggcaccgacttcagcctgggctccgacactgctgtaaatgccgccatggagagctgtgaccgcatcaaacagtctgcctcggggaccaagcgccgtgtgttcatcgtggagaccatggggggttactgtggctacctggccaccgtgactggcattgctgtgggggccgacgccgcctacgtcttcgaggaccctttcaacatccacgacttaaaggtcaacgtggagcacatgacggagaagatgaagacagacattcagaggggcctggtgctgcggaacgagaagtgccatgactactacaccacggagttcctgtacaacctgtactcatcagagggcaagggcgtcttcgactgcaggaccaatgtcctgggccacctgcagcagggtggcgctccaaccccctttgaccggaactatgggaccaagctgggggtgaaggccatgctgtggttgtcggagaagctgcgcgaggtttaccgcaagggacgggtgttcgccaatgccccagactcggcctgcgtgatcggcctgaagaagaaggcggtggccttcagccccgtcactgagctcaagaaagacactgatttcgagcaccgcatgccacgggagcagtggtggctgagcctgcggctcatgctgaagatgctggcacaataccgcatcagtatggccgcctacgtgtcaggggagctggagcacgtgacccgccgcaccctgagcatggacaagggcttctgaggccagccatgcccacgcccctccccagcccccacccatgccagcgcagcgccagggctcagatggggcctgggctgttgtgtctggagcctgcaggcaggtgggggctgcgtccctgctcagcccatcccctgcctctatccctggccacctgccaggcctccctccggctggtgtcttgagaccagcctgccaggccctccagcaggaggacagagtgccctggggcatccaccttcctgcccaggggacgtggcgctgtcggtgtttggaggctgctgccccctggctttggcgccccatgggccctcagcgtctccccatgctgggctcactacatgggccagcccttgctctacctggccggtaggctgctggcgcctaggttgtgttgagagggggatgcccctggccctgcctcactgtgacctgctcctgcccacgtgcagcacctgtcaccttttctagaaataaaatcaccctgactgtggggtgcatcggtctccggaga

SEQ ID NO: 305954 - DNA, 2427 bp, Homo sapiens
  misc_feature (9)..(9): n is a, c, g, or t
  misc_feature (11)..(12): n is a, c, g, or t
  misc_feature (14)..(14): n is a, c, g, or t
caggctagntnngngccggggttaatcggccgaggggcggcgggagtgcgagctgggcccgtgtttcggccgccgccatggccgcggtggacctggagaagctgcgggcgtcgggcgcgggcaaggccatcggcgtcctgaccagcggcggcgacgcgcaaggcatgaacgctgctgtccgggctgtgacgcgcatgggcatttatgtgggtgccaaagtcttcctcatctacgagggctatgagggcctcgtggagggaggtgagaacatcaagcaggccaactggctgagcgtctccaacatcatccagctgggcggcactatcattggcagcgctcgctgcaaggcctttaccaccagggaggggcgccgggcagcggcctacaacctggtccagcacggcatcaccaacctgtgcgtcatcggcggggatggcagccttacaggtgccaacatcttccgcagcgagtggggcagcctgctggaggagctggtggcggaaggtaagatctcagagactacagcccggacctactcgcacctgaacatcgcgggcctagtgggctccatcgataacgacttctgcggcaccgacatgaccatcggcacggactcggccctccaccgcatcatggaggtcatcgatgccatcaccaccactgcccagagccaccagaggaccttcgtgctggaagtgatgggccggcactgcgggtacctggcgctggtatctgcactggcctcaggggccgactggctgttcatccccgaggctccacccgaggacggctgggagaacttcatgtgtgagaggctgggtgagactcggagccgtgggtcccgactgaacatcatcatcatcgctgagggtgccattgaccgcaacgggaagcccatctcgtccagctacgtgaaggacctggtggttcagaggctgggcttcgacacccgtgtaactgtgctgggccacgtgcagcggggagggacgccctctgccttcgaccggatcctgagcagcaagatgggcatggaggcggtgatggcgctgctggaagccacgcctgacacgccggcctgcgtggtcaccctctcggggaaccagtcagtgcggctgcccctcatggagtgcgtgcagatgaccaaggaagtgcagaaagccatggatgacaagaggtttgacgaggccacccagctccgtggtgggagcttcgagaacaactggaacatttacaagctcctcgcccaccagaagccccccaaggagaagtctaacttctccctggccatcctgaatgtgggggccccggcggctggcatgaatgcggccgtgcgctcggcggtgcggaccggcatctcccatggacacacagtatacgtggtgcacgatggcttcgaaggcctagccaagggtcaggtgcaagaagtaggctggcacgacgtggccggctggttggggcgtggtggctccatgctggggaccaagaggaccctgcccaagggccagctggagtccattgtggagaacatccgcatctatggtattcacgccctgctggtggtcggtgggtttgaggcctatgaaggggtgctgcagctggtggaggctcgcgggcgctacgaggagctctgcatcgtcatgtgtgtcatcccagccaccatcagcaacaacgtccctggcaccgacttcagcctgggctccgacactgctgtaaatgccgccatggagagctgtgaccgcatcaaacagtctgcctcggggaccaagcgccgtgtgttcatcgtggagaccatggggggttactgtggctacctggccaccgtgactggcattgctgtgggggccgacgccgcctacgtcttcgaggaccctttcaacatccacgacttaaaggtcaacgtggagcacatgacggagaagatgaagacagacattcagaggggcctggtgctgcggaacgagaagtgccatgactactacaccacggagttctgttgtgtctggagcctgcaggcaggtgggggctgcgtccctgctcagcccatcccctgcctctatccctggccacctgccaggcctccctccggctggtgtcttgagaccagcctgccaggccctccagcaggaggacagagtgccctggggcatccaccttcctgcccaggggacgtggcgctgtcggtgtttggaggctgctgccccctggctttggcgccccatgggccctcagcgtctccccatgctgggctcactacatgggccagcccttgctctacctggccggtaggctgctggcgcctaggttgtgttgagagggggatgcccctggccctgcctcactgtgacctgctcctgcccacgtgcagcacctgtcaccttttctagaaataaaatcaccctgactgtggggtgcatcggtctccggaga

SEQ ID NO: 305955 - DNA, 2517 bp, Homo sapiens
  misc_feature (9)..(9): n is a, c, g, or t
  misc_feature (11)..(12): n is a, c, g, or t
  misc_feature (14)..(14): n is a, c, g, or t
caggctagntnngngccggggttaatcggccgaggggcggcgggagtgcgagctgggcccgtgtttcggccgccgccatggccgcggtggacctggagaagctgcgggcgtcgggcgcgggcaaggccatcggcgtcctgaccagcggcggcgacgcgcaaggcatgaacgctgctgtccgggctgtgacgcgcatgggcatttatgtgggtgccaaagtcttcctcatctacgagggctatgagggcctcgtggagggaggtgagaacatcaagcaggccaactggctgagcgtctccaacatcatccagctgggcggcactatcattggcagcgctcgctgcaaggcctttaccaccagggaggggcgccgggcagcggcctacaacctggtccagcacggcatcaccaacctgtgcgtcatcggcggggatggcagccttacaggtgccaacatcttccgcagcgagtggggcagcctgctggaggagctggtggcggaaggtaagatctcagagactacagcccggacctactcgcacctgaacatcgcgggcctagtgggctccatcgataacgacttctgcggcaccgacatgaccatcggcacggactcggccctccaccgcatcatggaggtcatcgatgccatcaccaccactgcccagagccaccagaggaccttcgtgctggaagtgatgggccggcactgcgggtacctggcgctggtatctgcactggcctcaggggccgactggctgttcatccccgaggctccacccgaggacggctgggagaacttcatgtgtgagaggctgggtgagactcggagccgtgggtcccgactgaacatcatcatcatcgctgagggtgccattgaccgcaacgggaagcccatctcgtccagctacgtgaaggacctggtggttcagaggctgggcttcgacacccgtgtaactgtgctgggccacgtgcagcggggagggacgccctctgccttcgaccggatcctgagcagcaagatgggcatggaggcggtgatggcgctgctggaagccacgcctgacacgccggcctgcgtggtcaccctctcggggaaccagtcagtgcggctgcccctcatggagtgcgtgcagatgaccaaggaagtgcagaaagccatggatgacaagaggtttgacgaggccacccagctccgtggtgggagcttcgagaacaactggaacatttacaagctcctcgcccaccagaagccccccaaggagaagtctaacttctccctggccatcctgaatgtgggggccccggcggctggcatgaatgcggccgtgcgctcggcggtgcggaccggcatctcccatggacacacagtatacgtggtgcacgatggcttcgaaggcctagccaagggtcaggtgcaagaagtaggctggcacgacgtggccggctggttggggcgtggtggctccatgctggggaccaagaggaccctgcccaagggccagctggagtccattgtggagaacatccgcatctatggtattcacgccctgctggtggtcggtgggtttgaggcctatgaaggggtgctgcagctggtggaggctcgcgggcgctacgaggagctctgcatcgtcatgtgtgtcatcccagccaccatcagcaacaacgtccctggcaccgacttcagcctgggctccgacactgctgtaaatgccgccatggagagctgtgaccgcatcaaacagtctgcctcggggaccaagcgccgtgtgttcatcgtggagaccatggggggttactgtggctacctggccaccgtgactggcattgctgtgggggccgacgccgcctacgtcttcgaggaccctttcaacatccacgacttaaaggtcaacgtggagcacatgacggagaagatgaagacagacattcagaggggcctggtgctgcggaacgagaagtgccatgactactacaccacggagttcctgtacaacctgtactcatcagagggcaagggcgtcttcgactgcaggaccaatgtcctgggccacctgcagcagggtggcgctccaaccccctttgaccggaactatgggaccaagctgggggtgaaggccatgctgtggttgtcggagaagctgcgcgaggtttaccgcaagggacgggtgttcgccaatgccccagactcggcctgcgtgatcggcctgaagaagaaggcggtggccttcagccccgtcactgagctcaagaaagacactgatttcgagcaccgcatgccacgggagcagtggtggctgagcctgcggctcatgctgaagatgctggcacaataccgcatcagtatggccgcctacgtgtcaggggagctggagcacgtgacccgccgcaccctgagcatggacaagggcttctgaggccagccatgcccacgcctgcactccgccggccattgcactccggccagccttgcactccggccagccattgactccggccagccattgactccgg

SEQ ID NO: 305956 - DNA, 2489 bp, Homo sapiens
  misc_feature (9)..(9): n is a, c, g, or t
  misc_feature (11)..(12): n is a, c, g, or t
  misc_feature (14)..(14): n is a, c, g, or t
caggctagntnngngccggggttaatcggccgaggggcggcgggagtgcgagctgggcccgtgtttcggccgccgccatggccgcggtggacctggagaagctgcgggcgtcgggcgcgggcaaggccatcggcgtcctgaccagcggcggcgacgcgcaaggcatgaacgctgctgtccgggctgtgacgcgcatgggcatttatgtgggtgccaaagtcttcctcatctacgagggctatgagggcctcgtggagggaggtgagaacatcaagcaggccaactggctgagcgtctccaacatcatccagctgggcggcactatcattggcagcgctcgctgcaaggcctttaccaccagggaggggcgccgggcagcggcctacaacctggtccagcacggcatcaccaacctgtgcgtcatcggcggggatggcagccttacaggtgccaacatcttccgcagcgagtggggcagcctgctggaggagctggtggcggaaggtaagatctcagagactacagcccggacctactcgcacctgaacatcgcgggcctagtgggctccatcgataacgacttctgcggcaccgacatgaccatcggcacggactcggccctccaccgcatcatggaggtcatcgatgccatcaccaccactgcccagagccaccagaggaccttcgtgctggaagtgatgggccggcactgcgggtacctggcgctggtatctgcactggcctcaggggccgactggctgttcatccccgaggctccacccgaggacggctgggagaacttcatgtgtgagaggctgggtgagactcggagccgtgggtcccgactgaacatcatcatcatcgctgagggtgccattgaccgcaacgggaagcccatctcgtccagctacgtgaaggacctggtggttcagaggctgggcttcgacacccgtgtaactgtgctgggccacgtgcagcggggagggacgccctctgccttcgaccggatcctgagcagcaagatgggcatggaggcggtgatggcgctgctggaagccacgcctgacacgccggcctgcgtggtcaccctctcggggaaccagtcagtgcggctgcccctcatggagtgcgtgcagatgaccaaggaagtgcagaaagccatggatgacaagaggtttgacgaggccacccagctccgtggtgggagcttcgagaacaactggaacatttacaagctcctcgcccaccagaagccccccaaggagaagtctaacttctccctggccatcctgaatgtgggggccccggcggctggcatgaatgcggccgtgcgctcggcggtgcggaccggcatctcccatggacacacagtatacgtggtgcacgatggcttcgaaggcctagccaagggtcaggtgcaagaagtaggctggcacgacgtggccggctggttggggcgtggtggctccatgctggggaccaagaggaccctgcccaagggccagctggagtccattgtggagaacatccgcatctatggtattcacgccctgctggtggtcggtgggtttgaggcctatgaaggggtgctgcagctggtggaggctcgcgggcgctacgaggagctctgcatcgtcatgtgtgtcatcccagccaccatcagcaacaacgtccctggcaccgacttcagcctgggctccgacactgctgtaaatgccgccatggagagctgtgaccgcatcaaacagtctgcctcggggaccaagcgccgtgtgttcatcgtggagaccatggggggttactgtggctacctggccaccgtgactggcattgctgtgggggccgacgccgcctacgtcttcgaggaccctttcaacatccacgacttaaaggtcaacgtggagcacatgacggagaagatgaagacagacattcagaggggcctggtgctgcggaacgagaagtgccatgactactacaccacggagttcctgtacaacctgtactcatcagagggcaagggcgtcttcgactgcaggaccaatgtcctgggccacctgcagcagggtggcgctccaaccccctttgaccggaactatgggaccaagctgggggtgaaggccatgctgtggttgtcggagaagctgcgcgaggtttaccgcaagggacgggtgttcgccaatgccccagactcggcctgcgtgatcggcctgaagaagaaggcggtggccttcagccccgtcactgagctcaagaaagacactgatttcgagcaccggatgccagggagcaggggtggtgagccggggtcaatgctgaagaatggtgggcccataccggatcaagatggcgcctacgggtcggggagcggggccgggaccggcggaccctgagctggaagggtttgggggcggcaggcaaggcggtccaaggcacaacaaggcagggaggcagggtacgaggggctggtgtgggttggccggagaggg

SEQ ID NO: 305957 - DNA, 2353 bp, Homo sapiens
  misc_feature (9)..(9): n is a, c, g, or t
  misc_feature (11)..(12): n is a, c, g, or t
  misc_feature (14)..(14): n is a, c, g, or t
caggctagntnngngccggggttaatcggccgaggggcggcgggagtgcgagctgggcccgtgtttcggccgccgccatggccgcggtggacctggagaagctgcgggcgtcgggcgcgggcaaggccatcggcgtcctgaccagcggcggcgacgcgcaaggcatgaacgctgctgtccgggctgtgacgcgcatgggcatttatgtgggtgccaaagtcttcctcatctacgagggctatgagggcctcgtggagggaggtgagaacatcaagcaggccaactggctgagcgtctccaacatcatccagctgggcggcactatcattggcagcgctcgctgcaaggcctttaccaccagggaggggcgccgggcagcggcctacaacctggtccagcacggcatcaccaacctgtgcgtcatcggcggggatggcagccttacaggtgccaacatcttccgcagcgagtggggcagcctgctggaggagctggtggcggaaggtaagatctcagagactacagcccggacctactcgcacctgaacatcgcgggcctagtgggctccatcgataacgacttctgcggcaccgacatgaccatcggcacggactcggccctccaccgcatcatggaggtcatcgatgccatcaccaccactgcccagagccaccagaggaccttcgtgctggaagtgatgggccggcactgcgggtacctggcgctggtatctgcactggcctcaggggccgactggctgttcatccccgaggctccacccgaggacggctgggagaacttcatgtgtgagaggctgggtgagactcggagccgtgggtcccgactgaacatcatcatcatcgctgagggtgccattgaccgcaacgggaagcccatctcgtccagctacgtgaaggacctggtggttcagaggctgggcttcgacacccgtgtaactgtgctgggccacgtgcagcggggagggacgccctctgccttcgaccggatcctgagcagcaagatgggcatggaggcggtgatggcgctgctggaagccacgcctgacacgccggcctgcgtggtcaccctctcggggaaccagtcagtgcggctgcccctcatggagtgcgtgcagatgaccaaggaagtgcagaaagccatggatgacaagaggtttgacgaggccacccagctccgtggtgggagcttcgagaacaactggaacatttacaagctcctcgcccaccagaagccccccaaggagaagtctaacttctccctggccatcctgaatgtgggggccccggcggctggcatgaatgcggccgtgcgctcggcggtgcggaccggcatctcccatggacacacagtatacgtggtgcacgatggcttcgaaggcctagccaagggtcaggtgcaagaagtaggctggcacgacgtggccggctggttggggcgtggtggctccatgctggggaccaagaggaccctgcccaagggccagctggagtccattgtggagaacatccgcatctatggtattcacgccctgctggtggtcggtgggtttgaggcctatgaaggggtgctgcagctggtggaggctcgcgggcgctacgaggagctctgcatcgtcatgtgtgtcatcccagccaccatcagcaacaacgtccctggcaccgacttcagcctgggctccgacactgctgtaaatgccgccatggagagctgtgaccgcatcaaacagtctgcctcggggaccaagcgccgtgtgttcatcgtggagaccatggggggttactgtggctacctggccaccgtgactggcattgctgtgggggccgacgccgcctacgtcttcgaggaccctttcaacatccacgacttaaaggtcaacgtggagcacatgacggagaagatgaagacagacattcagaggggcctggtgctgcggaacgagaagtgccatgactactacaccacggagttcctgtacaacctgtactcatcagagggcaagggcgtcttcgactgcaggaccaatgtcctgggccacctgcagcagggtggcgctccaaccccctttgaccggaactatgggaccaagctgggggtgaaggccatgctgtggttgtcggagaagctgcgcgaggtttaccgcaagggacgggtgttcgccaatgccccagactcggcctgcgtgatcggcctgaagaagaaggcggtggccttcagccccgtcactgagctcaagaaagacactgatttcgagcacgctcgtctgagaagtcgagcacccgtctgacgtactcgagcacccgtcggtagaatcgagcaccctctgagaatgcg

SEQ ID NO: 305958 - DNA, 1874 bp, Homo sapiens
  misc_feature (9)..(9): n is a, c, g, or t
  misc_feature (11)..(12): n is a, c, g, or t
  misc_feature (14)..(14): n is a, c, g, or t
caggctagntnngngccggggttaatcggccgaggggcggcgggagtgcgagctgggcccgtgtttcggccgccgccatggccgcggtggacctggagaagctgcgggcgtcgggcgcgggcaaggccatcggcgtcctgaccagcggcggcgacgcgcaaggcatgaacgctgctgtccgggctgtgacgcgcatgggcatttatgtgggtgccaaagtcttcctcatctacgagggctatgagggcctcgtggagggaggtgagaacatcaagcaggccaactggctgagcgtctccaacatcatccagctgggcggcactatcattggcagcgctcgctgcaaggcctttaccaccagggaggggcgccgggcagcggcctacaacctggtccagcacggcatcaccaacctgtgcgtcatcggcggggatggcagccttacaggtgccaacatcttccgcagcgagtggggcagcctgctggaggagctggtggcggaaggtaagatctcagagactacagcccggacctactcgcacctgaacatcgcgggcctagtgggctccatcgataacgacttctgcggcaccgacatgaccatcggcacggactcggccctccaccgcatcatggaggtcatcgatgccatcaccaccactgcccagagagctgtgaccgcatcaaacagtctgcctcggggaccaagcgccgtgtgttcatcgtggagaccatggggggttactgtggctacctggccaccgtgactggcattgctgtgggggccgacgccgcctacgtcttcgaggaccctttcaacatccacgacttaaaggtcaacgtggagcacatgacggagaagatgaagacagacattcagaggggcctggtgctgcggaacgagaagtgccatgactactacaccacggagttcctgtacaacctgtactcatcagagggcaagggcgtcttcgactgcaggaccaatgtcctgggccacctgcagcagggtggcgctccaaccccctttgaccggaactatgggaccaagctgggggtgaaggccatgctgtggttgtcggagaagctgcgcgaggtttaccgcaagggacgggtgttcgccaatgccccagactcggcctgcgtgatcggcctgaagaagaaggcggtggccttcagccccgtcactgagctcaagaaagacactgatttcgagcaccgcatgccacgggagcagtggtggctgagcctgcggctcatgctgaagatgctggcacaataccgcatcagtatggccgcctacgtgtcaggggagctggagcacgtgacccgccgcaccctgagcatggacaagggcttctgaggccagccatgcccacgcccctccccagcccccacccatgccagcgcagcgccagggctcagatggggcctgggctgttgtgtctggagcctgcaggcaggtgggggctgcgtccctgctcagcccatcccctgcctctatccctggccacctgccaggcctccctccggctggtgtcttgagaccagcctgccaggccctccagcaggaggacagagtgccctggggcatccaccttcctgcccaggggacgtggcgctgtcggtgtttggaggctgctgccccctggctttggcgccccatgggccctcagcgtctccccatgctgggctcactacatgggccagcccttgctctacctggccggtaggctgctggcgcctaggttgtgttgagagggggatgcccctggccctgcctcactgtgacctgctcctgcccacgtgcagcacctgtcaccttttctagaaataaaatcaccctgactgtggggtgcatcggtctccggaga

SEQ ID NO: 305959 - DNA, 1862 bp, Homo sapiens
ctgtgtgtgggctcgggagggttctttactttctccggaaagcttcacaaggttccgattaaccccagtgctggggaggggcaggggaggaaggggactcggaagctggaggacgagaaagaagggaggcggaggaggcagaggtgtaggtgctggacggcatcgctgaacgtggtgtcctggcactgggcaagctgtcactaaataatgaataaatgacagcccttcccccttgccctccatggagtggatctggggtcagagtgggttggaggagactcctgaccctccttagagtccagtttccctggtaggcatcctgagatgacaccaggctgactgcctggcccagccccaggggattgagcaggtgggtcctggcgtccagcacggggcacatgacaggtcagcagggagcagggctgggcggccgccggcagagcctgtccccggcccaccctggcctcggtgctgcccttgacctgccccgtccctactgctgcaggcctatgaaggggtgctgcagctggtggaggctcgcgggcgctacgaggagctctgcatcgtcatgtgtgtcatcccagccaccatcagcaacaacgtccctggcaccgacttcagcctgggctccgacactgctgtaaatgccgccatggagagctgtgaccgcatcaaacagtctgcctcggggaccaagcgccgtgtgttcatcgtggagaccatggggggttactgtggctacctggccaccgtgactggcattgctgtgggggccgacgccgcctacgtcttcgaggaccctttcaacatccacgacttaaaggtcaacgtggagcacatgacggagaagatgaagacagacattcagaggggcctggtgctgcggaacgagaagtgccatgactactacaccacggagttcctgtacaacctgtactcatcagagggcaagggcgtcttcgactgcaggaccaatgtcctgggccacctgcagcagggtggcgctccaaccccctttgaccggaactatgggaccaagctgggggtgaaggccatgctgtggttgtcggagaagctgcgcgaggtttaccgcaagggacgggtgttcgccaatgccccagactcggcctgcgtgatcggcctgaagaagaaggcggtggccttcagccccgtcactgagctcaagaaagacactgatttcgagcaccgcatgccacgggagcagtggtggctgagcctgcggctcatgctgaagatgctggcacaataccgcatcagtatggccgcctacgtgtcaggggagctggagcacgtgacccgccgcaccctgagcatggacaagggcttctgaggccagccatgcccacgcccctccccagcccccacccatgccagcgcagcgccagggctcagatggggcctgggctgttgtgtctggagcctgcaggcaggtgggggctgcgtccctgctcagcccatcccctgcctctatccctggccacctgccaggcctccctccggctggtgtcttgagaccagcctgccaggccctccagcaggaggacagagtgccctggggcatccaccttcctgcccaggggacgtggcgctgtcggtgtttggaggctgctgccccctggctttggcgccccatgggccctcagcgtctccccatgctgggctcactacatgggccagcccttgctctacctggccggtaggctgctggcgcctaggttgtgttgagagggggatgcccctggccctgcctcactgtgacctgctcctgcccacgtgcagcacctgtcaccttttctagaaataaaatcaccctgactgtggggtgcatcggtctccggaga

SEQ ID NO: 305960 - DNA, 2280 bp, Homo sapiens
  misc_feature (9)..(9): n is a, c, g, or t
  misc_feature (11)..(12): n is a, c, g, or t
  misc_feature (14)..(14): n is a, c, g, or t
  misc_feature (2076)..(2076): n is a, c, g, or t
  misc_feature (2280)..(2280): n is a, c, g, or t
caggctagntnngngccggggttaatcggccgaggggcggcgggagtgcgagctgggcccgtgtttcggccgccgccatggccgcggtggacctggagaagctgcgggcgtcgggcgcgggcaaggccatcggcgtcctgaccagcggcggcgacgcgcaaggcatgaacgctgctgtccgggctgtgacgcgcatgggcatttatgtgggtgccaaagtcttcctcatctacgagggctatgagggcctcgtggagggaggtgagaacatcaagcaggccaactggctgagcgtctccaacatcatccagctgggcggcactatcattggcagcgctcgctgcaaggcctttaccaccagggaggggcgccgggcagcggcctacaacctggtccagcacggcatcaccaacctgtgcgtcatcggcggggatggcagccttacaggtgccaacatcttccgcagcgagtggggcagcctgctggaggagctggtggcggaaggtaagatctcagagactacagcccggacctactcgcacctgaacatcgcgggcctagtgggctccatcgataacgacttctgcggcaccgacatgaccatcggcacggactcggccctccaccgcatcatggaggtcatcgatgccatcaccaccactgcccagagccaccagaggaccttcgtgctggaagtgatgggccggcactgcgggtacctggcgctggtatctgcactggcctcaggggccgactggctgttcatccccgaggctccacccgaggacggctgggagaacttcatgtgtgagaggctgggtgagactcggagccgtgggtcccgactgaacatcatcatcatcgctgagggtgccattgaccgcaacgggaagcccatctcgtccagctacgtgaaggacctggtggttcagaggctgggcttcgacacccgtgtaactgtgctgggccacgtgcagcggggagggacgccctctgccttcgaccggatcctgagcagcaagatgggcatggaggcggtgatggcgctgctggaagccacgcctgacacgccggcctgcgtggtcaccctctcggggaaccagtcagtgcggctgcccctcatggagtgcgtgcagatgaccaaggaagtgcagaaagccatggatgacaagaggtttgacgaggccacccagctccgtggtgggagcttcgagaacaactggaacatttacaagctcctcgcccaccagaagccccccaaggagaagtctaacttctccctggccatcctgaatgtgggggccccggcggctggcatgaatgcggccgtgcgctcggcggtgcggaccggcatctcccatggacacacagtatacgtggtgcacgatggcttcgaaggcctagccaagggtcaggtgcaagaagtaggctggcacgacgtggccggctggttggggcgtggtggctccatgctggggaccaagaggaccctgcccaagggccagctggagtccattgtggagaacatccgcatctatggtattcacgccctgctggtggtcggtgggtttgaggcctatgaaggggtgctgcagctggtggaggctcgcgggcgctacgaggagctctgcatcgtcatgtgtgtcatcccagccaccatcagcaacaacgtccctggcaccgacttcagcctgggctccgacactgctgtaaatgccgccatggagagctgtgaccgcatcaaacagtctgcctcggggaccaagcgccgtgtgttcatcgtggagaccatggggggttactgtggctacctggccaccgtgactggcattgctgtgggggccgacgccgcctacgtcttcgaggaccctttcaacatccacgacttaaaggtcaacgtggagcacatgacggagaagatgaagacagacattcagaggggcctggtgctgcggaccggaagggcctggataataacccagggtcccggacaacggatccatcaagggagggggctcaacgggggaacaagtgtcggggtcaccgcacagggggggggccaaaacccctgtaggngacatgtggcaccggcggggagcagcccacggggtgggtgcaacacggcggggaacacgcgggagggagtgcagaccacacacgaagaggccacacaagaggggcgaccgagagaaaacgacgccagacccgactggacgggccgacgagacaaagaacaggagcgccagcagcaaagcaccaacgggtggcgcggcgccacgn

SEQ ID NO: 305961 - DNA, 1907 bp, Homo sapiens
  misc_feature (9)..(9): n is a, c, g, or t
  misc_feature (11)..(12): n is a, c, g, or t
  misc_feature (14)..(14): n is a, c, g, or t
caggctagntnngngccggggttaatcggccgaggggcggcgggagtgcgagctgggcccgtgtttcggccgccgccatggccgcggtggacctggagaagctgcgggcgtcgggcgcgggcaaggccatcggcgtcctgaccagcggcggcgacgcgcaaggcatgaacgctgctgtccgggctgtgacgcgcatgggcatttatgtgggtgccaaagtcttcctcatctacgagggctatgagggcctcgtggagggaggtgagaacatcaagcaggccaactggctgagcgtctccaacatcatccagctgggcggcactatcattggcagcgctcgctgcaaggcctttaccaccagggaggggcgccgggcagcggcctacaacctggtccagcacggcatcaccaacctgtgcgtcatcggcggggatggcagccttacaggtgccaacatcttccgcagcgagtggggcagcctgctggaggagctggtggcggaaggtaagatctcagagactacagcccggacctactcgcacctgaacatcgcgggcctagtgggctccatcgataacgacttctgcggcaccgacatgaccatcggcacggactcggccctccaccgcatcatggaggtcatcgatgccatcaccaccactgcccagagccaccagaggaccttcgtgctggaagtgatgggccggcactgcgggtacctggcgctggtatctgcactggcctcaggggccgactggctgttcatccccgaggctccacccgaggacggctgggagaacttcatgtgtgagaggctgggtgagactcggagccgtgggtcccgactgaacatcatcatcatcgctgagggtgccattgaccgcaacgggaagcccatctcgtccagctacgtgaaggacctggtggttcagaggctgggcttcgacacccgtgtaactgtgctgggccacgtgcagcggggagggacgccctctgccttcgaccggatcctgagcagcaagatgggcatggaggcggtgatggcgctgctggaagccacgcctgacacgccggcctgcgtggtcaccctctcggggaaccagtcagtgcggctgcccctcatggagtgcgtgcagatgaccaaggaagtgcagaaagccatggatgacaagaggtttgacgaggccacccagctccgtggtgggagcttcgagaacaactggaacatttacaagctcctcgcccaccagaagccccccaaggagaagtctaacttctccctggccatcctgaatgtgggggccccggcggctggcatgaatgcggccgtgcgctcggcggtgcggaccggcatctcccatggacacacagtatacgtggtgcacgatggcttcgaaggcctagccaagggtcaggtgcaagaagtaggctggcacgacgtggccggctggttggggcgtggtggctccatgctggggaccaagaggaccctgcccaagggccagctggagtccattgtggagaacatccgcatctatggtattcacgccctgctggtggtcggtgggtttgaggcctatgaaggggtgctgcagctggtggaggctcgcgggcgctacgaggagctctgcatcgtcatgtgtgtcatcccagccaccatcagcaacaacgtccctggcaccgacttcagcctgggctccgacactgctgtaaatgccgccatggagagctgtgacgcgttcaacagcctgctcgggaccagggccgtgtggtctcgtgcgccctgggggtccccggggtcctgccccgcgctgcttgcggtggccgccccctagttcaggactacatctccattaggcgtgggctgggcagcccatcagggcgcgtgcgaacgcgtccggtcgggc

SEQ ID NO: 305962 - DNA, 1965 bp, Homo sapiens
  misc_feature (9)..(9): n is a, c, g, or t
  misc_feature (11)..(12): n is a, c, g, or t
  misc_feature (14)..(14): n is a, c, g, or t
  misc_feature (1812)..(1812): n is a, c, g, or t
  misc_feature (1826)..(1826): n is a, c, g, or t
  misc_feature (1836)..(1836): n is a, c, g, or t
  misc_feature (1949)..(1949): n is a, c, g, or t
caggctagntnngngccggggttaatcggccgaggggcggcgggagtgcgagctgggcccgtgtttcggccgccgccatggccgcggtggacctggagaagctgcgggcgtcgggcgcgggcaaggccatcggcgtcctgaccagcggcggcgacgcgcaaggcatgaacgctgctgtccgggctgtgacgcgcatgggcatttatgtgggtgccaaagtcttcctcatctacgagggctatgagggcctcgtggagggaggtgagaacatcaagcaggccaactggctgagcgtctccaacatcatccagctgggcggcactatcattggcagcgctcgctgcaaggcctttaccaccagggaggggcgccgggcagcggcctacaacctggtccagcacggcatcaccaacctgtgcgtcatcggcggggatggcagccttacaggtgccaacatcttccgcagcgagtggggcagcctgctggaggagctggtggcggaaggtaagatctcagagactacagcccggacctactcgcacctgaacatcgcgggcctagtgggctccatcgataacgacttctgcggcaccgacatgaccatcggcacggactcggccctccaccgcatcatggaggtcatcgatgccatcaccaccactgcccagagccaccagaggaccttcgtgctggaagtgatgggccggcactgcgggtacctggcgctggtatctgcactggcctcaggggccgactggctgttcatccccgaggctccacccgaggacggctgggagaacttcatgtgtgagaggctgggtgagactcggagccgtgggtcccgactgaacatcatcatcatcgctgagggtgccattgaccgcaacgggaagcccatctcgtccagctacgtgaaggacctggtggttcagaggctgggcttcgacacccgtgtaactgtgctgggccacgtgcagcggggagggacgccctctgccttcgaccggatcctgagcagcaagatgggcatggaggcggtgatggcgctgctggaagccacgcctgacacgccggcctgcgtggtcaccctctcggggaaccagtcagtgcggctgcccctcatggagtgcgtgcagatgaccaaggaagtgcagaaagccatggatgacaagaggtttgacgaggccacccagctccgtggtgggagcttcgagaacaactggaacatttacaagctcctcgcccaccagaagccccccaaggagaagtctaacttctccctggccatcctgaatgtgggggccccggcggctggcatgaatgcggccgtgcgctcggcggtgcggaccggcatctcccatggacacacagtatacgtggtgcacgatggcttcgaaggcctagccaagggtcaggtgcaagaagtaggctggcacgacgtggccggctggttggggcgtggtggctccatgctggggaccaagaggaccctgcccaagggccagctggagtccattgtggagaacatccgcatctatggtattcacgccctgctggtggtcggtgggtttgaggcctatgaaggggtgctgcagctggtggaggctcgcgggcgctacgaggagctctgcatcgtcatgtgtgtcatcccagccaccatcagcaacaacgtccctggcaccgacttcagcctgggctccgacactgctgtaaatgccgccatggagtgcgtgcagatgaccaaggaagtgcagaaagccatggatgacaagaggtttgacgaggccacccagctccgtggtgggagcttcnagaacaactggaanatttacaagnctcctcgcccaccaagaaagccccccaaggagaagtctaacttctccctgggcatcctgaattgtgggggccccggcggctgggcatggaatgcggccgtgcgcttcggggtngcggacccggcatctc

SEQ ID NO: 305963 - DNA, 1969 bp, Homo sapiens
  misc_feature (9)..(9): n is a, c, g, or t
  misc_feature (11)..(12): n is a, c, g, or t
  misc_feature (14)..(14): n is a, c, g, or t
caggctagntnngngccggggttaatcggccgaggggcggcgggagtgcgagctgggcccgtgtttcggccgccgccatggccgcggtggacctggagaagctgcgggcgtcgggcgcgggcaaggccatcggcgtcctgaccagcggcggcgacgcgcaaggcatgaacgctgctgtccgggctgtgacgcgcatgggcatttatgtgggtgccaaagtcttcctcatctacgagggctatgagggcctcgtggagggaggtgagaacatcaagcaggccaactggctgagcgtctccaacatcatccagctgggcggcactatcattggcagcgctcgctgcaaggcctttaccaccagggaggggcgccgggcagcggcctacaacctggtccagcacggcatcaccaacctgtgcgtcatcggcggggatggcagccttacaggtgccaacatcttccgcagcgagtggggcagcctgctggaggagctggtggcggaaggtaagatctcagagactacagcccggacctactcgcacctgaacatcgcgggcctagtgggctccatcgataacgacttctgcggcaccgacatgaccatcggcacggactcggccctccaccgcatcatggaggtcatcgatgccatcaccaccactgcccagagccaccagaggaccttcgtgctggaagtgatgggccggcactgcgggtacctggcgctggtatctgcactggcctcaggggccgactggctgttcatccccgaggctccacccgaggacggctgggagaacttcatgtgtgagaggctgggtgagactcggagccgtgggtcccgactgaacatcatcatcatcgctgagggtgccattgaccgcaacgggaagcccatctcgtccagctacgtgaaggacctggtggttcagaggctgggcttcgacacccgtgtaactgtgctgggccacgtgcagcggggagggacgccctctgccttcgaccggatcctgagcagcaagatgggcatggaggcggtgatggcgctgctggaagccacgcctgacacgccggcctgcgtggtcaccctctcggggaaccagtcagtgcggctgcccctcatggagtgcgtgcagatgaccaaggaagtgcagaaagccatggatgacaagaggtttgacgaggccacccagctccgtggtgggagcttcgagaacaactggaacatttacaagctcctcgcccaccagaagccccccaaggagaagtctaacttctccctggccatcctgaatgtgggggccccggcggctggcatgaatgcggccgtgcgctcggcggtgcggaccggcatctcccatggacacacagtatacgtggtgcacgatggcttcgaaggcctagccaagggtcaggtgcaagaagtaggctggcacgacgtggccggctggttggggcgtggtggctccatgctggggaccaagaggaccctgcccaagggccagctggagtccattgtggagaacatccgcatctatggtattcacgccctgctggtggtcggtgggtttgaggcctatgaaggggtgctgcagctggtggaggctcgcgggcgctacgaggagctctgcatcgtcatgtgtgtcatcccagccaccatcagcaacaacgtccctggcaccgacttcagcctgggctccgacactgctgtaaatgccgccatggaggtacggggctcctggacaccggcctgccatgcccaggcccttgtggggtggggctgagctacggaggctgctggaggggatagtgtgtggtgagcacctgggagggctgccagggttggggtttgtggggcacaggcccgggtgaaggggctcagctccctgccatagccacttccaggtccaggggggccctgcgttgttcctcgctactgtgatgagctcagatggggagactgaggcgg

SEQ ID NO: 305964 - DNA, 1368 bp, Homo sapiens
  misc_feature (9)..(9): n is a, c, g, or t
  misc_feature (11)..(12): n is a, c, g, or t
  misc_feature (14)..(14): n is a, c, g, or t
caggctagntnngngccggggttaatcggccgaggggcggcgggagtgcgagctgggcccgtgtttcggccgccgccatggccgcggtggacctggagaagctgcgggcgtcgggcgcgggcaaggccatcggcgtcctgaccagcggcggcgacgcgcaaggcatgaacgctgctgtccgggctgtgacgcgcatgggcatttatgtgggtgccaaagtcttcctcatctacgagggctatgagggcctcgtggagggaggtgagaacatcaagcaggccaactggctgagcgtctccaacatcatccagctgggcggcactatcattggcagcgctcgctgcaaggcctttaccaccagggaggggcgccgggcagcggcctacaacctggtccagcacggcatcaccaacctgtgcgtcatcggcggggatggcagccttacaggtgccaacatcttccgcagcgagtggggcagcctgctggaggagctggtggcggaaggtaagatctcagagactacagcccggacctactcgcacctgaacatcgcgggcctagtgggctccatcgataacgacttctgcggcaccgacatgaccagacgggtgttcgccaatgccccagactcggcctgcgtgatcggcctgaagaagaaggcggtggccttcagccccgtcactgagctcaagaaagacactgatttcgagcaccgcatgccacgggagcagtggtggctgagcctgcggctcatgctgaagatgctggcacaataccgcatcagtatggccgcctacgtgtcaggggagctggagcacgtgacccgccgcaccctgagcatggacaagggcttctgaggccagccatgcccacgcccctccccagcccccacccatgccagcgcagcgccagggctcagatggggcctgggctgttgtgtctggagcctgcaggcaggtgggggctgcgtccctgctcagcccatcccctgcctctatccctggccacctgccaggcctccctccggctggtgtcttgagaccagcctgccaggccctccagcaggaggacagagtgccctggggcatccaccttcctgcccaggggacgtggcgctgtcggtgtttggaggctgctgccccctggctttggcgccccatgggccctcagcgtctccccatgctgggctcactacatgggccagcccttgctctacctggccggtaggctgctggcgcctaggttgtgttgagagggggatgcccctggccctgcctcactgtgacctgctcctgcccacgtgcagcacctgtcaccttttctagaaataaaatcaccctgactgtggggtgcatcggtctccggaga

SEQ ID NO: 305965 - DNA, 1150 bp, Homo sapiens
  misc_feature (9)..(9): n is a, c, g, or t
  misc_feature (11)..(12): n is a, c, g, or t
  misc_feature (14)..(14): n is a, c, g, or t
  misc_feature (921)..(921): n is a, c, g, or t
caggctagntnngngccggggttaatcggccgaggggcggcgggagtgcgagctgggcccgtgtttcggccgccgccatggccgcggtggacctggagaagctgcgggcgtcgggcgcgggcaaggccatcggcgtcctgaccagcggcggcgacgcgcaaggcatgaacgctgctgtccgggctgtgacgcgcatgggcatttatgtgggtgccaaagtcttcctcatctacgagggctatgagggcctcgtggagggaggtgagaacatcaagcaggccaactggctgagcgtctccaacatcatccagctgggcggcactatcattggcagcgctcgctgcaaggcctttaccaccagggaggggcgccgggcagcggcctacaacctggtccagcacggcatcaccaacctgtgcgtcatcggcggggatggcagccttacaggtgccaacatcttccgcagcgagtggggcagcctgctggaggagctggtggcggaaggtaagatctcagagactacagcccggacctactcgcacctgaacatcgcgggcctagtgggctccatcgataacgacttctgcggcaccgacatgaccatcggcacggactcggccctccaccgcatcatggaggtcatcgatgccatcaccaccactgcccagagccaccagaggaccttcgtgctggaagtgatgggccggcactgcgggtacctggcgctggtatctgcactggcctcaggggccgactggctgttcatccccgaggctccacccgaggacggctgggagaacttcatgtgtgagaggctgggtgagactcggagccgtgggtcccgactgaacatcatcatcatcgctgagggtgccattgaccgcaacgggaagcccatctcgtccagctacgtgaaggacnggggtccgacggcggggattaaaaccggggaaaggggcggggccgctgcaacggggaggacagccactgacttggaagggccggaagcaacaggcattagggcataagcgctgttgaaccacctcgcaccgctaggtgcacatcgaggaaaaagagggcgcacgagggaagaagcaagaagaaaggacacggaggacacacgggacaccaggagcaccaacgagatgtg

SEQ ID NO: 305966 - DNA, 839 bp, Homo sapiens
  misc_feature (9)..(9): n is a, c, g, or t
  misc_feature (11)..(12): n is a, c, g, or t
  misc_feature (14)..(14): n is a, c, g, or t
caggctagntnngngccggggttaatcggccgaggggcggcgggagtgcgagctgggcccgtgtttcggccgccgccatggccgcggtggacctggagaagctgcgggcgtcgggcgcgggcaaggccatcggcgtcctgaccagcggcggcgacgcgcaaggcatgaacgctgctgtccgggctgtgacgcgcatgggcatttatgtgggtgccaaagtcttcctcatctacgagggctatgagggcctcgtggagggaggtgagaacatcaagcaggccaactggctgagcgtctccaacatcatccagctgggcggcactatcattggcagcgctcgctgcaagcctccccagcccccacccatgccagcgcagcgccagggctcagatggggcctgggctgttgtgtctggagcctgcaggcaggtgggggctgcgtccctgctcagcccatcccctgcctctatccctggccacctgccaggcctccctccggctggtgtcttgagaccagcctgccaggccctccagcaggaggacagagtgccctggggcatccaccttcctgcccaggggacgtggcgctgtcggtgtttggaggctgctgccccctggctttggcgccccatgggccctcagcgtctccccatgctgggctcactacatgggccagcccttgctctacctggccggtaggctgctggcgcctaggttgtgttgagagggggatgcccctggccctgcctcactgtgacctgctcctgcccacgtgcagcacctgtcaccttttctagaaataaaatcaccctgactgtggggtgcatcggtctccggaga

SEQ ID NO: 305967 - DNA, 487 bp, Homo sapiens
cgagctcggtaccccccgactagcccgccagggctcagatggggcctgggctgttgtgtctggagcctgcaggcaggtgggggctgcgtccctgctcagcccatcccctgcctctatccctggccacctgccaggcctccctccggctggtgtcttgagaccagcctgccaggccctccagcaggaggacagagtgccctggggcatccaccttcctgcccaggggacgtggcgctgtcggtgtttggaggctgctgccccctggctttggcgccccatgggccctcagcgtctccccatgctgggctcactacatgggccagcccttgctctacctggccggtaggctgctggcgcctaggttgtgttgagagggggatgcccctggccctgcctcactgtgacctgctcctgcccacgtgcagcacctgtcaccttttctagaaataaaatcaccctgactgtggggtgcatcggtctccggaga

SEQ ID NO: 305968 - DNA, 686 bp, Homo sapiens
  misc_feature (9)..(9): n is a, c, g, or t
  misc_feature (11)..(12): n is a, c, g, or t
  misc_feature (14)..(14): n is a, c, g, or t
caggctagntnngngccggggttaatcggccgaggggcggcgggagtgcgagctgggcccgtgtttcggccgccgccatggccgcggtggacctggagaagctgcgggcgtcgggcgcgggcaaggccatcggcgtcctgaccagcggcggcgacgcgcaaggcatgaacgctgctgtccgggctgtgacgcgcatgggcatttatgtgggtgccaaagtcttcctcatctacgagggctatgagggcctcgtggagggaggtgagaacatcaagcaggccaactggctgagcgtctccaacatcatccagctgggcggcactatcattggcagcgctcgctgcaaggcctttaccaccagggaggggcgccgggcagcggcctacaacctggtccagcacggcatcaccaacctgtgcgtcatcggcggggatggcagccttacaggtgccaacatcttccgcagcgagtggggcagcctgctggaggagctggtggcggaaggtaagatctcagagactacagcccggacctactcgcacctgaacatcgcgggcctagtgggctccatcgataacgacttctgcggcaccgacatgaccaaccaccaaagtggtgttggtggtgatgatcaggacaccagtaattaccttagttagcttgtaccagcaccttggagtttctca

SEQ ID NO: 305969 - DNA, 947 bp, Homo sapiens
  misc_feature (9)..(9): n is a, c, g, or t
  misc_feature (11)..(12): n is a, c, g, or t
  misc_feature (14)..(14): n is a, c, g, or t
caggctagntnngngccggggttaatcggccgaggggcggcgggagtgcgagctgggcccgtgtttcggccgccgccatggccgcggtggacctggagaagctgcgggcgtcgggcgcgggcaaggccatcggcgtcctgaccagcggcggcgacgcgcaaggtcccctgacaagcccaccaggccccctgctgagatggctgtgaccctgggctgacccgcccagtggcacattgactccgcctggagctggggagaccagagaggccctgtggttggacggtggcctgggtgcgctgctcctgccctctccttgccctgcctcagctgctgcctgccagaggcgtggcacctcacctcacacctgctccctgctgctgagccccacgccaagctggagagcggatgagaagcatgtgtaaccagggtagaggtcgagagtcctctcgtgggggtctccatgttcaagggagctgccgaggcttgagcaggagcccccagcaggaaactggctttgccaaggcccccgctgggacagactgtttctttcactgcagtcctgggagccgagggcaaggggacaggaaagaggaagtgacctcagagcctggtggcaccagcatcatgtccaggctggggggcatgaacgctgctgtccgggctgtgacgcgcatgggcatttatgtgggtgccaaagtcttcctcatctacgagggctatgagggcctcgtggagggaggtgagaacatcaagcaggccaactggctgagcgtctccaacatcatccagctggtgaggcctgggaacgcggatgcatgttgcacttggactcgcagacagacacacagagacagacctgcacacacagacacacacacagagacagacacgtgcacaaacacacacatgcagacacacagacatgcacacagacgcacacacacaca

SEQ ID NO: 305970 - DNA, 720 bp, Homo sapiens
gccagggcggctttcctgggagctgccactccctctcccaggcctggcccagcggggactcaggatcggggggagacctgaactcgttcccgccgactcaggccctgctgcccctctcaggaacgagaagtgccatgactactacaccacggagttcctgtacaacctgtactcatcagagggcaagggcgtcttcgactgcaggaccaatgtcctgggccacctgcagcaggtgtggggcaggggtgaggctctgagaggcctgcccctctttcctgccaccatctgtccccggccccaggggtcccagccctcacgggcacccacgggcactcccggcaggccctcgggcacgtgtgcccttccccagtgaggggaccgaggcctgtatctaggtgaggtctcatttcaagaaggggtggggctggggctggagccggggcccgagccagggcattcacatgctgagccgagctccccacccctgccaggcctcccgcggccacttccgccgaacccctcacctagatccccgcatgctccctgccttatggtggccctgcaggaagcccgcgtcctggggttttctgagccagggaggggagtcagggtggctgggcatggggcccgaggtgatggggcccgaggtggggccgctggctgccgatgcagggcccaggagtcacttgacttggccaggggcagccgactgccggcctc

SEQ ID NO: 305971 - DNA, 4024 bp, Homo sapiens
  misc_feature (8)..(8): n is a, c, g, or t
ggaacggngccctgcagctgcccagggagcccggagactcagcccagttcaccaaggcgctggccatcatcctccacctgctctacctgctggagaaagtggagtgcacccccagccaggagcacctgaagcaccagaccgtctaccgcctgctcaagtgcgcgcccaggggcaagaacggcttcaccccttgtccacagcctaagatggcggcgagggggacggtgaaggttgcctcccgcccgtccgggctctgatcctccgtctccccgtcccccggcggccggcccatggcctggcggaggcccgaaccatggacctccgcaccgccgtgtacaacgccgcccgtgatggcaagctgcagctgctccagaagctgctcagcggccggagccgggaggaactggacgagctgacgggcgaggtggccggcgggggaacgccgctactcatcgccgcccgctacggccacctggacgtggtggagtacctggtggaccggtgcggcgcgagcgtggaggccggtggctcggtgcacttcgatggcgagaccatcgagggcgcgccgccgctgtgggccgcctccgcagccggccacctggacgtggtgcggagcctgctgcgccgcggggcctcggtgaaccgcaccacgcgcaccaactccacgcctctccgcgccgcctgcttcgacggccacctggaggtggtgcgctacctggtcggcgagcaccaggccgacctggaggtggccaaccggcacggccacacgtgcctcatgatctcgtgctacaagggccaccgtgagatcgcccgctacctgctggagcagggcgcccaggtgaaccggcgcagcgccaagggcaacacggccctgcatgactgcgccgagtccggcagcctggagatcctgcagctgctgctggggtgcaaggcccgcatggaacgtgacggctacggcatgaccccgctgctcgcggccagcgtgacgggccacaccaacatcgtggagtacctcatccaggagcagcccggccaggagcaggtcgcagggggagaggctcagcctgggctgccccaagaagacccctccaccagccaggggtgtgcgcagcctcagggggctccgtgctgcagctcctccccagaggaaccactgaacggggaatcttacgaaagctgctgtcccaccagccgggaagctgccgtggaagccttggaattgctgggagctacgtatgtggataagaaacgagatctgcttggggcccttaaacactggaggcgggccatggagctgcgtcaccaggggggcgagtacctgcccaaaccggagcccccacagctggtcctggcctatgactattccagggaggtcaacaccaccgaggagctggaggcgctgatcaccgacccggatgagatgcgcatgcaggccctgttgatccgggagcgcatcctcggtccctcgcacccggacacttcctattacatccgttacaggggtgccgtgtacgccgactcgggcaatttcgagcgctgcatccgcttgtggaagtacgccctggacatgcaacagagcaacctggagcctctgagccccatgaccgccagcagcttcctctccttcgcggaactcttctcctacgtgcttcaggaccgggccgccaaaggcagcctgggcacccagatcggctttgcagacctcatgggggttctcaccaaaggggtccgggaagtggaacgggccctgcagctgcccagggagcccggagactcagcccagttcaccaaggcgctggccatcatcctccacctgctctacctgctggagaaagtggagtgcacccccagccaggagcacctgaagcaccagaccgtctaccgcctgctcaagtgcgcgcccaggggcaagaacggcttcacccctctgcacatggctgtggacaaggacaccacaaacgtgggccgctatcccgtgggcagattcccctccctgcacgtggtcaaagtgctgctcgactgcggggccgacccggacagcagggattttgacaacaacaccccgctacacatagcagcccagaacaactgcccggccatcatgaatgccctgatcgaagcaggggcccacatggacgccaccaatgccttcaagaagacggcctacgagctgctggacgagaagctgctggccaggggtaccatgcagcccttcaactacgtgaccctgcagtgccttgcggcccgggccctggataagaacaagatcccttacaagggcttcatcccggaagatctggaggcgttcatcgaactgcactgacctgcccagaacgcctgcaccctcacctctcccctctcctgctgagatgggggaaatccggctgcggcatagcagatgctcgttcttgcctccttcaggcaccaatcaggagaagggttctgcctcccatcccctctacctgcagacagggtcggaggtgttagcgagcctttggtgctagaagcctgcggggtcatgtgctaagaggacagtctttctccgggagcccgctcactcattctgagttaggaaaagacacaagaccttccccacatcctgtctgcctgggttagggaggcctttgccttgttacctagaggcggagggactgaagccattgcgttccttccctgctagaaacacaggaagaagttgaggacggtctgccttccctcgtccctttacctggccagataactccagccgctgaatacagtgttaggactgggggctcctgagatgagagtttgagattcagggaatgagaccacctctcatttcttccagcatgatcgcgccctgctcccgtgccaccgtagtccctggcagacaggcagggctctgcccagggcagcctgccacttgcatagctttcggttggtttggtgttctgtttatttaataagtgggcaggttgcaagcgttgcacagaaattctgagattttactgccttttttttttttttttaagaaagttgtttgttggactccataagtgaatttcaagcagtgaggattttgtggtgcctgagatggccgagggcacagggagtgagctgtatgtgtgaggaatttggtgagcgagataaaagtccacggtgtcaacccctaaaacatgggtgaccgtacatttttatacatctccactctacggccttttacaggctttccgattttacaggcctttccaagtttccattctccttagagagagaactgtgcttccaaacagaaatcaggagtgaccacaaagcctgaaaacactttgccacccagcaaagaactggcacaattggtttgggtctgcattgccatagtgcccgagttaaaactgcaggccactctgccttgcaaacctcacgtggcctctgatttcattgtgggtgcatccacaggtggcccgagctgttctttcagctgctccaaggattgagacccaagtcatcatgaaaaaggcccaagtacagtcttaatgcgataaatccactagctaagacgtcgagtgccaagaccagccttccagccgaggtttggacaaagtctcaggttcccgtgactcagggtaaggtgctggggctgccagaggacctgccccagcaagatttttgtcaagagcgagactccatcagcccaggcagacgggagcaggttcttggccagcgtagacagcagcaaacagcagcagggaagccattctcactgcatcctccctgcagtagccacggccaggcccttaggaggagcagtgaccgggggtgtccagaaatatcctgtccctggatggaaactaggtctcgtttggattttttttttttttttgccgtgttaggaaattatttattaatttacaagacaggttttaactcagccgaggtgggaaatggtgtccctgtccctcccaaagcacagagcacagaaatgaggccgtttacatggcgagtctccgtgctggtgtttaagtcattaaaaagatactcaaag

SEQ ID NO: 305972 - DNA, 3966 bp, Homo sapiens
  misc_feature (8)..(8): n is a, c, g, or t
ggaacggngccctgcagctgcccagggagcccggagactcagcccagttcaccaaggcgctggccatcatcctccacctgctctacctgctggagaaagtggagtgcacccccagccaggagcacctgaagcaccagaccgtctaccgcctgctcaagtgcgcgcccaggggcaagaacggcttcaccccttgtccacagcctaagatggcggcgagggggacggtgaaggttgcctcccgcccgtccgggctctgatcctccgtctccccgtcccccggcggccggcccatggcctggcggaggcccgaaccatggacctccgcaccgccgtgtacaacgccgcccgtgatggcaagctgcagctgctccagaagctgctcagcggccggagccgggaggaactggacgagctgacgggcgaggtggccggcgggggaacgccgctactcatcgccgcccgctacggccacctggacgtggtggagtacctggtggaccggtgcggcgcgagcgtggaggccggtggctcggtgcacttcgatggcgagaccatcgagggcgcgccgccgctgtgggccgcctccgcagccggccacctggacgtggtgcggagcctgctgcgccgcggggcctcggtgaaccgcaccacgcgcaccaactccacgcctctccgcgccgcctgcttcgacggccacctggaggtggtgcgctacctggtcggcgagcaccaggccgacctggaggtggccaaccggcacggccacacgtgcctcatgatctcgtgctacaagggccaccgtgagatcgcccgctacctgctggagcagggcgcccaggtgaaccggcgcagcgccaagggcaacacggccctgcatgactgcgccgagtccggcagcctggagatcctgcagctgctgctggggtgcaaggcccgcatggaacgtgacggctacggcatgaccccgctgctcgcggccagcgtgacgggccacaccaacatcgtggagtacctcatccaggagcagcccggccaggagcaggtcgcagggggagaggctcagcctgggctgccccaagaagacccctccaccagccaggggtgtgcgcagcctcagggggctccgtgctgcagctcctccccagaggaaccactgaacggggaatcttacgaaagctgctgtcccaccagccgggaagctgccgtggaagccttggaattgctgggagctacgtatgtggataagaaacgagatctgcttggggcccttaaacactggaggcgggccatggagctgcgtcaccaggggggcgagtacctgcccaaaccggagcccccacagctggtcctggcctatgactattccagggaggtcaacaccaccgaggagctggaggcgctgatcaccgacccggatgagatgcgcatgcaggccctgttgatccgggagcgcatcctcggtccctcgcacccggacacttcctattacatccgttacaggggtgccgtgtacgccgactcgggcaatttcgagcgctgcatccgcttgtggaagtacgccctggacatgcaacagagcaacctggagcctctgagccccatgaccgccagcagcttcctctccttcgcggaactcttctcctacgtgcttcaggaccgggccgccaaaggcagcctgggcacccagatcggctttgcagacctcatgggggttctcaccaaaggggtccgggaagtggaacgggccctgcagctgcccagggagcccggagactcagcccagttcaccaaggcgctggccatcatcctccacctgctctacctgctggagaaagtggagtgcacccccagccaggagcacctgaagcaccagaccgtctaccgcctgctcaagtgcgcgcccaggggcaagaacggcttcacccctctgcacatggctgtggacaaggacaccacaaacgtgggccgctatcccgtgggcagattcccctccctgcacgtggtcaaagtgctgctcgactgcggggccgacccggacagcagggattttgacaacaacaccccgctacacatagcagcccagaacaactgcccggccatcatgaatgccctgatcgaagcaggggcccacatggacgccaccaatgccttcaagaagacggcctacgagctgctggacgagaagctgctggccaggggtaccatgcagcccttcaactacgtgaccctgcagtgccttgcggcccgggccctggataagaacaagatcccttacaagggcttcatcccggaagatctggaggcgttcatcgaactgcactgacctgcccagaacgcctgcaccctcacctctcccctctcctgctgagatgggggaaatccggctgcctcccatcccctctacctgcagacagggtcggaggtgttagcgagcctttggtgctagaagcctgcggggtcatgtgctaagaggacagtctttctccgggagcccgctcactcattctgagttaggaaaagacacaagaccttccccacatcctgtctgcctgggttagggaggcctttgccttgttacctagaggcggagggactgaagccattgcgttccttccctgctagaaacacaggaagaagttgaggacggtctgccttccctcgtccctttacctggccagataactccagccgctgaatacagtgttaggactgggggctcctgagatgagagtttgagattcagggaatgagaccacctctcatttcttccagcatgatcgcgccctgctcccgtgccaccgtagtccctggcagacaggcagggctctgcccagggcagcctgccacttgcatagctttcggttggtttggtgttctgtttatttaataagtgggcaggttgcaagcgttgcacagaaattctgagattttactgccttttttttttttttttaagaaagttgtttgttggactccataagtgaatttcaagcagtgaggattttgtggtgcctgagatggccgagggcacagggagtgagctgtatgtgtgaggaatttggtgagcgagataaaagtccacggtgtcaacccctaaaacatgggtgaccgtacatttttatacatctccactctacggccttttacaggctttccgattttacaggcctttccaagtttccattctccttagagagagaactgtgcttccaaacagaaatcaggagtgaccacaaagcctgaaaacactttgccacccagcaaagaactggcacaattggtttgggtctgcattgccatagtgcccgagttaaaactgcaggccactctgccttgcaaacctcacgtggcctctgatttcattgtgggtgcatccacaggtggcccgagctgttctttcagctgctccaaggattgagacccaagtcatcatgaaaaaggcccaagtacagtcttaatgcgataaatccactagctaagacgtcgagtgccaagaccagccttccagccgaggtttggacaaagtctcaggttcccgtgactcagggtaaggtgctggggctgccagaggacctgccccagcaagatttttgtcaagagcgagactccatcagcccaggcagacgggagcaggttcttggccagcgtagacagcagcaaacagcagcagggaagccattctcactgcatcctccctgcagtagccacggccaggcccttaggaggagcagtgaccgggggtgtccagaaatatcctgtccctggatggaaactaggtctcgtttggattttttttttttttttgccgtgttaggaaattatttattaatttacaagacaggttttaactcagccgaggtgggaaatggtgtccctgtccctcccaaagcacagagcacagaaatgaggccgtttacatggcgagtctccgtgctggtgtttaagtcattaaaaagatactcaaag

SEQ ID NO: 305973 - DNA, 1184 bp, Homo sapiens
  misc_feature (12)..(12): n is a, c, g, or t
ttctagctcggnacccatcctccctctctcacgcaggcagggctctgcccagggcagcctgccacttgcatagctttcggttggtttggtgttctgtttatttaataagtgggcaggttgcaagcgttgcacagaaattctgagattttactgccttttttttttttttttaagaaagttgtttgttggactccataagtgaatttcaagcagtgaggattttgtggtgcctgagatggccgagggcacagggagtgagctgtatgtgtgaggaatttggtgagcgagataaaagtccacggtgtcaacccctaaaacatgggtgaccgtacatttttatacatctccactctacggccttttacaggctttccgattttacaggcctttccaagtttccattctccttagagagagaactgtgcttccaaacagaaatcaggagtgaccacaaagcctgaaaacactttgccacccagcaaagaactggcacaattggtttgggtctgcattgccatagtgcccgagttaaaactgcaggccactctgccttgcaaacctcacgtggcctctgatttcattgtgggtgcatccacaggtggcccgagctgttctttcagctgctccaaggattgagacccaagtcatcatgaaaaaggcccaagtacagtcttaatgcgataaatccactagctaagacgtcgagtgccaagaccagccttccagccgaggtttggacaaagtctcaggttcccgtgactcagggtaaggtgctggggctgccagaggacctgccccagcaagatttttgtcaagagcgagactccatcagcccaggcagacgggagcaggttcttggccagcgtagacagcagcaaacagcagcagggaagccattctcactgcatcctccctgcagtagccacggccaggcccttaggaggagcagtgaccgggggtgtccagaaatatcctgtccctggatggaaactaggtctcgtttggattttttttttttttttgccgtgttaggaaattatttattaatttacaagacaggttttaactcagccgaggtgggaaatggtgtccctgtccctcccaaagcacagagcacagaaatgaggccgtttacatggcgagtctccgtgctggtgtttaagtcattaaaaagatactcaaag

SEQ ID NO: 305974 - DNA, 3849 bp, Homo sapiens
  misc_feature (8)..(8): n is a, c, g, or t
ggaacggngccctgcagctgcccagggagcccggagactcagcccagttcaccaaggcgctggccatcatcctccacctgctctacctgctggagaaagtggagtgcacccccagccaggagcacctgaagcaccagaccgtctaccgcctgctcaagtgcgcgcccaggggcaagaacggcttcaccccttgtccacagcctaagatggcggcgagggggacggtgaaggttgcctcccgcccgtccgggctctgatcctccgtctccccgtcccccggcggccggcccatggcctggcggaggcccgaaccatggacctccgcaccgccgtgtacaacgccgcccgtgatggcaagctgcagctgctccagaagctgctcagcggccggagccgggaggaactggacgagctgacgggcgaggtggccggcgggggaacgccgctactcatcgccgcccgctacggccacctggacgtggtggagtacctggtggaccggtgcggcgcgagcgtggaggccggtggctcggtgcacttcgatggcgagaccatcgagggcgcgccgccgctgtgggccgcctccgcagccggccacctggacgtggtgcggagcctgctgcgccgcggggcctcggtgaaccgcaccacgcgcaccaactccacgcctctccgcgccgcctgcttcgacggccacctggaggtggtgcgctacctggtcggcgagcaccaggccgacctggaggtggccaaccggcacggccacacgtgcctcatgatctcgtgctacaagggccaccgtgagatcgcccgctacctgctggagcagggcgcccaggtgaaccggcgcagcgccaagggcaacacggccctgcatgactgcgccgagtccggcagcctggagatcctgcagctgctgctggggtgcaaggcccgcatggaacgtgacggctacggcatgaccccgctgctcgcggccagcgtgacgggccacaccaacatcgtggagtacctcatccaggagcagcccggccaggagcaggtcgcagggggagaggctcagcctgggctgccccaagaagacccctccaccagccaggggtgtgcgcagcctcagggggctccgtgctgcagctcctccccagaggaaccactgaacggggaatcttacgaaagctgctgtcccaccagccgggaagctgccgtggaagccttggaattgctgggagctacgtatgtggataagaaacgagatctgcttggggcccttaaacactggaggcgggccatggagctgcgtcaccaggggggcgagtacctgcccaaaccggagcccccacagctggtcctggcctatgactattccagggaggtcaacaccaccgaggagctggaggcgctgatcaccgacccggatgagatgcgcatgcaggccctgttgatccgggagcgcatcctcggtccctcgcacccggacacttcctattacatccgttacaggggtgccgtgtacgccgactcgggcaatttcgagcgctgcatccgcttgtggaagtacgccctggacatgcaacagagcaacctggagcctctgagccccatgaccgccagcagcttcctctccttcgcggaactcttctcctacgtgcttcaggaccgggccgccaaaggcagcctgggcacccagatcggctttgcagacctcatgggggttctcaccaaaggggtccgggaagtggaacgggccctgcagctgcccagggagcccggagactcagcccagttcaccaaggcgctggccatcatcctccacctgctctacctgctggagaaagtggagtgcacccccagccaggagcacctgaagcaccagaccgtctaccgcctgctcaagtgcgcgcccaggggcaagaacggcttcacccctctgcacatggctgtggacaaggacaccacaaacgtgggccgctatcccgtgggcagattcccctccctgcacgtggtcaaagtgctgctcgactgcggggccgacccggacagcagggattttgacaacaacaccccgctacacatagcagcccagaacaactgcccggccatcatgaatgccctgatcgaagcaggggcccacatggacgccaccaatgccttcaagaagacggcctacgagctgctggacgagaagctgctggccaggggtaccatgcagcccttcaactacgtgaccctgcagtgccttgcggcccgggccctggataagaacaagatcccttacaagggcttcatcccggaagatctggaggcgttcatcgaactgcactgacctgcccagaacgcctgcaccctcacctctcccctctcctgctgagatgggggaaatccggctgcggcatagcagatgctcgttcttgcctccttcaggcaccaatcaggagaagggttctgcctcccatcccctctacctgcagacagggtcggaggtgttagcgagcctttggtgctagaagcctgcggggtcatgtgctaagaggacagtctttctccgggagcccgctcactcattctgagttaggaaaagacacaagaccttccccacatcctgtctgcctgggttagggaggcctttgccttgttacctagaggcggagggactgaagccattgcgttccttccctgctagaaacacaggaagaagttgaggacggtctgccttccctcgtccctttacctggccagataactccagccgctgaatacagtgttaggactgggggctcctgagatgagagtttgagattcagggaatgagaccacctctcatttcttccagcatgatcgcgccctgctcccgtgccaccgtagtccctggcagacaggcagggctctgcccagggcagcctgccacttgcatagctttcggttggtttggtgttctgtttatttaataagtgggcaggttgcaagcgttgcacagaaattctgagattttactgccttttttttttttttttaagaaagttgtttgttggactccataagtgaatttcaagcagtgaggattttgtggtgcctgagatggccgagggcacagggagtgagctgtatgtgtgaggaatttggtgagcgagataaaagtccacggtgtcaacccctaaaacatgggtgaccgtacatttttatacatctccactctacggccttttacaggctttccgattttacaggcctttccaagtttccattctccttagagagagaactgtgcttccaaacagaaatcaggagtgaccacaaagcctgaaaacactttgccacccagcaaagaactggcacaattggtttgggtctgcattgccatagtgcccgagttaaaactgcaggccactctgccttgcaaacctcacgtggcctctgatttcattgtgggtgcatccacaggtggcccgagctgttctttcagctgctccaaggattgagacccaagtcatcatgaaaaaggcccaagtacagtcttaatgcgataaatccactagctaagacgtcgagtgccaagaccagccattctcactgcatcctccctgcagtagccacggccaggcccttaggaggagcagtgaccgggggtgtccagaaatatcctgtccctggatggaaactaggtctcgtttggattttttttttttttttgccgtgttaggaaattatttattaatttacaagacaggttttaactcagccgaggtgggaaatggtgtccctgtccctcccaaagcacagagcacagaaatgaggccgtttacatggcgagtctccgtgctggtgtttaagtcattaaaaagatactcaaag

SEQ ID NO: 305975 - DNA, 3153 bp, Homo sapiens
  misc_feature (8)..(8): n is a, c, g, or t
ggaacggngccctgcagctgcccagggagcccggagactcagcccagttcaccaaggcgctggccatcatcctccacctgctctacctgctggagaaagtggagtgcacccccagccaggagcacctgaagcaccagaccgtctaccgcctgctcaagtgcgcgcccaggggcaagaacggcttcaccccttgtccacagcctaagatggcggcgagggggacggtgaaggttgcctcccgcccgtccgggctctgatcctccgtctccccgtcccccggcggccggcccatggcctggcggaggcccgaaccatggacctccgcaccgccgtgtacaacgccgcccgtgatggcaagctgcagctgctccagaagctgctcagcggccggagccgggaggaactggacgagctgacgggcgaggtggccggcgggggaacgccgctactcatcgccgcccgctacggccacctggacgtggtggagtacctggtggaccggtgcggcgcgagcgtggaggccggtggctcggtgcacttcgatggcgagaccatcgagggcgcgccgccgctgtgggccgcctccgcagccggccacctggacgtggtgcggagcctgctgcgccgcggggcctcggtgaaccgcaccacgcgcaccaactccacgcctctccgcgccgcctgcttcgacggccacctggaggtggtgcgctacctggtcggcgagcaccaggccgacctggaggtggccaaccggcacggccacacgtgcctcatgatctcgtgctacaagggccaccgtgagatcgcccgctacctgctggagcagggcgcccaggtgaaccggcgcagcgccaagggcaacacggccctgcatgactgcgccgagtccggcagcctggagatcctgcagctgctgctggggtgcaaggcccgcatggaacgtgacggctacggcatgaccccgctgctcgcggccagcgtgacgggccacaccaacatcgtggagtacctcatccaggagcagcccggccaggagcaggtcgcagggggagaggctcagcctgggctgccccaagaagacccctccaccagccaggggtgtgcgcagcctcagggggctccgtgctgcagctcctccccagaggaaccactgaacggggaatcttacgaaagctgctgtcccaccagccgggaagctgccgtggaagccttggaattgctgggagctacgtatgtggataagaaacgagatctgcttggggcccttaaacactggaggcgggccatggagctgcgtcaccaggggggcgagtacctgcccaaaccggagcccccacagctggtcctggcctatgactattccagggaggtcaacaccaccgaggagctggaggcgctgatcaccgacccggatgagatgcgcatgcaggccctgttgatccgggagcgcatcctcggtccctcgcacccggacacttcctattacatccgttacaggggtgccgtgtacgccgactcgggcaatttcgagcgctgcatccgcttgtggaagtacgccctggacatgcaacagagcaacctggagcctctgagccccatgaccgccagcagcttcctctccttcgcggaactcttctcctacgtgcttcaggaccgggccgccaaaggcagcctgggcacccagatcggctttgcagacctcatgggggttctcaccaaaggggtccgggaagtggaacgggccctgcagctgcccagggagcccggagactcagcccagttcaccaaggcgctggccatcatcctccacctgctctacctgctggagaaagtggagtgcacccccagccaggagcacctgaagcaccagaccgtctaccgcctgctcaagtgcgcgcccaggggcaagaacggcttcacccctctgcacatggctgtggacaaggacaccacaaacgtgggccgctatcccgtgggcagattcccctccctgcacgtggtcaaagtgctgctcgactgcggggccgacccggacagcagggattttgacaacaacaccccgctacacatagcagcccagaacaactgcccggccatcatgaatgccctgatcgaagcaggggcccacatggacgccaccaatgccttcaagaagacggcctacgagctgctggacgagaagctgctggccaggggtaccatgcagcccttcaactacgtgaccctgcagtgccttgcggcccgggccctggataagaacaagatcccttacaagggcttcatcccggaagatctggaggcgttcatcgaactgcactgacctgcccagaacgcctgcaccctcacctctcccctctcctgctgagatgggggaaatccggctgcggcatagcagatgctcgttcttgcctccttcaggcaccaatcaggagaagggttctgcctcccatcccctctacctgcagacagggtcggaggtgttagcgagcctttggtgctagaagcctgcggggtcatgtgctaagaggacagtctttctccgggagcccgctcactcattctgagttaggaaaagacacaagaccttccccacatcctgtctgcctgggttagggaggcctttgccttgttacctagaggcggagggactgaagccattgcgttccttccctgctagaaacacaggaagaagttgaggacggtctgccttccctcgtccctttacctggccagataactccagccgctgaatacagtgttaggactgggggctcctgagatgagagtttgagattcagggaatgagaccacctctcatttcttccagagcgtagacagcagcaaacagcagcagggaagccattctcactgcatcctccctgcagtagccacggccaggcccttaggaggagcagtgaccgggggtgtccagaaatatcctgtccctggatggaaactaggtctcgtttggattttttttttttttttgccgtgttaggaaattatttattaatttacaagacaggttttaactcagccgaggtgggaaatggtgtccctgtccctcccaaagcacagagcacagaaatgaggccgtttacatggcgagtctccgtgctggtgtttaagtcattaaaaagatactcaaag

SEQ ID NO: 305976 - DNA, 3095 bp, Homo sapiens
  misc_feature (8)..(8): n is a, c, g, or t
ggaacggngccctgcagctgcccagggagcccggagactcagcccagttcaccaaggcgctggccatcatcctccacctgctctacctgctggagaaagtggagtgcacccccagccaggagcacctgaagcaccagaccgtctaccgcctgctcaagtgcgcgcccaggggcaagaacggcttcaccccttgtccacagcctaagatggcggcgagggggacggtgaaggttgcctcccgcccgtccgggctctgatcctccgtctccccgtcccccggcggccggcccatggcctggcggaggcccgaaccatggacctccgcaccgccgtgtacaacgccgcccgtgatggcaagctgcagctgctccagaagctgctcagcggccggagccgggaggaactggacgagctgacgggcgaggtggccggcgggggaacgccgctactcatcgccgcccgctacggccacctggacgtggtggagtacctggtggaccggtgcggcgcgagcgtggaggccggtggctcggtgcacttcgatggcgagaccatcgagggcgcgccgccgctgtgggccgcctccgcagccggccacctggacgtggtgcggagcctgctgcgccgcggggcctcggtgaaccgcaccacgcgcaccaactccacgcctctccgcgccgcctgcttcgacggccacctggaggtggtgcgctacctggtcggcgagcaccaggccgacctggaggtggccaaccggcacggccacacgtgcctcatgatctcgtgctacaagggccaccgtgagatcgcccgctacctgctggagcagggcgcccaggtgaaccggcgcagcgccaagggcaacacggccctgcatgactgcgccgagtccggcagcctggagatcctgcagctgctgctggggtgcaaggcccgcatggaacgtgacggctacggcatgaccccgctgctcgcggccagcgtgacgggccacaccaacatcgtggagtacctcatccaggagcagcccggccaggagcaggtcgcagggggagaggctcagcctgggctgccccaagaagacccctccaccagccaggggtgtgcgcagcctcagggggctccgtgctgcagctcctccccagaggaaccactgaacggggaatcttacgaaagctgctgtcccaccagccgggaagctgccgtggaagccttggaattgctgggagctacgtatgtggataagaaacgagatctgcttggggcccttaaacactggaggcgggccatggagctgcgtcaccaggggggcgagtacctgcccaaaccggagcccccacagctggtcctggcctatgactattccagggaggtcaacaccaccgaggagctggaggcgctgatcaccgacccggatgagatgcgcatgcaggccctgttgatccgggagcgcatcctcggtccctcgcacccggacacttcctattacatccgttacaggggtgccgtgtacgccgactcgggcaatttcgagcgctgcatccgcttgtggaagtacgccctggacatgcaacagagcaacctggagcctctgagccccatgaccgccagcagcttcctctccttcgcggaactcttctcctacgtgcttcaggaccgggccgccaaaggcagcctgggcacccagatcggctttgcagacctcatgggggttctcaccaaaggggtccgggaagtggaacgggccctgcagctgcccagggagcccggagactcagcccagttcaccaaggcgctggccatcatcctccacctgctctacctgctggagaaagtggagtgcacccccagccaggagcacctgaagcaccagaccgtctaccgcctgctcaagtgcgcgcccaggggcaagaacggcttcacccctctgcacatggctgtggacaaggacaccacaaacgtgggccgctatcccgtgggcagattcccctccctgcacgtggtcaaagtgctgctcgactgcggggccgacccggacagcagggattttgacaacaacaccccgctacacatagcagcccagaacaactgcccggccatcatgaatgccctgatcgaagcaggggcccacatggacgccaccaatgccttcaagaagacggcctacgagctgctggacgagaagctgctggccaggggtaccatgcagcccttcaactacgtgaccctgcagtgccttgcggcccgggccctggataagaacaagatcccttacaagggcttcatcccggaagatctggaggcgttcatcgaactgcactgacctgcccagaacgcctgcaccctcacctctcccctctcctgctgagatgggggaaatccggctgcctcccatcccctctacctgcagacagggtcggaggtgttagcgagcctttggtgctagaagcctgcggggtcatgtgctaagaggacagtctttctccgggagcccgctcactcattctgagttaggaaaagacacaagaccttccccacatcctgtctgcctgggttagggaggcctttgccttgttacctagaggcggagggactgaagccattgcgttccttccctgctagaaacacaggaagaagttgaggacggtctgccttccctcgtccctttacctggccagataactccagccgctgaatacagtgttaggactgggggctcctgagatgagagtttgagattcagggaatgagaccacctctcatttcttccagagcgtagacagcagcaaacagcagcagggaagccattctcactgcatcctccctgcagtagccacggccaggcccttaggaggagcagtgaccgggggtgtccagaaatatcctgtccctggatggaaactaggtctcgtttggattttttttttttttttgccgtgttaggaaattatttattaatttacaagacaggttttaactcagccgaggtgggaaatggtgtccctgtccctcccaaagcacagagcacagaaatgaggccgtttacatggcgagtctccgtgctggtgtttaagtcattaaaaagatactcaaag

SEQ ID NO: 305977 - DNA, 2474 bp, Homo sapiens
  misc_feature (8)..(8): n is a, c, g, or t
ggaacggngccctgcagctgcccagggagcccggagactcagcccagttcaccaaggcgctggccatcatcctccacctgctctacctgctggagaaagtggagtgcacccccagccaggagcacctgaagcaccagaccgtctaccgcctgctcaagtgcgcgcccaggggcaagaacggcttcaccccttgtccacagcctaagatggcggcgagggggacggtgaaggttgcctcccgcccgtccgggctctgatcctccgtctccccgtcccccggcggccggcccatggcctggcggaggcccgaaccatggacctccgcaccgccgtgtacaacgccgcccgtgatggcaagctgcagctgctccagaagctgctcagcggccggagccgggaggaactggacgagctgacgggcgaggtggccggcgggggaacgccgctactcatcgccgcccgctacggccacctggacgtggtggagtacctggtggaccggtgcggcgcgagcgtggaggccggtggctcggtgcacttcgatggcgagaccatcgagggcgcgccgccgctgtgggccgcctccgcagccggccacctggacgtggtgcggagcctgctgcgccgcggggcctcggtgaaccgcaccacgcgcaccaactccacgcctctccgcgccgcctgcttcgacggccacctggaggtggtgcgctacctggtcggcgagcaccaggccgacctggaggtggccaaccggcacggccacacgtgcctcatgatctcgtgctacaagggccaccgtgagatcgcccgctacctgctggagcagggcgcccaggtgaaccggcgcagcgccaagggcaacacggccctgcatgactgcgccgagtccggcagcctggagatcctgcagctgctgctggggtgcaaggcccgcatggaacgtgacggctacggcatgaccccgctgctcgcggccagcgtgacgggccacaccaacatcgtggagtacctcatccaggagcagcccggccaggagcaggtcgcagggggagaggctcagcctgggctgccccaagaagacccctccaccagccaggggtgtgcgcagcctcagggggctccgtgctgcagctcctccccagaggaaccactgaacggggaatcttacgaaagctgctgtcccaccagccgggaagctgccgtggaagccttggaattgctgggagctacgtatgtggataagaaacgagatctgcttggggcccttaaacactggaggcgggccatggagctgcgtcaccaggggggcgagtacctgcccaaaccggagcccccacagctggtcctggcctatgactattccagggaggtcaacaccaccgaggagctggaggcgctgatcaccgacccggatgagatgcgcatgcaggccctgttgatccgggagcgcatcctcggtccctcgcacccggacacttcctattacatccgttacaggggtgccgtgtacgccgactcgggcaatttcgagcgctgcatccgcttgtggaagtacgccctggacatgcaacagagcaacctggagcctctgagccccatgaccgccagcagcttcctctccttcgcggaactcttctcctacgtgcttcaggaccgggccgccaaaggcagcctgggcacccagatcggctttgcagacctcatgggggttctcaccaaaggggtccgggaagtggaacgggccctgcagctgcccagggagcccggagactcagcccagttcaccaaggcgctggccatcatcctccacctgctctacctgctggagaaagtggagtgcacccccagccaggagcacctgaagcaccagaccgtctaccgcctgctcaagtgcgcgcccaggggcaagaacggcttcacccctctgcacatggctgtggacaaggacaccacaaacgtgggccgctatcccgtgggcagattcccctccctgcacgtggtcaaagtgctgctcgactgcggggccgacccggacagcagggattttgacaacaacaccccgctacacatagcagcccagaacaactgcccggccatcatgaatgccctgatcgaagcaggggcccacatggacgccaccaatgccttagcgtagacagcagcaaacagcagcagggaagccattctcactgcatcctccctgcagtagccacggccaggcccttaggaggagcagtgaccgggggtgtccagaaatatcctgtccctggatggaaactaggtctcgtttggattttttttttttttttgccgtgttaggaaattatttattaatttacaagacaggttttaactcagccgaggtgggaaatggtgtccctgtccctcccaaagcacagagcacagaaatgaggccgtttacatggcgagtctccgtgctggtgtttaagtcattaaaaagatactcaaag

SEQ ID NO: 305978 - DNA, 2665 bp, Homo sapiens
  misc_feature (8)..(8): n is a, c, g, or t
ggaacggngccctgcagctgcccagggagcccggagactcagcccagttcaccaaggcgctggccatcatcctccacctgctctacctgctggagaaagtggagtgcacccccagccaggagcacctgaagcaccagaccgtctaccgcctgctcaagtgcgcgcccaggggcaagaacggcttcaccccttgtccacagcctaagatggcggcgagggggacggtgaaggttgcctcccgcccgtccgggctctgatcctccgtctccccgtcccccggcggccggcccatggcctggcggaggcccgaaccatggacctccgcaccgccgtgtacaacgccgcccgtgatggcaagctgcagctgctccagaagctgctcagcggccggagccgggaggaactggacgagctgacgggcgaggtggccggcgggggaacgccgctactcatcgccgcccgctacggccacctggacgtggtggagtacctggtggaccggtgcggcgcgagcgtggaggccggtggctcggtgcacttcgatggcgagaccatcgagggcgcgccgccgctgtgggccgcctccgcagccggccacctggacgtggtgcggagcctgctgcgccgcggggcctcggtgaaccgcaccacgcgcaccaactccacgcctctccgcgccgcctgcttcgacggccacctggaggtggtgcgctacctggtcggcgagcaccaggccgacctggaggtggccaaccggcacggccacacgtgcctcatgatctcgtgctacaagggccaccgtgagatcgcccgctacctgctggagcagggcgcccaggtgaaccggcgcagcgccaagggcaacacggccctgcatgactgcgccgagtccggcagcctggagatcctgcagctgctgctggggtgcaaggcccgcatggaacgtgacggctacggcatgaccccgctgctcgcggccagcgtgacgggccacaccaacatcgtggagtacctcatccaggagcagcccggccaggagcaggtcgcagggggagaggctcagcctgggctgccccaagaagacccctccaccagccaggggtgtgcgcagcctcagggggctccgtgctgcagctcctccccagaggaaccactgaacggggaatcttacgaaagctgctgtcccaccagccgggaagctgccgtggaagccttggaattgctgggagctacgtatgtggataagaaacgagatctgcttggggcccttaaacactggaggcgggccatggagctgcgtcaccaggggggcgagtacctgcccaaaccggagcccccacagctggtcctggcctatgactattccagggaggtcaacaccaccgaggagctggaggcgctgatcaccgacccggatgagatgcgcatgcaggccctgttgatccgggagcgcatcctcggtccctcgcacccggacacttcctattacatccgttacaggggtgccgtgtacgccgactcgggcaatttcgagcgctgcatccgcttgtggaagtacgccctggacatgcaacagagcaacctggagcctctgagccccatgaccgccagcagcttcctctccttcgcggaactcttctcctacgtgcttcaggaccgggccgccaaaggcagcctgggcacccagatcggctttgcagacctcatgggggttctcaccaaaggggtccgggaagtggaacgggccctgcagctgcccagggagcccggagactcagcccagttcaccaaggcgctggccatcatcctccacctgctctacctgctggagaaagtggagtgcacccccagccaggagcacctgaagcaccagaccgtctaccgcctgctcaagtgcgcgcccaggggcaagaacggcttcacccctctgcacatggctgtggacaaggacaccacaaacgtgggccgctatcccgtgggcagattcccctccctgcacgtggtcaaagtgctgctcgactgcggggccgacccggacagcagggattttgacaacaacaccccgctacacatagcagcccagaacaactgcccggccatcatgaatgccctgatcgaagcaggggcccacatggacgccaccaatgccttcaagaagacggcctacgagctgctggacgagaagctgctggccaggggtaccatgcagcccttcaactacgtgaccctgcagtgccttgcggcccgggccctggataagaacaagatcccttacaagggcttcatcccggaagatctggaggcgttcatcgaactgcactgacctgcccagaacgcctgcaccctcacctctcccctctcctgctgagatgggggaaatccggctgcggcatagcagatgctcgttcttgcctccttcaggcaccaatcaggagaagggttctgcctcccatcccctctacctgcagacagggtcggaggtgttagcgagcctttggtgctagaagcctgcggggtcatgtgctaagaggacagtctttctccgggagcccgctcactcattctgagttaggaaaagacacaagaccttccccacatcctgtcggggctgtcagggctagtcgggggctgtcgggctagtcggggctgtcaaagctagatcggg

SEQ ID NO: 305979 - DNA, 2020 bp, Homo sapiens
  misc_feature (8)..(8): n is a, c, g, or t
ggaacggngccctgcagctgcccagggagcccggagactcagcccagttcaccaaggcgctggccatcatcctccacctgctctacctgctggagaaagtggagtgcacccccagccaggagcacctgaagcaccagaccgtctaccgcctgctcaagtgcgcgcccaggggcaagaacggcttcaccccttgtccacagcctaagatggcggcgagggggacggtgaaggttgcctcccgcccgtccgggctctgatcctccgtctccccgtcccccggcggccggcccatggcctggcggaggcccgaaccatggacctccgcaccgccgtgtacaacgccgcccgtgatggcaagctgcagctgctccagaagctgctcagcggccggagccgggaggaactggacgagctgacgggcgaggtggccggcgggggaacgccgctactcatcgccgcccgctacggccacctggacgtggtggagtacctggtggaccggtgcggcgcgagcgtggaggccggtggctcggtgcacttcgatggcgagaccatcgagggcgcgccgccgctgtgggccgcctccgcagccggccacctggacgtggtgcggagcctgctgcgccgcggggcctcggtgaaccgcaccacgcgcaccaactccacgcctctccgcgccgcctgcttcgacggccacctggaggtggtgcgctacctggtcggcgagcaccaggccgacctggaggtggccaaccggcacggccacacgtgcctcatgatctcgtgctacaagggccaccgtgagatcgcccgctacctgctggagcagggcgcccaggtgaaccggcgcagcgccaagggcaacacggccctgcatgactgcgccgagtccggcagcctggagatcctgcagctgctgctggggtgcaaggcccgcatggaacgtgacggctacggcatgaccccgctgctcgcggccagcgtgacgggccacaccaacatcgtggagtacctcatccaggagcagcccggccaggagcaggtcgcagggggagaggctcagcctgggctgccccaagaagacccctccaccagccaggggtgtgcgcagcctcagggggctccgtgctgcagctcctccccagaggaaccactgaacggggaatcttacgaaagctgctgtcccaccagccgggaagctgccgtggaagccttggaattgctgggagctacgtatgtggataagaaacgagatctgcttggggcccttaaacactggaggcgggccatggagctgcgtcaccaggggggcgagtacctgcccaaaccggagcccccacagctggtcctggcctatgactattccagggaggtcaacaccaccgaggagctggaggcgctgatcaccgacccggatgagatgcgcatgcaggccctgttgatccgggagcgcatcctcggtccctcgcacccggacacttcctattacatccgttacaggggtgccgtgtacgccgactcgggcaatttcgagcgctgcatccgcttgtggaagtacgccctggacatgcaacagagcaacctggagcctctgagccccatgaccgccagcagcttcctctccttcgcggaactcttctcctacgtgcttcaggaccgggccgccaaaggcagcctgggcacccagatcggctttgcagacctcatgggggttctcaccaaaggggtccgggaagtggaacgggccctgcagctgcccagggagcccggagactcagcccagttcaccaaggcgctggccatcatcctccacctgctctacctgctggagaaagtggagtgcacccccagccaggagcacctgaagcaccagaccgtctaccgcctgctcaagtgcgcgcccaggggcaagaacggcttcaccctccctgtccctcccaaagcacagagcacagaaatgaggccgtttacatggcgagtctccgtgctggtgtttaagtcattaaaaagatactcaaag

SEQ ID NO: 305980 - DNA, 2259 bp, Homo sapiens
  misc_feature (738)..(738): n is a, c, g, or t
  misc_feature (771)..(772): n is a, c, g, or t
agcactttgtgagtatggggtgaatcggcgtcggccttccactgtggggttaaatctcatcccgcggctctcctcctgtcggtcctgcagttcttttgtccccgggtagagggatcttctgcagaaatagcgctggaagctagagtgaggcctgagtactgccttggcctaggatggctagagaattaagtgaaagcacagccctggatgcccagtctacagaagaccagatggagcttctggtcataaaggtggaggaagaagaagccggttttcccagtagcccagatctgggttctgagggctcccgcgagcgcttccgaggcttccgctacccggaggctgcaggcccccgcgaggcgctgagtcggctccgagagctctgccgacagtggctgcagcctgagatgcacagcaaggagcagatcctggagctgctggtgctggagcagttcctgaccatcctgccggggaatctgcagagctgggtgcgggagcagcatccagagagcggggaggaggtggtggtgctattggagtatttggagaggcagctggatgagccggcgccgcaggtttcaggtgttgaccaggggcaagaactgctctgttgcaagatggcactattgacaccagccccagggtcacaaagtagccaatttcagctaatgaaggctctgctcaagcatgaatctgtgggatcccagcctttacaagatagagttctccaggtccccntgcttgcccatggaggatgctgcagagaagatnnagtggtagcttctaggcttactccagagtcccaggggttgttgaaagtggaagatgtggccctgaccctcacccctgaatggacacagcaggattcatctcaggggaatctctgtagagatgaaaagcaggagaaccatggcagcctggtctccctgggtgatgaaaaacagactaagagcagggacttgcctccagctgaggagcttccagaaaaggagcatgggaagatatcgtgccacctgagagaagacattgcccagattcctacatgtgcagaagctggtgaacaggagggcaggctacaaagaaagcagaaaaatgccacaggagggaggcggcacatctgccatgaatgtggaaagagttttgctcaaagctcaggcctgagtaaacacaggagaatccacactggtgagaaaccctacgaatgtgaagagtgtggcaaagccttcattgggagctctgcccttgtcattcatcagagagtccacactggtgagaagccatatgagtgtgaagaatgtggtaaggccttcagtcatagctcagaccttatcaagcatcagagaacccacactggggagaagccctatgagtgtgatgactgtgggaagaccttcagccagagctgcagcctccttgaacatcacagaatccacactggggagaagccgtatcagtgcagtatgtgtggcaaagcctttaggcgaagttcacatctcctgagacatcagaggatccatactggggataaaaatgttcaggaacctgagcagggagaggcctggaaaagtaggatggaaagccagttggaaaatgttgaaactcccatgtcttataaatgtaatgagtgtgaaagaagtttcactcagaatacaggcctcattgaacatcaaaaaatccacactggtgagaaaccctatcagtgtaatgcgtgtggaaaaggcttcacccgaatttcataccttgttcaacatcagagaagccatgtagggaaaaacatcctatcacagtgacccatgccatacatgccagagttggtgctcatttgtcactgatctgaagccactccccctggagtctcaactatagaaattgtgggctgggctttatttaccactacacattatcaggtgttagaaaatgtagactgggttagacaaattatcttctaagttctagaaggggtttgtaatcaaaacatatttgataggaggctacgggagagttgtctagaagaggtaagacctgaaactgtttgttctctcccactagaattaaatggatgtttagactggctacttgccctaaaccagcacttggtgatgtctactgggtggatggttgtgatttgggggctgcttctctgaccattctttttgactgtaatgaatcctccacagttggtcagattcataaagtcttatatccccctctgtgccttttctgcaggtgctaataaatgtttattgaatgtaccagtga

SEQ ID NO: 305981 - DNA, 2632 bp, Homo sapiens
  misc_feature (738)..(738): n is a, c, g, or t
  misc_feature (771)..(772): n is a, c, g, or t
agcactttgtgagtatggggtgaatcggcgtcggccttccactgtggggttaaatctcatcccgcggctctcctcctgtcggtcctgcagttcttttgtccccgggtagagggatcttctgcagaaatagcgctggaagctagagtgaggcctgagtactgccttggcctaggatggctagagaattaagtgaaagcacagccctggatgcccagtctacagaagaccagatggagcttctggtcataaaggtggaggaagaagaagccggttttcccagtagcccagatctgggttctgagggctcccgcgagcgcttccgaggcttccgctacccggaggctgcaggcccccgcgaggcgctgagtcggctccgagagctctgccgacagtggctgcagcctgagatgcacagcaaggagcagatcctggagctgctggtgctggagcagttcctgaccatcctgccggggaatctgcagagctgggtgcgggagcagcatccagagagcggggaggaggtggtggtgctattggagtatttggagaggcagctggatgagccggcgccgcaggtttcaggtgttgaccaggggcaagaactgctctgttgcaagatggcactattgacaccagccccagggtcacaaagtagccaatttcagctaatgaaggctctgctcaagcatgaatctgtgggatcccagcctttacaagatagagttctccaggtccccntgcttgcccatggaggatgctgcagagaagatnnagtggtagcttctaggcttactccagagtcccaggggttgttgaaagtggaagatgtggccctgaccctcacccctgaatggacacagcaggattcatctcaggggaatctctgtagagatgaaaagcaggagaaccatggcagcctggtctccctgggtgatgaaaaacagactaagagcagggacttgcctccagctgaggagcttccagaaaaggagcatgggaagatatcgtgccacctgagagaagacattgcccagattcctacatgtgcagaagctggtgaacaggagggcaggctacaaagaaagcagaaaaatgccacaggagggaggcggcacatctgccatgaatgtggaaagagttttgctcaaagctcaggcctgagtaaacacaggagaatccacactggtgagaaaccctacgaatgtgaagagtgtggcaaagccttcattgggagctctgcccttgtcattcatcagagagtccacactggtgagaagccatatgagtgtgaagaatgtggtaaggccttcagtcatagctcagaccttatcaagcatcagagaacccacactggggagaagccctatgagtgtgatgactgtgggaagaccttcagccagagctgcagcctccttgaacatcacagaatccacactggggagaagccgtatcagtgcagtatgtgtggcaaagcctttaggcgaagttcacatctcctgagacatcagaggatccatactggggataaaaatgttcaggaacctgagcagggagaggcctggaaaagtaggatggaaagccagttggaaaatgttgaaactcccatgtcttataaatgtaatgagtgtgaaagaagtttcactcagaatacaggcctcattgaacatcaaaaaatccacactggtgagaaaccctatcagtgtaatgcgtgtggaaaaggcttcacccgaatttcataccttgttcaacatcagagaagccatgtagggaaaaacatcctatcacagtgacccatgccatacatgccagagttggtgctcatttgtcactgatctgaagccactccccctggagtctcaactatagaaattgtgggctgggctttatttaccactacacattatcaggtgttagaaaatgtagactgggttagacaaattatcttctaagttctagaaggggtttgtaatcaaaacatatttgataggaggctacgggagagttgtctagaagaggtaagacctgaaactgtttgttctctcccactagaattaaatggatgtttagactggctacttgccctaaaccagcacttggtgatgtctactgggtggatggttgtgatttgggggctgcttctctgaccattctttttgactgtaatgaatcctccacagttggtcagattcataaagtcttatatccccctctgtgccttttctgcaggtgctaataaatgtttattgaatgtaccagtgaaaaaaaaaaaaaaaaaaaaaaaaaaaaaaaaaggggggggcggcttaaaaattcccccgggggggccaaagtcgagccagcaccccgtactttctgtttgctaccaaaggggggccccctaatgggggagagggtgcgatgatcaaaaaaacgcaagagcgaaccagagggcgcccatgcttataaaacaccgcgtcgcgtgatgcggggggaaaaagctggcgctactcgtggggacctaccggtggagcagggaaccccccacatcttcggggggggggggacaccatacgtgggcacacaaacatcatctcaacggagattttaacgcgccccaggggtcaacactttgcaactctccacgtctcctgaa

SEQ ID NO: 305982 - DNA, 2090 bp, Homo sapiens
  misc_feature (738)..(738): n is a, c, g, or t
  misc_feature (771)..(772): n is a, c, g, or t
agcactttgtgagtatggggtgaatcggcgtcggccttccactgtggggttaaatctcatcccgcggctctcctcctgtcggtcctgcagttcttttgtccccgggtagagggatcttctgcagaaatagcgctggaagctagagtgaggcctgagtactgccttggcctaggatggctagagaattaagtgaaagcacagccctggatgcccagtctacagaagaccagatggagcttctggtcataaaggtggaggaagaagaagccggttttcccagtagcccagatctgggttctgagggctcccgcgagcgcttccgaggcttccgctacccggaggctgcaggcccccgcgaggcgctgagtcggctccgagagctctgccgacagtggctgcagcctgagatgcacagcaaggagcagatcctggagctgctggtgctggagcagttcctgaccatcctgccggggaatctgcagagctgggtgcgggagcagcatccagagagcggggaggaggtggtggtgctattggagtatttggagaggcagctggatgagccggcgccgcaggtttcaggtgttgaccaggggcaagaactgctctgttgcaagatggcactattgacaccagccccagggtcacaaagtagccaatttcagctaatgaaggctctgctcaagcatgaatctgtgggatcccagcctttacaagatagagttctccaggtccccntgcttgcccatggaggatgctgcagagaagatnnagtggtagcttctaggcttactccagagtcccaggggttgttgaaagtggaagatgtggccctgaccctcacccctgaatggacacagcaggattcatctcaggggaatctctgtagagatgaaaagcaggagaaccatggcagcctggtctccctgggtgatgaaaaacagactaagagcagggacttgcctccagctgaggagcttccagaaaaggagcatgggaagatatcgtgccacctgagagaagacattgcccagattcctacatgtgcagaagctggtgaacaggagggcaggctacaaagaaagcagaaaaatgccacaggagggaggcggcacatctgccatgaatgtggaaagagttttgctcaaagctcaggcctgagtaaacacaggagaatccacactggtgagaaaccctacgaatgtgaagagtgtggcaaagccttcattgggagctctgcccttgtcattcatcagagagtccacactggtgagaaccgtatcagtgcagtatgtgtggcaaagcctttaggcgaagttcacatctcctgagacatcagaggatccatactggggataaaaatgttcaggaacctgagcagggagaggcctggaaaagtaggatggaaagccagttggaaaatgttgaaactcccatgtcttataaatgtaatgagtgtgaaagaagtttcactcagaatacaggcctcattgaacatcaaaaaatccacactggtgagaaaccctatcagtgtaatgcgtgtggaaaaggcttcacccgaatttcataccttgttcaacatcagagaagccatgtagggaaaaacatcctatcacagtgacccatgccatacatgccagagttggtgctcatttgtcactgatctgaagccactccccctggagtctcaactatagaaattgtgggctgggctttatttaccactacacattatcaggtgttagaaaatgtagactgggttagacaaattatcttctaagttctagaaggggtttgtaatcaaaacatatttgataggaggctacgggagagttgtctagaagaggtaagacctgaaactgtttgttctctcccactagaattaaatggatgtttagactggctacttgccctaaaccagcacttggtgatgtctactgggtggatggttgtgatttgggggctgcttctctgaccattctttttgactgtaatgaatcctccacagttggtcagattcataaagtcttatatccccctctgtgccttttctgcaggtgctaataaatgtttattgaatgtaccagtga

SEQ ID NO: 305983 - DNA, 1742 bp, Homo sapiens
acagagctccctcccaggcccgcgaacttggccattcagccgccgctgtccccgctgcgcgccctcgcgcctctgcctgagaagccaggcgctgttcccccaccccagaagaggatggcaaaggtggctaaggacctcaacccaggagttaaaaagatgtccctgggccagctgcagtcagcaagaggtgtggcatgtttgggatgcaaggggacgtgttcgggcttcgagccacattcatggaggaaaatatgcaagtcttgcaaatgcagccaagaggaccactgcctaacatctgacctagaagacgatcggaaaattggccgcttgctgatggactccaagtattccaccctcactgctcgggtgaaaggcggggacggcatccggatttacaagaggaaccggatgatcatgaccaaccctattgctactgggaaagatcccacttttgacaccatcacctacgagtgggctccccctggagtcacccagaaactgggactgcagtacatggagctcatccccaaggagaagcagccagtgacaggcacagagggtgccttttaccgccgccgccagctcatgcaccagctccccatctatgaccaggatccctcgcgctgccgtggacttttggagaatgagttgaaactgatggaagaatttgtcaagcaatataagagcgaggccctcggcgtgggagaagtggccctcccggggcagggtggcttgcccaaggaggaggggaagcagcaggaaaagccagagggggcagagaccactgctgctaccaccaacggcagtctcagtgacccgtccaaagaagtggaatacgtctgcgagctctgcaagggagcggcccctcctgacagccccgtggtctactcggacagggcaggctacaacaagcagtggcaccccacctgctttgtgtgtgccaagtgctccgagccgctggtggacctcatctacttctggaaggatggtgcaccctggtgcggccgccattactgcgagagtctgcggccccggtgctccggctgcgatgagataatattcgctgaggactaccagcgtgtggaagatctggcctggcaccgaaagcactttgtctgtgagggttgtgagcagctgctgagcggccgggcgtacatcgtcaccaagggtcagcttctgtgcccaacttgcagcaagtccaaacgctcctgaagggctgcccacccacagccagaatccacaggatcccaccgagaaggagagccaggtgtgccgagaccatcctaagggtccgatgtgacagcaagcaagtgaaataaacaatgatttgcttttcagtgagaatatatatatgagatatatatagatatatattctaggttgggtggtggtagatccttgagggtcagtagtttcaaaaccaaaaatattctaagaagtcttaggatggagttccttttctttctgttgttgtttcccagctacaaccaactaaagacacaaatggcgttctgcaaggggactctgggaggagttttccagaatgcaattccgagtgagcaaatcgcatagctgtagaatgtgcgtgcttttttgtggacacaggagctcctccaggagcaggctgggatcccaactatcgcttgttgcctctttttcaagtggaatttgaattttaaataaacaactttttttggcatgataaacagatcaataaaagttttgtgaattccaaaaaaacc

SEQ ID NO: 305984 - DNA, 1813 bp, Homo sapiens
acagagctccctcccaggcccgcgaacttggccattcagccgccgctgtccccgctgcgcgccctcgcgcctctgcctgagaagccaggcgctgttcccccaccccagaagaggatggcaaaggtggctaaggacctcaacccaggagttaaaaagatggtgatcacatgggatatacatataaagtaatcgagcgaatactggagattggtgcatttcgaccgcatatgtccctgggccagctgcagtcagcaagaggtgtggcatgtttgggatgcaaggggacgtgttcgggcttcgagccacattcatggaggaaaatatgcaagtcttgcaaatgcagccaagaggaccactgcctaacatctgacctagaagacgatcggaaaattggccgcttgctgatggactccaagtattccaccctcactgctcgggtgaaaggcggggacggcatccggatttacaagaggaaccggatgatcatgaccaaccctattgctactgggaaagatcccacttttgacaccatcacctacgagtgggctccccctggagtcacccagaaactgggactgcagtacatggagctcatccccaaggagaagcagccagtgacaggcacagagggtgccttttaccgccgccgccagctcatgcaccagctccccatctatgaccaggatccctcgcgctgccgtggacttttggagaatgagttgaaactgatggaagaatttgtcaagcaatataagagcgaggccctcggcgtgggagaagtggccctcccggggcagggtggcttgcccaaggaggaggggaagcagcaggaaaagccagagggggcagagaccactgctgctaccaccaacggcagtctcagtgacccgtccaaagaagtggaatacgtctgcgagctctgcaagggagcggcccctcctgacagccccgtggtctactcggacagggcaggctacaacaagcagtggcaccccacctgctttgtgtgtgccaagtgctccgagccgctggtggacctcatctacttctggaaggatggtgcaccctggtgcggccgccattactgcgagagtctgcggccccggtgctccggctgcgatgagataatattcgctgaggactaccagcgtgtggaagatctggcctggcaccgaaagcactttgtctgtgagggttgtgagcagctgctgagcggccgggcgtacatcgtcaccaagggtcagcttctgtgcccaacttgcagcaagtccaaacgctcctgaagggctgcccacccacagccagaatccacaggatcccaccgagaaggagagccaggtgtgccgagaccatcctaagggtccgatgtgacagcaagcaagtgaaataaacaatgatttgcttttcagtgagaatatatatatgagatatatatagatatatattctaggttgggtggtggtagatccttgagggtcagtagtttcaaaaccaaaaatattctaagaagtcttaggatggagttccttttctttctgttgttgtttcccagctacaaccaactaaagacacaaatggcgttctgcaaggggactctgggaggagttttccagaatgcaattccgagtgagcaaatcgcatagctgtagaatgtgcgtgcttttttgtggacacaggagctcctccaggagcaggctgggatcccaactatcgcttgttgcctctttttcaagtggaatttgaattttaaataaacaactttttttggcatgataaacagatcaataaaagttttgtgaattccaaaaaaacc

SEQ ID NO: 305985 - DNA, 1653 bp, Homo sapiens
acagagctccctcccaggcccgcgaacttggccattcagccgccgctgtccccgctgcgcgccctcgcgcctctgcctgagaagccaggcgctgttcccccaccccagaagaggatggcaaaggtggctaaggacctcaacccaggagttaaaaaggaaaatatgcaagtcttgcaaatgcagccaagaggaccactgcctaacatctgacctagaagacgatcggaaaattggccgcttgctgatggactccaagtattccaccctcactgctcgggtgaaaggcggggacggcatccggatttacaagaggaaccggatgatcatgaccaaccctattgctactgggaaagatcccacttttgacaccatcacctacgagtgggctccccctggagtcacccagaaactgggactgcagtacatggagctcatccccaaggagaagcagccagtgacaggcacagagggtgccttttaccgccgccgccagctcatgcaccagctccccatctatgaccaggatccctcgcgctgccgtggacttttggagaatgagttgaaactgatggaagaatttgtcaagcaatataagagcgaggccctcggcgtgggagaagtggccctcccggggcagggtggcttgcccaaggaggaggggaagcagcaggaaaagccagagggggcagagaccactgctgctaccaccaacggcagtctcagtgacccgtccaaagaagtggaatacgtctgcgagctctgcaagggagcggcccctcctgacagccccgtggtctactcggacagggcaggctacaacaagcagtggcaccccacctgctttgtgtgtgccaagtgctccgagccgctggtggacctcatctacttctggaaggatggtgcaccctggtgcggccgccattactgcgagagtctgcggccccggtgctccggctgcgatgagataatattcgctgaggactaccagcgtgtggaagatctggcctggcaccgaaagcactttgtctgtgagggttgtgagcagctgctgagcggccgggcgtacatcgtcaccaagggtcagcttctgtgcccaacttgcagcaagtccaaacgctcctgaagggctgcccacccacagccagaatccacaggatcccaccgagaaggagagccaggtgtgccgagaccatcctaagggtccgatgtgacagcaagcaagtgaaataaacaatgatttgcttttcagtgagaatatatatatgagatatatatagatatatattctaggttgggtggtggtagatccttgagggtcagtagtttcaaaaccaaaaatattctaagaagtcttaggatggagttccttttctttctgttgttgtttcccagctacaaccaactaaagacacaaatggcgttctgcaaggggactctgggaggagttttccagaatgcaattccgagtgagcaaatcgcatagctgtagaatgtgcgtgcttttttgtggacacaggagctcctccaggagcaggctgggatcccaactatcgcttgttgcctctttttcaagtggaatttgaattttaaataaacaactttttttggcatgataaacagatcaataaaagttttgtgaattccaaaaaaacc

SEQ ID NO: 305986 - DNA, 1953 bp, Homo sapiens
cctcagtcttctgagtagctaggactacagatgagcaccatcacaactggctaatttttcaatttttttgtagagatggggtcttgctatgttgcccaggctggtctcaaactcctggcctcaaatgatcctcctacctccagttcccaacgtgctagaattaaaggcataaggcaccacttctaggcaaaaatattatttattaaatattatttaaaactcttcatgcacgggtaaaaagatccattcaaagtgcaaggtaaacaaacaggttttaatgtaaccaaatatgaaaggttcactgatgtgctttcagatttcacactgcaactaacttgagaaagtatcctgtgtcaaattttactgtagtatcaaagaagaatatccacagttgcctggaaggtcctttaaaatgcatcgtcctcctttttccaactttatgtcagtgtgagttcagattttcttcatgtatttcaaccaaaacaacagcatgcaaaagatgggctgcagaagcagttatgggaatccagcaatcttctgcaagtcattgaagagatttgcagatatataaaacaatgtcttaaaattttcttctactttttttgttttgaaacatatagttattttagtaacaagataggtatgttaatgtattacaggtttagtattgtcatttttaaatgaattaaaaaaatttaaattgttctcagttttaatttctcttatggtaaatatcaatagctattacccacatgaacaaaaactctgtaggggtcttgataatttttaagagtataaagggtactgagaccaaacaatttgggaatcactgtgctaaataaataactttatttagtcctcgtgaatagcctgttaggtaggcaatattattgtgtcgctttgcagatgacaaaactgaggcacgaagaggtatagtgacttgcccaaggtcacccaggaagtagaaaggctggagctggaattcgaacccatgtcactgtgctctcctgacttccttgtctcctatggtccttccccatccttccaggtctgcgagctctgcaagggagcggcccctcctgacagccccgtggtctactcggacagggcaggctacaacaagcagtggcaccccacctgctttgtgtgtgccaagtgctccgagccgctggtggacctcatctacttctggaaggatggtgcaccctggtgcggccgccattactgcgagagtctgcggccccggtgctccggctgcgatgagataatattcgctgaggactaccagcgtgtggaagatctggcctggcaccgaaagcactttgtctgtgagggttgtgagcagctgctgagcggccgggcgtacatcgtcaccaagggtcagcttctgtgcccaacttgcagcaagtccaaacgctcctgaagggctgcccacccacagccagaatccacaggatcccaccgagaaggagagccaggtgtgccgagaccatcctaagggtccgatgtgacagcaagcaagtgaaataaacaatgatttgcttttcagtgagaatatatatatgagatatatatagatatatattctaggttgggtggtggtagatccttgagggtcagtagtttcaaaaccaaaaatattctaagaagtcttaggatggagttccttttctttctgttgttgtttcccagctacaaccaactaaagacacaaatggcgttctgcaaggggactctgggaggagttttccagaatgcaattccgagtgagcaaatcgcatagctgtagaatgtgcgtgcttttttgtggacacaggagctcctccaggagcaggctgggatcccaactatcgcttgttgcctctttttcaagtggaatttgaattttaaataaacaactttttttggcatgataaacagatcaataaaagttttgtgaattccaaaaaaacc

SEQ ID NO: 305987 - DNA, 1533 bp, Homo sapiens
acagagctccctcccaggcccgcgaacttggccattcagccgccgctgtccccgctgcgcgccctcgcgcctctgcctgagaagccaggcgctgttcccccaccccagaagaggatggcaaaggtggctaaggacctcaacccaggagttaaaaagatgtccctgggccagctgcagtcagcaagaggtgtggcatgtttgggatgcaaggggacgtgttcgggcttcgagccacattcatggaggaaaatatgcaagtcttgcaaatgcagccaagaggaccactgcctaacatctgacctagaagacgatcggaaaattggccgcttgctgatggactccaagtattccaccctcactgctcgggtgaaaggcggggacggcatccggatttacaagaggaaccggatgatcatgaccaaccctattgctactgggaaagatcccacttttgacaccatcacctacgagtgggctccccctggagtcacccagaaactgggactgcagtacatggagctcatccccaaggagaagcagccagtgacaggaaaagccagagggggcagagaccactgctgctaccaccaacggcagtctcagtgacccgtccaaagaagtggaatacgtctgcgagctctgcaagggagcggcccctcctgacagccccgtggtctactcggacagggcaggctacaacaagcagtggcaccccacctgctttgtgtgtgccaagtgctccgagccgctggtggacctcatctacttctggaaggatggtgcaccctggtgcggccgccattactgcgagagtctgcggccccggtgctccggctgcgatgagataatattcgctgaggactaccagcgtgtggaagatctggcctggcaccgaaagcactttgtctgtgagggttgtgagcagctgctgagcggccgggcgtacatcgtcaccaagggtcagcttctgtgcccaacttgcagcaagtccaaacgctcctgaagggctgcccacccacagccagaatccacaggatcccaccgagaaggagagccaggtgtgccgagaccatcctaagggtccgatgtgacagcaagcaagtgaaataaacaatgatttgcttttcagtgagaatatatatatgagatatatatagatatatattctaggttgggtggtggtagatccttgagggtcagtagtttcaaaaccaaaaatattctaagaagtcttaggatggagttccttttctttctgttgttgtttcccagctacaaccaactaaagacacaaatggcgttctgcaaggggactctgggaggagttttccagaatgcaattccgagtgagcaaatcgcatagctgtagaatgtgcgtgcttttttgtggacacaggagctcctccaggagcaggctgggatcccaactatcgcttgttgcctctttttcaagtggaatttgaattttaaataaacaactttttttggcatgataaacagatcaataaaagttttgtgaattccaaaaaaacc

SEQ ID NO: 305988 - DNA, 1444 bp, Homo sapiens
acagagctccctcccaggcccgcgaacttggccattcagccgccgctgtccccgctgcgcgccctcgcgcctctgcctgagaagccaggcgctgttcccccaccccagaagaggatggcaaaggtggctaaggacctcaacccaggagttaaaaaggaaaatatgcaagtcttgcaaatgcagccaagaggaccactgcctaacatctgacctagaagacgatcggaaaattggccgcttgctgatggactccaagtattccaccctcactgctcgggtgaaaggcggggacggcatccggatttacaagaggaaccggatgatcatgaccaaccctattgctactgggaaagatcccacttttgacaccatcacctacgagtgggctccccctggagtcacccagaaactgggactgcagtacatggagctcatccccaaggagaagcagccagtgacaggaaaagccagagggggcagagaccactgctgctaccaccaacggcagtctcagtgacccgtccaaagaagtggaatacgtctgcgagctctgcaagggagcggcccctcctgacagccccgtggtctactcggacagggcaggctacaacaagcagtggcaccccacctgctttgtgtgtgccaagtgctccgagccgctggtggacctcatctacttctggaaggatggtgcaccctggtgcggccgccattactgcgagagtctgcggccccggtgctccggctgcgatgagataatattcgctgaggactaccagcgtgtggaagatctggcctggcaccgaaagcactttgtctgtgagggttgtgagcagctgctgagcggccgggcgtacatcgtcaccaagggtcagcttctgtgcccaacttgcagcaagtccaaacgctcctgaagggctgcccacccacagccagaatccacaggatcccaccgagaaggagagccaggtgtgccgagaccatcctaagggtccgatgtgacagcaagcaagtgaaataaacaatgatttgcttttcagtgagaatatatatatgagatatatatagatatatattctaggttgggtggtggtagatccttgagggtcagtagtttcaaaaccaaaaatattctaagaagtcttaggatggagttccttttctttctgttgttgtttcccagctacaaccaactaaagacacaaatggcgttctgcaaggggactctgggaggagttttccagaatgcaattccgagtgagcaaatcgcatagctgtagaatgtgcgtgcttttttgtggacacaggagctcctccaggagcaggctgggatcccaactatcgcttgttgcctctttttcaagtggaatttgaattttaaataaacaactttttttggcatgataaacagatcaataaaagttttgtgaattccaaaaaaacc

SEQ ID NO: 305989 - DNA, 1405 bp, Homo sapiens
acagagctccctcccaggcccgcgaacttggccattcagccgccgctgtccccgctgcgcgccctcgcgcctctgcctgagaagccaggcgctgttcccccaccccagaagaggatggcaaaggtggctaaggacctcaacccaggagttaaaaagatgtccctgggccagctgcagtcagcaagaggtgtggcatgtttgggatgcaaggggacgtgttcgggcttcgagccacattcatggagggactgcagtacatggagctcatccccaaggagaagcagccagtgacaggcacagagggtgccttttaccgccgccgccagctcatgcaccagctccccatctatgaccaggatccctcgcgctgccgtggacttttggagaatgagttgaaactgatggaagaatttgtcaagcaatataagagcgaggccctcggcgtgggagaagtggccctcccgggcagtctcagtgacccgtccaaagaagtggaatacgtctgcgagctctgcaagggagcggcccctcctgacagccccgtggtctactcggacagggcaggctacaacaagcagtggcaccccacctgctttgtgtgtgccaagtgctccgagccgctggtggacctcatctacttctggaaggatggtgcaccctggtgcggccgccattactgcgagagtctgcggccccggtgctccggctgcgatgagataatattcgctgaggactaccagcgtgtggaagatctggcctggcaccgaaagcactttgtctgtgagggttgtgagcagctgctgagcggccgggcgtacatcgtcaccaagggtcagcttctgtgcccaacttgcagcaagtccaaacgctcctgaagggctgcccacccacagccagaatccacaggatcccaccgagaaggagagccaggtgtgccgagaccatcctaagggtccgatgtgacagcaagcaagtgaaataaacaatgatttgcttttcagtgagaatatatatatgagatatatatagatatatattctaggttgggtggtggtagatccttgagggtcagtagtttcaaaaccaaaaatattctaagaagtcttaggatggagttccttttctttctgttgttgtttcccagctacaaccaactaaagacacaaatggcgttctgcaaggggactctgggaggagttttccagaatgcaattccgagtgagcaaatcgcatagctgtagaatgtgcgtgcttttttgtggacacaggagctcctccaggagcaggctgggatcccaactatcgcttgttgcctctttttcaagtggaatttgaattttaaataaacaactttttttggcatgataaacagatcaataaaagttttgtgaattccaaaaaaacc

SEQ ID NO: 305990 - DNA, 1072 bp, Homo sapiens
acagagctccctcccaggcccgcgaacttggccattcagccgccgctgtccccgctgcgcgccctcgcgcctctgcctgagaagccaggcgctgttcccccaccccagaagaggatggcaaaggtggctaaggacctcaacccaggagttaaaaagatgtccctgggccagctgcagtcagcaagaggtgtggcatgtttgggatgcaaggggacgtgttcgggcttcgagccacattcatggaggaaaatatgcaagtcttgcaaatgcagccaagaggaccactgcctaacatctgacctagaagacgatcggaaaattggccgcttgctgatggactccaagtattccaccctcactgctcgggtgaaaggcggggacggcatccggatttacaagaggaaccggatgatcatgaccaaccctattgctactgggaaagatcccacttttgacaccatcacctacgagtgggctccccctggagtcacccagaaactgggactgcagtacatggagctcatccccaaggagaagcagccagtgacaggcacagagggtgccttttaccgccgccgccagctcatgcaccagctccccatctatgaccaggatccctcgcgctgccgtggacttttggagaatgagttgaaactgatggaagaatttgtcaagcaatataagagcgaggccctcggcgtgggagaagtggccctcccggggcagggtggcttgcccaaggaggaggggaagcagcaggaaaagccagagggggcagagaccactgctgctaccaccaacggcagtctcagtgacccgtccaaagaagtggaatacaagccagtcccactcgtgtgataacccattaatctattaagccataagtggattaatccattcctgaggacctgagccctcacgacccaatcatctcttaaaggccccacctctcaatactgccatgcagaggattatgtttcaacctgagtgtttggaggggatgttcaacccataggaagtggcagtgtggaagaagtgctgctgaggagtgagtcactgggggccattttga

SEQ ID NO: 305991 - DNA, 1136 bp, Homo sapiens
acagagctccctcccaggcccgcgaacttggccattcagccgccgctgtccccgctgcgcgccctcgcgcctctgcctgagaagccaggcgctgttcccccaccccagaagaggatggcaaaggtggctaaggacctcaacccaggagttaaaaagatgtccctgggccagctgcagtcagcaagaggtgtggcatgtttgggatgcaaggggacgtgttcgggcttcgagccacattcatggaggaaaatatgcaagtcttgcaaatgcagccaagaggaccactgcctaacatctgacctagaagacgatcggaaaattggccgcttgctgatggactccaagtattccaccctcactgctcgggtgaaaggcggggacggcatccggatttacaagaggaaccggatgatcatgaccaaccctattgctactgggaaagatcccacttttgacaccatcacctacgagtgggctccccctggagtcacccagaaactgggactgcagtacatggagctcatccccaaggagaagcagccagtgacaggcacagagggtgccttttaccgccgccgccagctcatgcaccagctccccatctatgaccaggatccctcgcgctgccgtggacttttggagaatgagttgaaactgatggaagaatttggtcagcttctgtgcccaacttgcagcaagtccaaacgctcctgaagggctgcccacccacagccagaatatatatatgagatatatatagatatatattctaggttgggtggtggtagatccttgagggtcagtagtttcaaaaccaaaaatattctaagaagtcttaggatggagttccttttctttctgttgttgtttcccagctacaaccaactaaagacacaaatggcgttctgcaaggggactctgggaggagttttccagaatgcaattccgagtgagcaaatcgcatagctgtagaatgtgcgtgcttttttgtggacacaggagctcctccaggagcaggctgggatcccaactatcgcttgttgcctctttttcaagtggaatttgaattttaaataaacaactttttttggcatgataaacagatcaataaaagttttgtgaattccaaaaaaacc

SEQ ID NO: 305992 - DNA, 552 bp, Homo sapiens
ctgcggccccggtgctccggctgcgatgaggtgggagatagccgcgagatgggttagggggcttgagggacactgctgagggtaaaagcccagaggccaagaggagcatggctttgtggatgatgtgttctacagattgggaaactgaagtcaggcctcactgcatgctctcaaccttcattttctcatctgcaaaatgaggcagacaaccatgggattgttgggaggggtcagacacagtgccggtgaatcttgtccttggcataatgcctagcacttagtaagtactcagaacatagcaggatgaaccaggaggcattgcccacgttcaaacctgtatctgcatctcttattattattatcatgtggttacctaactccggagcctcagctgagtctcagttttactacttataaaatagggatgagaccagcgcccatcccatagagtggctatgaggatagatgagataatgcatgaaaatgcttgccacagggcctgacctaggaacttataaatggtagctgctgttagtcttacgataatatact

SEQ ID NO: 305993 - DNA, 674 bp, Homo sapiens
ataagaaacctgtctgaagctgggtgatgagttgcacactccaggtggggctaaggggcctggagcccctgctggctcctaggaaggcacagcagcaggccctgagacggctcctctggggcccctccaccctcccaggcctctgcatttcacctgtgcccacacttctgtctcctgccttcaccttttgacccactactaacgattctccacccagcagacaaagtgatctcttaaaaatatctgttggcccaaagtgctgggattacaggtgtgaaccaccacacctggccaacaatatttgttttaattagccaggcgtggtagcatttgtcctagcaatttgggaggttgaggtgggagaatcacttcagcccactaggtcgaggctgtagtgagctataattgtaccactgcactccagcctcggggacagagtgagaccctgtctgcaaataaacaaataaaacatcaggctgggcttgagcatctattcctgctcaaaatttcgcaggcttctcagaagaaaatccaaaccccttacagtgacccagtttgcccttgaggcctccacccacacccccttccccccagtcttagggggtggcctggctgttcccttcaacggcaacgctctgcctccattgttggcctcctctgcagggagggactgt

SEQ ID NO: 305994 - DNA, 2586 bp, Homo sapiens
ggtcacggggcggggccgaggcggaagcgcccgcagcccggtaccggctcctcctgggctccctctagcgccttccccccggcccgactccgctggtcagcgccaagtgacttacgcccccgaccctgagcccggaccgctaggcgaggaggatcagatctccgctcgagaatctgaaggtgccctggtcctggaggagttccgtcccagcccgcggtctcccggtactgtcgggccccggccctctggagcttcaggaggcggccgtcagggtcggggagtatttgggtccggggtctcagggaagggcggcgcctgggtctgcggtatcggaaagagcctgctggagccaagtagccctccctctcttgggacagacccctcggtcccatgtccatgggggcaccgcggtccctcctcctggccctggctgctggcctggccgttgcccgtccgcccaacatcgtgctgatctttgccgacgacctcggctatggggacctgggctgctatgggcaccccagctctaccactcccaacctggaccagctggcggcgggagggctgcggttcacagacttctacgtgcctgtgtctctgtgcacaccctctagggccgccctcctgaccggccggctcccggttcggatgggcatgtaccctggcgtcctggtgcccagctcccgggggggcctgcccctggaggaggtgaccgtggccgaagtcctggctgcccgaggctacctcacaggaatggccggcaagtggcaccttggggtggggcctgagggggccttcctgcccccccatcagggcttccatcgatttctaggcatcccgtactcccacgaccagggcccctgccagaacctgacctgcttcccgccggccactccttgcgacggtggctgtgaccagggcctggtccccatcccactgttggccaacctgtccgtggaggcgcagcccccctggctgcccggactagaggcccgctacatggctttcgcccatgacctcatggccgacgcccagcgccaggatcgccccttcttcctgtactatgcctctcaccacacccactaccctcagttcagtgggcagagctttgcagagcgttcaggccgcgggccatttggggactccctgatggagctggatgcagctgtggggaccctgatgacagccataggggacctggggctgcttgaagagacgctggtcatcttcactgcagacaatggacctgagaccatgcgtatgtcccgaggcggctgctccggtctcttgcggtgtggaaagggaacgacctacgagggcggtgtccgagagcctgccttggccttctggccaggtcatatcgctcccggcgtgacccacgagctggccagctccctggacctgctgcctaccctggcagccctggctggggccccactgcccaatgtcaccttggatggctttgacctcagccccctgctgctgggcacaggcaagagccctcggcagtctctcttcttctacccgtcctacccagacgaggtccgtggggtttttgctgtgcggactggaaagtacaaggctcacttcttcacccagggctctgcccacagtgataccactgcagaccctgcctgccacgcctccagctctctgactgctcatgagcccccgctgctctatgacctgtccaaggaccctggtgagaactacaacctgctggggggtgtggccggggccaccccagaggtgctgcaagccctgaaacagcttcagctgctcaaggcccagttagacgcagctgtgaccttcggccccagccaggtggcccggggcgaggaccccgccctgcagatctgctgtcatcctggctgcaccccccgcccagcttgctgccattgcccagatccccatgcctgagggcccctcggctggcctgggcatgtgatggctcctcactgggagcctgtgggggaggctcaggtgtctggagggggtttgtgcctgataacgtaataacaccagtggagacttgcaaaaaaaaaaaaaaaaaaaaaaaaaaaaaaaaaaaaaaaaaaaaaaaaaaaaaaaaaaaaaaaaaaaaaaaaaaaaaaaaaaaaagggggggggcccaaaaatactatccctgagggggggccccaataagatagccaactaacgcccactattatgtaaaaaaaggagggccccccaaaaggaggagcgtctattaaaaaaagaagaacgagaatgcggccgctaatataaaaaacactgctgagtggagaggagaaaaaactatcgcgactgggattctttggaaagaacacaccctacttgagccggcggggagcacaaaaatgggggaacactcatcctctccagcgaataaattataaccccactgtgcgggagcataaaaattattatacttttgtgtaagttgtattctgcagggttaaacaagcgacggcgcctcatagtgtttcggtcgacaaaaacatttgcttctcggcgcatatttttttcttcgcagaaatatttttaacgcggcacaatgaatatataccccccatactctcatcc

SEQ ID NO: 305995 - DNA, 2639 bp, Homo sapiens
ggtcacggggcggggccgaggcggaagcgcccgcagcccggtaccggctcctcctgggctccctctagcgccttccccccggcccgactccgctggtcagcgccaagtgacttacgcccccgaccctgagcccggaccgctaggcgaggaggatcagatctccgctcgagaatctgaaggtgccctggtcctggaggagttccgtcccagcccgcggtctcccggtactgtcgggccccggccctctggagcttcaggaggcggccgtcagggtcggggagtatttgggtccggggtctcagggaagggcggcgcctgggtctgcggtatcggaaagagcctgctggagccaagtagccctccctctcttgggacagacccctcggtcccatgtccatgggggcaccgcggtccctcctcctggccctggctgctggcctggccgttgcccgtccgcccaacatcgtgctgatctttgccgacgacctcggctatggggacctgggctgctatgggcaccccagctctaccactcccaacctggaccagctggcggcgggagggctgcggttcacagacttctacgtgcctgtgtctctgtgcacaccctctagggccgccctcctgaccggccggctcccggttcggatgggcatgtaccctggcgtcctggtgcccagctcccgggggggcctgcccctggaggaggtgaccgtggccgaagtcctggctgcccgaggctacctcacaggaatggccggcaagtggcaccttggggtggggcctgagggggccttcctgcccccccatcagggcttccatcgatttctaggcatcccgtactcccacgaccagggcccctgccagaacctgacctgcttcccgccggccactccttgcgacggtggctgtgaccagggcctggtccccatcccactgttggccaacctgtccgtggaggcgcagcccccctggctgcccggactagaggcccgctacatggctttcgcccatgacctcatggccgacgcccagcgccaggatcgccccttcttcctgtactatgcctctcaccacacccactaccctcagttcagtgggcagagctttgcagagcgttcaggccgcgggccatttggggactccctgatggagctggatgcagctgtggggaccctgatgacagccataggggacctggggctgcttgaagagacgctggtcatcttcactgcagacaatggacctgagaccatgcgtatgtcccgaggcggctgctccggtctcttgcggtgtggaaagggaacgacctacgagggcggtgtccgagagcctgccttggccttctggccaggtcatatcgctcccggcgtgacccacgagctggccagctccctggacctgctgcctaccctggcagccctggctggggccccactgcccaatgtcaccttggatggctttgacctcagccccctgctgctgggcacaggcaagagccctcggcagtctctcttcttctacccgtcctacccagacgaggtccgtggggtttttgctgtgcggactggaaagtacaaggctcacttcttcacccagggctctgcccacagtgataccactgcagaccctgcctgccacgcctccagctctctgactgctcatgagcccccgctgctctatgacctgtccaaggaccctggtgagaactacaacctgctggggggtgtggccggggccaccccagaggtgctgcaagccctgaaacagcttcagctgctcaaggcccagttagacgcagctgtgaccttcggccccagccaggtggcccggggcgaggaccccgccctgcagatctgctgtcatcctggctgcaccccccgcccagcttgctgccattgcccagatccccatgcctgagggcccctcggctggcctgggcatgtgatggctcctcactgggagcctgtgggggaggctcaggtgtctggagggggtttgtgcctgataacgtaataacaccagtggagacttgcagatgtgacaattcgtccaatcctggggtaatgctgtgtgctggtgccggtcccctgtggtacgaatgaggaaactgaggtgcagagaggttcaggacttgtacaagatcacccagccagaaagaggttgggctgggatttgaaccctggtgtcgtggctctggaagctgccctggcgccccaaagtgctgggattacaggtgtgaaccaccacacctggccaacaatatttgttttaattagccaggcgtggtagcatttgtcctagcaatttgggaggttgaggtgggagaatcacttcagcccactaggtcgaggctgtagtgagctataattgtaccactgcactccagcctcggggacagagtgagaccctgtctgcaaataaacaaataaaacatcaggctgggcttgagcatctattcctgctcaaaatttcgcaggcttctcagaagaaaatccaaaccccttacagtgacccagtttgcccttgaggcctccacccacacccccttccccccagtcttagggggtggcctggctgttcccttcaacggcaacgctctgcctccattgttggcctcctctgcagggagggactgt

SEQ ID NO: 305996 - DNA, 2196 bp, Homo sapiens
ggtcacggggcggggccgaggcggaagcgcccgcagcccggtaccggctcctcctgggctccctctagcgccttccccccggcccgactccgctggtcagcgccaagtgacttacgcccccgaccctgagcccggaccgctaggcgaggaggatcagatctccgctcgagaatctgaaggtgccctggtcctggaggagttccgtcccagcccgcggtctcccgggccgccctcctgaccggccggctcccggttcggatgggcatgtaccctggcgtcctggtgcccagctcccgggggggcctgcccctggaggaggtgaccgtggccgaagtcctggctgcccgaggctacctcacaggaatggccggcaagtggcaccttggggtggggcctgagggggccttcctgcccccccatcagggcttccatcgatttctaggcatcccgtactcccacgaccagggcccctgccagaacctgacctgcttcccgccggccactccttgcgacggtggctgtgaccagggcctggtccccatcccactgttggccaacctgtccgtggaggcgcagcccccctggctgcccggactagaggcccgctacatggctttcgcccatgacctcatggccgacgcccagcgccaggatcgccccttcttcctgtactatgcctctcaccacacccactaccctcagttcagtgggcagagctttgcagagcgttcaggccgcgggccatttggggactccctgatggagctggatgcagctgtggggaccctgatgacagccataggggacctggggctgcttgaagagacgctggtcatcttcactgcagacaatggacctgagaccatgcgtatgtcccgaggcggctgctccggtctcttgcggtgtggaaagggaacgacctacgagggcggtgtccgagagcctgccttggccttctggccaggtcatatcgctcccggcgtgacccacgagctggccagctccctggacctgctgcctaccctggcagccctggctggggccccactgcccaatgtcaccttggatggctttgacctcagccccctgctgctgggcacaggcaagagccctcggcagtctctcttcttctacccgtcctacccagacgaggtccgtggggtttttgctgtgcggactggaaagtacaaggctcacttcttcacccagggctctgcccacagtgataccactgcagaccctgcctgccacgcctccagctctctgactgctcatgagcccccgctgctctatgacctgtccaaggaccctggtgagaactacaacctgctggggggtgtggccggggccaccccagaggtgctgcaagccctgaaacagcttcagctgctcaaggcccagttagacgcagctgtgaccttcggccccagccaggtggcccggggcgaggaccccgccctgcagatctgctgtcatcctggctgcaccccccgcccagcttgctgccattgcccagatccccatgcctgagggcccctcggctggcctgggcatgtgatggctcctcactgggagcctgtgggggaggctcaggtgtctggagggggtttgtgcctgataacgtaataacaccagtggagacttgcaaaaaaaaaaaaaaaaaaaaaaaaaaaaaaaaaaaaaaaaaaaaaaaaaaaaaaaaaaaaaaaaaaaaaaaaaaaaaaaaaaaaagggggggggcccaaaaatactatccctgagggggggccccaataagatagccaactaacgcccactattatgtaaaaaaaggagggccccccaaaaggaggagcgtctattaaaaaaagaagaacgagaatgcggccgctaatataaaaaacactgctgagtggagaggagaaaaaactatcgcgactgggattctttggaaagaacacaccctacttgagccggcggggagcacaaaaatgggggaacactcatcctctccagcgaataaattataaccccactgtgcgggagcataaaaattattatacttttgtgtaagttgtattctgcagggttaaacaagcgacggcgcctcatagtgtttcggtcgacaaaaacatttgcttctcggcgcatatttttttcttcgcagaaatatttttaacgcggcacaatgaatatataccccccatactctcatcc

SEQ ID NO: 305997 - DNA, 2433 bp, Homo sapiens
ggtcacggggcggggccgaggcggaagcgcccgcagcccggtaccggctcctcctgggctccctctagcgccttccccccggcccgactccgctggtcagcgccaagtgacttacgcccccgaccctgagcccggaccgctaggcgaggaggatcagatctccgctcgagaatctgaaggtgccctggtcctggaggagttccgtcccagcccgcggtctcccgacccctcggtcccatgtccatgggggcaccgcggtccctcctcctggccctggctgctggcctggccgttgcccgtccgcccaacatcgtgctgatctttgccgacgacctcggctatggggacctgggctgctatgggcaccccagctctaccactcccaacctggaccagctggcggcgggagggctgcggttcacagacttctacgtgcctgtgtctctgtgcacaccctctagggccgccctcctgaccggccggctcccggttcggatgggcatgtaccctggcgtcctggtgcccagctcccgggggggcctgcccctggaggaggtgaccgtggccgaagtcctggctgcccgaggctacctcacaggaatggccggcaagtggcaccttggggtggggcctgagggggccttcctgcccccccatcagggcttccatcgatttctaggcatcccgtactcccacgaccagggcccctgccagaacctgacctgcttcccgccggccactccttgcgacggtggctgtgaccagggcctggtccccatcccactgttggccaacctgtccgtggaggcgcagcccccctggctgcccggactagaggcccgctacatggctttcgcccatgacctcatggccgacgcccagcgccaggatcgccccttcttcctgtactatgcctctcaccacacccactaccctcagttcagtgggcagagctttgcagagcgttcaggccgcgggccatttggggactccctgatggagctggatgcagctgtggggaccctgatgacagccataggggacctggggctgcttgaagagacgctggtcatcttcactgcagacaatggacctgagaccatgcgtatgtcccgaggcggctgctccggtctcttgcggtgtggaaagggaacgacctacgagggcggtgtccgagagcctgccttggccttctggccaggtcatatcgctcccggcgtgacccacgagctggccagctccctggacctgctgcctaccctggcagccctggctggggccccactgcccaatgtcaccttggatggctttgacctcagccccctgctgctgggcacaggcaagagccctcggcagtctctcttcttctacccgtcctacccagacgaggtccgtggggtttttgctgtgcggactggaaagtacaaggctcacttcttcacccagggctctgcccacagtgataccactgcagaccctgcctgccacgcctccagctctctgactgctcatgagcccccgctgctctatgacctgtccaaggaccctggtgagaactacaacctgctggggggtgtggccggggccaccccagaggtgctgcaagccctgaaacagcttcagctgctcaaggcccagttagacgcagctgtgaccttcggccccagccaggtggcccggggcgaggaccccgccctgcagatctgctgtcatcctggctgcaccccccgcccagcttgctgccattgcccagatccccatgcctgagggcccctcggctggcctgggcatgtgatggctcctcactgggagcctgtgggggaggctcaggtgtctggagggggtttgtgcctgataacgtaataacaccagtggagacttgcaaaaaaaaaaaaaaaaaaaaaaaaaaaaaaaaaaaaaaaaaaaaaaaaaaaaaaaaaaaaaaaaaaaaaaaaaaaaaaaaaaaaagggggggggcccaaaaatactatccctgagggggggccccaataagatagccaactaacgcccactattatgtaaaaaaaggagggccccccaaaaggaggagcgtctattaaaaaaagaagaacgagaatgcggccgctaatataaaaaacactgctgagtggagaggagaaaaaactatcgcgactgggattctttggaaagaacacaccctacttgagccggcggggagcacaaaaatgggggaacactcatcctctccagcgaataaattataaccccactgtgcgggagcataaaaattattatacttttgtgtaagttgtattctgcagggttaaacaagcgacggcgcctcatagtgtttcggtcgacaaaaacatttgcttctcggcgcatatttttttcttcgcagaaatatttttaacgcggcacaatgaatatataccccccatactctcatcc

SEQ ID NO: 305998 - DNA, 2568 bp, Homo sapiens
ggtcacggggcggggccgaggcggaagcgcccgcagcccggtaccggctcctcctgggctccctctagcgccttccccccggcccgactccgctggtcagcgccaagtgacttacgcccccgaccctgagcccggaccgctaggcgaggaggatcagatctccgctcgagaatctgaaggtgccctggtcctggaggagttccgtcccagcccgcggtctcccggtactgtcgggccccggccctctggagcttcaggaggcggccgtcagggtcggggagtatttgggtccggggtctcagggaagggcggcgcctgggtctgcggtatcggaaagagcctgctggagccaagtagccctccctctcttgggacagacccctcggtcccatgtccatgggggcaccgcggtccctcctcctggccctggctgctggcctggccgttgcccgtccgcccaacatcgtgctgatctttgccgacgacctcggctatggggacctgggctgctatgggcaccccagctctaccactcccaacctggaccagctggcggcgggagggctgcggttcacagacttctacgtgcctgtgtctctgtgcacaccctctagggccgccctcctgaccggccggctcccggttcggatgggcatgtaccctggcgtcctggtgcccagctcccgggggggcctgcccctggaggaggtgaccgtggccgaagtcctggctgcccgaggctacctcacaggaatggccggcaagtggcaccttggggtggggcctgagggggccttcctgcccccccatcagggcttccatcgatttctaggcatcccgtactcccacgaccagggcccctgccagaacctgacctgcttcccgccggccactccttgcgacggtggctgtgaccagggcctggtccccatcccactgttggccaacctgtccgtggaggcgcagcccccctggctgcccggactagaggcccgctacatggctttcgcccatgacctcatggccgacgcccagcgccaggatcgccccttcttcctgtactatgcctctcacttcagtgggcagagctttgcagagcgttcaggccgcgggccatttggggactccctgatggagctggatgcagctgtggggaccctgatgacagccataggggacctggggctgcttgaagagacgctggtcatcttcactgcagacaatggacctgagaccatgcgtatgtcccgaggcggctgctccggtctcttgcggtgtggaaagggaacgacctacgagggcggtgtccgagagcctgccttggccttctggccaggtcatatcgctcccggcgtgacccacgagctggccagctccctggacctgctgcctaccctggcagccctggctggggccccactgcccaatgtcaccttggatggctttgacctcagccccctgctgctgggcacaggcaagagccctcggcagtctctcttcttctacccgtcctacccagacgaggtccgtggggtttttgctgtgcggactggaaagtacaaggctcacttcttcacccagggctctgcccacagtgataccactgcagaccctgcctgccacgcctccagctctctgactgctcatgagcccccgctgctctatgacctgtccaaggaccctggtgagaactacaacctgctggggggtgtggccggggccaccccagaggtgctgcaagccctgaaacagcttcagctgctcaaggcccagttagacgcagctgtgaccttcggccccagccaggtggcccggggcgaggaccccgccctgcagatctgctgtcatcctggctgcaccccccgcccagcttgctgccattgcccagatccccatgcctgagggcccctcggctggcctgggcatgtgatggctcctcactgggagcctgtgggggaggctcaggtgtctggagggggtttgtgcctgataacgtaataacaccagtggagacttgcaaaaaaaaaaaaaaaaaaaaaaaaaaaaaaaaaaaaaaaaaaaaaaaaaaaaaaaaaaaaaaaaaaaaaaaaaaaaaaaaaaaaagggggggggcccaaaaatactatccctgagggggggccccaataagatagccaactaacgcccactattatgtaaaaaaaggagggccccccaaaaggaggagcgtctattaaaaaaagaagaacgagaatgcggccgctaatataaaaaacactgctgagtggagaggagaaaaaactatcgcgactgggattctttggaaagaacacaccctacttgagccggcggggagcacaaaaatgggggaacactcatcctctccagcgaataaattataaccccactgtgcgggagcataaaaattattatacttttgtgtaagttgtattctgcagggttaaacaagcgacggcgcctcatagtgtttcggtcgacaaaaacatttgcttctcggcgcatatttttttcttcgcagaaatatttttaacgcggcacaatgaatatataccccccatactctcatcc

SEQ ID NO: 305999 - DNA, 2481 bp, Homo sapiens
ggtcacggggcggggccgaggcggaagcgcccgcagcccggtaccggctcctcctgggctccctctagcgccttccccccggcccgactccgctggtcagcgccaagtgacttacgcccccgaccctgagcccggaccgctaggcgaggaggatcagatctccgctcgagaatctgaaggtgccctggtcctggaggagttccgtcccagcccgcggtctcccggtactgtcgggccccggccctctggagcttcaggaggcggccgtcaggacccctcggtcccatgtccatgggggcaccgcggtccctcctcctggccctggctgctggcctggccgttgcccgtccgcccaacatcgtgctgatctttgccgacgacctcggctatggggacctgggctgctatgggcaccccagctctaccactcccaacctggaccagctggcggcgggagggctgcggttcacagacttctacgtgcctgtgtctctgtgcacaccctctagggccgccctcctgaccggccggctcccggttcggatgggcatgtaccctggcgtcctggtgcccagctcccgggggggcctgcccctggaggaggtgaccgtggccgaagtcctggctgcccgaggctacctcacaggaatggccggcaagtggcaccttggggtggggcctgagggggccttcctgcccccccatcagggcttccatcgatttctaggcatcccgtactcccacgaccagggcccctgccagaacctgacctgcttcccgccggccactccttgcgacggtggctgtgaccagggcctggtccccatcccactgttggccaacctgtccgtggaggcgcagcccccctggctgcccggactagaggcccgctacatggctttcgcccatgacctcatggccgacgcccagcgccaggatcgccccttcttcctgtactatgcctctcaccacacccactaccctcagttcagtgggcagagctttgcagagcgttcaggccgcgggccatttggggactccctgatggagctggatgcagctgtggggaccctgatgacagccataggggacctggggctgcttgaagagacgctggtcatcttcactgcagacaatggacctgagaccatgcgtatgtcccgaggcggctgctccggtctcttgcggtgtggaaagggaacgacctacgagggcggtgtccgagagcctgccttggccttctggccaggtcatatcgctcccggcgtgacccacgagctggccagctccctggacctgctgcctaccctggcagccctggctggggccccactgcccaatgtcaccttggatggctttgacctcagccccctgctgctgggcacaggcaagagccctcggcagtctctcttcttctacccgtcctacccagacgaggtccgtggggtttttgctgtgcggactggaaagtacaaggctcacttcttcacccagggctctgcccacagtgataccactgcagaccctgcctgccacgcctccagctctctgactgctcatgagcccccgctgctctatgacctgtccaaggaccctggtgagaactacaacctgctggggggtgtggccggggccaccccagaggtgctgcaagccctgaaacagcttcagctgctcaaggcccagttagacgcagctgtgaccttcggccccagccaggtggcccggggcgaggaccccgccctgcagatctgctgtcatcctggctgcaccccccgcccagcttgctgccattgcccagatccccatgcctgagggcccctcggctggcctgggcatgtgatggctcctcactgggagcctgtgggggaggctcaggtgtctggagggggtttgtgcctgataacgtaataacaccagtggagacttgcaaaaaaaaaaaaaaaaaaaaaaaaaaaaaaaaaaaaaaaaaaaaaaaaaaaaaaaaaaaaaaaaaaaaaaaaaaaaaaaaaaaaagggggggggcccaaaaatactatccctgagggggggccccaataagatagccaactaacgcccactattatgtaaaaaaaggagggccccccaaaaggaggagcgtctattaaaaaaagaagaacgagaatgcggccgctaatataaaaaacactgctgagtggagaggagaaaaaactatcgcgactgggattctttggaaagaacacaccctacttgagccggcggggagcacaaaaatgggggaacactcatcctctccagcgaataaattataaccccactgtgcgggagcataaaaattattatacttttgtgtaagttgtattctgcagggttaaacaagcgacggcgcctcatagtgtttcggtcgacaaaaacatttgcttctcggcgcatatttttttcttcgcagaaatatttttaacgcggcacaatgaatatataccccccatactctcatcc

SEQ ID NO: 306000 - DNA, 2388 bp, Homo sapiens
ggtcacggggcggggccgaggcggaagcgcccgcagcccggtaccggctcctcctgggctccctctagcgccttccccccggcccgactccgctggtcagcgccaagtgacttacgcccccgaccctgagcccggaccgctaggcgaggaggatcagatctccgctcgagaatctgaagacccctcggtcccatgtccatgggggcaccgcggtccctcctcctggccctggctgctggcctggccgttgcccgtccgcccaacatcgtgctgatctttgccgacgacctcggctatggggacctgggctgctatgggcaccccagctctaccactcccaacctggaccagctggcggcgggagggctgcggttcacagacttctacgtgcctgtgtctctgtgcacaccctctagggccgccctcctgaccggccggctcccggttcggatgggcatgtaccctggcgtcctggtgcccagctcccgggggggcctgcccctggaggaggtgaccgtggccgaagtcctggctgcccgaggctacctcacaggaatggccggcaagtggcaccttggggtggggcctgagggggccttcctgcccccccatcagggcttccatcgatttctaggcatcccgtactcccacgaccagggcccctgccagaacctgacctgcttcccgccggccactccttgcgacggtggctgtgaccagggcctggtccccatcccactgttggccaacctgtccgtggaggcgcagcccccctggctgcccggactagaggcccgctacatggctttcgcccatgacctcatggccgacgcccagcgccaggatcgccccttcttcctgtactatgcctctcaccacacccactaccctcagttcagtgggcagagctttgcagagcgttcaggccgcgggccatttggggactccctgatggagctggatgcagctgtggggaccctgatgacagccataggggacctggggctgcttgaagagacgctggtcatcttcactgcagacaatggacctgagaccatgcgtatgtcccgaggcggctgctccggtctcttgcggtgtggaaagggaacgacctacgagggcggtgtccgagagcctgccttggccttctggccaggtcatatcgctcccggcgtgacccacgagctggccagctccctggacctgctgcctaccctggcagccctggctggggccccactgcccaatgtcaccttggatggctttgacctcagccccctgctgctgggcacaggcaagagccctcggcagtctctcttcttctacccgtcctacccagacgaggtccgtggggtttttgctgtgcggactggaaagtacaaggctcacttcttcacccagggctctgcccacagtgataccactgcagaccctgcctgccacgcctccagctctctgactgctcatgagcccccgctgctctatgacctgtccaaggaccctggtgagaactacaacctgctggggggtgtggccggggccaccccagaggtgctgcaagccctgaaacagcttcagctgctcaaggcccagttagacgcagctgtgaccttcggccccagccaggtggcccggggcgaggaccccgccctgcagatctgctgtcatcctggctgcaccccccgcccagcttgctgccattgcccagatccccatgcctgagggcccctcggctggcctgggcatgtgatggctcctcactgggagcctgtgggggaggctcaggtgtctggagggggtttgtgcctgataacgtaataacaccagtggagacttgcaaaaaaaaaaaaaaaaaaaaaaaaaaaaaaaaaaaaaaaaaaaaaaaaaaaaaaaaaaaaaaaaaaaaaaaaaaaaaaaaaaaaagggggggggcccaaaaatactatccctgagggggggccccaataagatagccaactaacgcccactattatgtaaaaaaaggagggccccccaaaaggaggagcgtctattaaaaaaagaagaacgagaatgcggccgctaatataaaaaacactgctgagtggagaggagaaaaaactatcgcgactgggattctttggaaagaacacaccctacttgagccggcggggagcacaaaaatgggggaacactcatcctctccagcgaataaattataaccccactgtgcgggagcataaaaattattatacttttgtgtaagttgtattctgcagggttaaacaagcgacggcgcctcatagtgtttcggtcgacaaaaacatttgcttctcggcgcatatttttttcttcgcagaaatatttttaacgcggcacaatgaatatataccccccatactctcatcc

SEQ ID NO: 306001 - DNA, 2151 bp, Homo sapiens
ggtcacggggcggggccgaggcggaagcgcccgcagcccggtaccggctcctcctgggctccctctagcgccttccccccggcccgactccgctggtcagcgccaagtgacttacgcccccgaccctgagcccggaccgctaggcgaggaggatcagatctccgctcgagaatctgaagggccgccctcctgaccggccggctcccggttcggatgggcatgtaccctggcgtcctggtgcccagctcccgggggggcctgcccctggaggaggtgaccgtggccgaagtcctggctgcccgaggctacctcacaggaatggccggcaagtggcaccttggggtggggcctgagggggccttcctgcccccccatcagggcttccatcgatttctaggcatcccgtactcccacgaccagggcccctgccagaacctgacctgcttcccgccggccactccttgcgacggtggctgtgaccagggcctggtccccatcccactgttggccaacctgtccgtggaggcgcagcccccctggctgcccggactagaggcccgctacatggctttcgcccatgacctcatggccgacgcccagcgccaggatcgccccttcttcctgtactatgcctctcaccacacccactaccctcagttcagtgggcagagctttgcagagcgttcaggccgcgggccatttggggactccctgatggagctggatgcagctgtggggaccctgatgacagccataggggacctggggctgcttgaagagacgctggtcatcttcactgcagacaatggacctgagaccatgcgtatgtcccgaggcggctgctccggtctcttgcggtgtggaaagggaacgacctacgagggcggtgtccgagagcctgccttggccttctggccaggtcatatcgctcccggcgtgacccacgagctggccagctccctggacctgctgcctaccctggcagccctggctggggccccactgcccaatgtcaccttggatggctttgacctcagccccctgctgctgggcacaggcaagagccctcggcagtctctcttcttctacccgtcctacccagacgaggtccgtggggtttttgctgtgcggactggaaagtacaaggctcacttcttcacccagggctctgcccacagtgataccactgcagaccctgcctgccacgcctccagctctctgactgctcatgagcccccgctgctctatgacctgtccaaggaccctggtgagaactacaacctgctggggggtgtggccggggccaccccagaggtgctgcaagccctgaaacagcttcagctgctcaaggcccagttagacgcagctgtgaccttcggccccagccaggtggcccggggcgaggaccccgccctgcagatctgctgtcatcctggctgcaccccccgcccagcttgctgccattgcccagatccccatgcctgagggcccctcggctggcctgggcatgtgatggctcctcactgggagcctgtgggggaggctcaggtgtctggagggggtttgtgcctgataacgtaataacaccagtggagacttgcaaaaaaaaaaaaaaaaaaaaaaaaaaaaaaaaaaaaaaaaaaaaaaaaaaaaaaaaaaaaaaaaaaaaaaaaaaaaaaaaaaaaagggggggggcccaaaaatactatccctgagggggggccccaataagatagccaactaacgcccactattatgtaaaaaaaggagggccccccaaaaggaggagcgtctattaaaaaaagaagaacgagaatgcggccgctaatataaaaaacactgctgagtggagaggagaaaaaactatcgcgactgggattctttggaaagaacacaccctacttgagccggcggggagcacaaaaatgggggaacactcatcctctccagcgaataaattataaccccactgtgcgggagcataaaaattattatacttttgtgtaagttgtattctgcagggttaaacaagcgacggcgcctcatagtgtttcggtcgacaaaaacatttgcttctcggcgcatatttttttcttcgcagaaatatttttaacgcggcacaatgaatatataccccccatactctcatcc

SEQ ID NO: 306002 - DNA, 2379 bp, Homo sapiens
  misc_feature (96)..(96): n is a, c, g, or t
tgagagcggaagagacttcttctccagtcatcggggagctgtggtccccagaccagacggctgaggcctctcacgtcagccgctatggaggcagcnccagagacccggtactgaccctgagagccttcgcagggcccctgagtccagccaaggtgagctgctgtagaagcttctggaagtggtgcctggctgtccctatactgtgcggctgcggttcacagacttctacgtgcctgtgtctctgtgcacaccctctaggtaaagagggggccgcgcctcttccccgccccgaccctccatccctttcctcccaatggattgcaggggggcgggaaaaacgtctgtctctctctctagggaaggccacatttctgtctgtctcagggactctgtgacttgtcccgcagggccgccctcctgaccggccggctcccggttcggatgggcatgtaccctggcgtcctggtgcccagctcccgggggggcctgcccctggaggaggtgaccgtggccgaagtcctggctgcccgaggctacctcacaggaatggccggcaagtggcaccttggggtggggcctgagggggccttcctgcccccccatcagggcttccatcgatttctaggcatcccgtactcccacgaccagggcccctgccagaacctgacctgcttcccgccggccactccttgcgacggtggctgtgaccagggcctggtccccatcccactgttggccaacctgtccgtggaggcgcagcccccctggctgcccggactagaggcccgctacatggctttcgcccatgacctcatggccgacgcccagcgccaggatcgccccttcttcctgtactatgcctctcaccacacccactaccctcagttcagtgggcagagctttgcagagcgttcaggccgcgggccatttggggactccctgatggagctggatgcagctgtggggaccctgatgacagccataggggacctggggctgcttgaagagacgctggtcatcttcactgcagacaatggacctgagaccatgcgtatgtcccgaggcggctgctccggtctcttgcggtgtggaaagggaacgacctacgagggcggtgtccgagagcctgccttggccttctggccaggtcatatcgctcccggcgtgacccacgagctggccagctccctggacctgctgcctaccctggcagccctggctggggccccactgcccaatgtcaccttggatggctttgacctcagccccctgctgctgggcacaggcaagagccctcggcagtctctcttcttctacccgtcctacccagacgaggtccgtggggtttttgctgtgcggactggaaagtacaaggctcacttcttcacccagggctctgcccacagtgataccactgcagaccctgcctgccacgcctccagctctctgactgctcatgagcccccgctgctctatgacctgtccaaggaccctggtgagaactacaacctgctggggggtgtggccggggccaccccagaggtgctgcaagccctgaaacagcttcagctgctcaaggcccagttagacgcagctgtgaccttcggccccagccaggtggcccggggcgaggaccccgccctgcagatctgctgtcatcctggctgcaccccccgcccagcttgctgccattgcccagatccccatgcctgagggcccctcggctggcctgggcatgtgatggctcctcactgggagcctgtgggggaggctcaggtgtctggagggggtttgtgcctgataacgtaataacaccagtggagacttgcaaaaaaaaaaaaaaaaaaaaaaaaaaaaaaaaaaaaaaaaaaaaaaaaaaaaaaaaaaaaaaaaaaaaaaaaaaaaaaaaaaaaagggggggggcccaaaaatactatccctgagggggggccccaataagatagccaactaacgcccactattatgtaaaaaaaggagggccccccaaaaggaggagcgtctattaaaaaaagaagaacgagaatgcggccgctaatataaaaaacactgctgagtggagaggagaaaaaactatcgcgactgggattctttggaaagaacacaccctacttgagccggcggggagcacaaaaatgggggaacactcatcctctccagcgaataaattataaccccactgtgcgggagcataaaaattattatacttttgtgtaagttgtattctgcagggttaaacaagcgacggcgcctcatagtgtttcggtcgacaaaaacatttgcttctcggcgcatatttttttcttcgcagaaatatttttaacgcggcacaatgaatatataccccccatactctcatcc

SEQ ID NO: 306003 - DNA, 2298 bp, Homo sapiens
ggtcacggggcggggccgaggcggaagcgcccgcagcccggtaccggctcctcctgggctccctctagcgccttccccccggcccgactccgctggtcagcgccaagtgacttacgcccccgaccctgagcccggaccgctaggcgaggaggatcagatctccgctcgagaatctgaaggtgccctggtcctggaggagttccgtcccagcccgcggtctcccggtactgtcgggccccggccctctggagcttcaggaggcggccgtcagggtcggggagtatttgggtccggggtctcagggaagggcggcgcctgggtctgcggtatcggaaagagcctgctggagccaagtagccctccctctcttgggacagacccctcggtcccatgtccatgggggcaccgcggtccctcctcctggccctggctgctggcctggccgttgcccgtccgcccaacatcgtgctgatctttgccgacgacctcggctatggggacctgggctgctatgggcaccccagctctaccactcccaacctggaccagctggcggcgggagggctgcggttcacagacttctacgtgcctgtgtctctgtgcacaccctctagggccgccctcctgaccggccggctcccggttcggatgggcatgtaccctggcgtcctggtgcccagctcccgggggggcctgcccctggaggaggtgaccgtggccgaagtcctggctgcccgaggctacctcacaggaatggccggcaagtggcaccttggggtggggcctgagggggccttcctgcccccccatcagggcttccatcgatttctaggcatcccgtactcccacgaccagtccctgatggagctggatgcagctgtggggaccctgatgacagccataggggacctggggctgcttgaagagacgctggtcatcttcactgcagacaatggacctgagaccatgcgtatgtcccgaggcggctgctccggtctcttgcggtgtggaaagggaacgacctacgagggcggtgtccgagagcctgccttggccttctggccaggtcatatcgctcccggcgtgacccacgagctggccagctccctggacctgctgcctaccctggcagccctggctggggccccactgcccaatgtcaccttggatggctttgacctcagccccctgctgctgggcacaggcaagagccctcggcagtctctcttcttctacccgtcctacccagacgaggtccgtggggtttttgctgtgcggactggaaagtacaaggctcacttcttcacccagggctctgcccacagtgataccactgcagaccctgcctgccacgcctccagctctctgactgctcatgagcccccgctgctctatgacctgtccaaggaccctggtgagaactacaacctgctggggggtgtggccggggccaccccagaggtgctgcaagccctgaaacagcttcagctgctcaaggcccagttagacgcagctgtgaccttcggccccagccaggtggcccggggcgaggaccccgccctgcagatctgctgtcatcctggctgcaccccccgcccagcttgctgccattgcccagatccccatgcctgagggcccctcggctggcctgggcatgtgatggctcctcactgggagcctgtgggggaggctcaggtgtctggagggggtttgtgcctgataacgtaataacaccagtggagacttgcaaaaaaaaaaaaaaaaaaaaaaaaaaaaaaaaaaaaaaaaaaaaaaaaaaaaaaaaaaaaaaaaaaaaaaaaaaaaaaaaaaaaagggggggggcccaaaaatactatccctgagggggggccccaataagatagccaactaacgcccactattatgtaaaaaaaggagggccccccaaaaggaggagcgtctattaaaaaaagaagaacgagaatgcggccgctaatataaaaaacactgctgagtggagaggagaaaaaactatcgcgactgggattctttggaaagaacacaccctacttgagccggcggggagcacaaaaatgggggaacactcatcctctccagcgaataaattataaccccactgtgcgggagcataaaaattattatacttttgtgtaagttgtattctgcagggttaaacaagcgacggcgcctcatagtgtttcggtcgacaaaaacatttgcttctcggcgcatatttttttcttcgcagaaatatttttaacgcggcacaatgaatatataccccccatactctcatcc

SEQ ID NO: 306004 - DNA, 2560 bp, Homo sapiens
ggtcacggggcggggccgaggcggaagcgcccgcagcccggtaccggctcctcctgggctccctctagcgccttccccccggcccgactccgctggtcagcgccaagtgacttacgcccccgaccctgagcccggaccgctaggcgaggaggatcagatctccgctcgagaatctgaaggtgccctggtcctggaggagttccgtcccagcccgcggtctcccggtactgtcgggccccggccctctggagcttcaggaggcggccgtcagggtcggggagtatttgggtccggggtctcagggaagggcggcgcctgggtctgcggtatcggaaagagcctgctggagccaagtagccctccctctcttgggacagacccctcggtcccatgtccatgggggcaccgcggtccctcctcctggccctggctgctggcctggccgttgcccgtccgcccaacatcgtgctgatctttgccgacgacctcggctatggggacctgggctgctatgggcaccccagctctaccactcccaacctggaccagctggcggcgggagggctgcggttcacagacttctacgtgcctgtgtctctgtgcacaccctctagggccgccctcctgaccggccggctcccggttcggatgggcatgtaccctggcgtcctggtgcccagctcccgggggggcctgcccctggaggaggtgaccgtggccgaagtcctggctgcccgaggctacctcacaggaatggccggcaagtggcaccttggggtggggcctgagggggccttcctgcccccccatcagggcttccatcgatttctaggcatcccgtactcccacgaccagggcccctgccagaacctgacctgcttcccgccggccactccttgcgacggtggctgtgaccagggcctggtccccatcccactgttggccaacctgtccgtggaggcgcagcccccctggctgcccggactagaggcccgctacatggctttcgcccatgacctcatggccgacgcccagcgccaggatcgccccttcttcctgtactatgcctctcaccacacccactaccctcagttcagtgggcagagctttgcagagcgttcaggccgcgggccatttggggactccctgatggagctggatgcagctgtggggaccctgatgacagccataggggacctggggctgcttgaagagacgctggtcatcttcactgcagacaatggacctgagaccatgcgtatgtcccgaggcggctgctccggtctcttgcggtgtggaaagggaacgacctacgagggcggtgtccgagagcctgccttggccttctggccaggtcatatcgctcccggcgtgacccacgagctggccagctccctggacctgctgcctaccctggcagccctggctggggccccactgcccaatgtcaccttggatggctttgacctcagccccctgctgctgggcacaggcaagagccctcggcagtctctcttcttctacccgtcctacccagacgaggtccgtggggtttttgctgtgcggactggaaagctctgcccacagtgataccactgcagaccctgcctgccacgcctccagctctctgactgctcatgagcccccgctgctctatgacctgtccaaggaccctggtgagaactacaacctgctggggggtgtggccggggccaccccagaggtgctgcaagccctgaaacagcttcagctgctcaaggcccagttagacgcagctgtgaccttcggccccagccaggtggcccggggcgaggaccccgccctgcagatctgctgtcatcctggctgcaccccccgcccagcttgctgccattgcccagatccccatgcctgagggcccctcggctggcctgggcatgtgatggctcctcactgggagcctgtgggggaggctcaggtgtctggagggggtttgtgcctgataacgtaataacaccagtggagacttgcaaaaaaaaaaaaaaaaaaaaaaaaaaaaaaaaaaaaaaaaaaaaaaaaaaaaaaaaaaaaaaaaaaaaaaaaaaaaaaaaaaaaagggggggggcccaaaaatactatccctgagggggggccccaataagatagccaactaacgcccactattatgtaaaaaaaggagggccccccaaaaggaggagcgtctattaaaaaaagaagaacgagaatgcggccgctaatataaaaaacactgctgagtggagaggagaaaaaactatcgcgactgggattctttggaaagaacacaccctacttgagccggcggggagcacaaaaatgggggaacactcatcctctccagcgaataaattataaccccactgtgcgggagcataaaaattattatacttttgtgtaagttgtattctgcagggttaaacaagcgacggcgcctcatagtgtttcggtcgacaaaaacatttgcttctcggcgcatatttttttcttcgcagaaatatttttaacgcggcacaatgaatatataccccccatactctcatcc

SEQ ID NO: 306005 - DNA, 1419 bp, Homo sapiens
aggtgtggggccactggtcaccctcggtggctcagaggctgtggctccatggctcatgagcgcctcctgtgtcccagacctgagaccatgcgtatgtcccgaggcggctgctccggtctcttgcggtgtggaaagggaacgacctacgagggcggtgtccgagagcctgccttggccttctggccaggtcatatcgctcccggcgtgacccacgagctggccagctccctggacctgctgcctaccctggcagccctggctggggccccactgcccaatgtcaccttggatggctttgacctcagccccctgctgctgggcacaggcaagagccctcggcagtctctcttcttctacccgtcctacccagacgaggtccgtggggtttttgctgtgcggactggaaagtacaaggctcacttcttcacccagggctctgcccacagtgataccactgcagaccctgcctgccacgcctccagctctctgactgctcatgagcccccgctgctctatgacctgtccaaggaccctggtgagaactacaacctgctggggggtgtggccggggccaccccagaggtgctgcaagccctgaaacagcttcagctgctcaaggcccagttagacgcagctgtgaccttcggccccagccaggtggcccggggcgaggaccccgccctgcagatctgctgtcatcctggctgcaccccccgcccagcttgctgccattgcccagatccccatgcctgagggcccctcggctggcctgggcatgtgatggctcctcactgggagcctgtgggggaggctcaggtgtctggagggggtttgtgcctgataacgtaataacaccagtggagacttgcaaaaaaaaaaaaaaaaaaaaaaaaaaaaaaaaaaaaaaaaaaaaaaaaaaaaaaaaaaaaaaaaaaaaaaaaaaaaaaaaaaaaagggggggggcccaaaaatactatccctgagggggggccccaataagatagccaactaacgcccactattatgtaaaaaaaggagggccccccaaaaggaggagcgtctattaaaaaaagaagaacgagaatgcggccgctaatataaaaaacactgctgagtggagaggagaaaaaactatcgcgactgggattctttggaaagaacacaccctacttgagccggcggggagcacaaaaatgggggaacactcatcctctccagcgaataaattataaccccactgtgcgggagcataaaaattattatacttttgtgtaagttgtattctgcagggttaaacaagcgacggcgcctcatagtgtttcggtcgacaaaaacatttgcttctcggcgcatatttttttcttcgcagaaatatttttaacgcggcacaatgaatatataccccccatactctcatcc

SEQ ID NO: 306006 - DNA, 1372 bp, Homo sapiens
ggtcacggggcggggccgaggcggaagcgcccgcagcccggtaccggctcctcctgggctccctctagcgccttccccccggcccgactccgctggtcagcgccaagtgacttacgcccccgaccctgagcccggaccgctaggcgaggaggatcagatctccgctcgagaatctgaaggtgccctggtcctggaggagttccgtcccagcccgcggtctcccggtactgtcgggccccggccctctggagcttcaggaggcggccgtcagggtcggggagtatttgggtccggggtctcagggaagggcggcgcctgggtctgcggtatcggaaagagcctgctggagccaagtagccctccctctcttgggacagacccctcggtcccatgtccatgggggcaccgcggtccctcctcctggccctggctgctggcctggccgttgcccgtccgcccaacatcgtgctgatctttgccgacgacctcggctatggggacctgggctgctatgggcaccccagctctaccactcccaacctggaccagctggcggcgggagggctgcggttcacagacttctacgtgcctgtgtctctgtgcacaccctctagggccgccctcctgaccggccggctcccggttcggatgggcatgtaccctggcgtcctggtgcccagctcccgggggggcctgcccctggaggaggtgaccgtggccgaagtcctggctgcccgaggctacctcacaggaatggccggcaagtggcaccttggggtggggcctgagggggccttcctgcccccccatcagggcttccatcgatttctaggcatcccgtactcccacgaccagggcccctgccagaacctgacctgcttcccgccggccactccttgcgacggtggctgtgaccagggcctggtccccatcccactgttggccaacctgtccgtggaggcgcagcccccctggctgcccggactagaggcccgctacatggctttcgcccatgacctcatggccgacgcccagcgccaggatcgccccttcttcctgtactatgcctctcacgtaagtgatcttggcccaaccccctggctgcccgtgacccctacccagtgctaactccagtctttgcccccagcacacccactaccctcagttcagtgggcagagctttgcagagcgttcaggccgcgggccatttggggactccctgatggagctggatgcagctgtggggaccctgatgacagccataggggaccggagcagccgcctcgagacatacgcatggtctcaggtccattgtctgcagtgaagatgaccagcgactcttcaagcagccacccctgtggctctttgccta

SEQ ID NO: 306007 - DNA, 416 bp, Homo sapiens
ccctggccccaccaccccaaccttgatggcgaactgagtgactgaccagcctcctgcccccaggcgtgacccacgagctggccagctccctggacctgctgcctaccctggcagccctggctggggccccactgcccaatgtcaccttggatggctttgacctcagccccctgctgctgggcacaggcaaggtagggccggtgacccctgatcccagatccttggcccctgtcctggccttcccctggggtgagtgtgggcagtgcctgagagtctgtgcctcagtgcctcctgcactgagtggcatccaagtggcgccacctctcaggttcctgggtgggcaagaagcggtgcacgtccagggcctcccaccagggctggcagctccaggtatgtgcagtacttgggcgcctgcc

SEQ ID NO: 306008 - DNA, 699 bp, Homo sapiens
gaaaaagaaaaagcagaaagagaagtgattgtgagagaatttcaagaagaactggtcgatcaccttaaaacattttcaatatcagagtctccactggaaggtacatcacattgtcatattaatttgaatgagacatggacttcaaagaagaaattatttcaagtagaaattcaacctgaagaaaaacatgaagaattcagaaaactttttgaattaatatcattactgaactatactgcggaccaaataagaaagaaaaatcgtgaattagaagaagaggcaactggatataagaaatgcctagaaatgacaataaatatgttaaatgcatttgcaaatgaggacttcagttgccatggagacttaaatacagaccaactgaaaatggatattctgtttaagaagctaaaacagaagtttaatgatcttgtggccgagaaggaagctgtgtcttcagaatgtgtcaatttggccaaagacaatgaagttcttcatcaggagttattatctatgagaaatgtacaagagaaatgtgaaaaacttgagaaggataaaaagatgttggaagaagaagtattaaatcttaagacacatatggaaaaagatatggtagaacttggtaaactacaagaatataaatcggagctggatgaaagggcagtgcaggaaatagaaaaattagaagaaatccatttacag

SEQ ID NO: 306009 - DNA, 1193 bp, Homo sapiens
cgcccccgcggcaccgcctccgcgcctccatccagccggctccctccggccgcgaactgcccctccccgccccgcctcccggcgcgggtggccgaggcgtagcgctgcgacccccgcacccctgcgaacatggcgctgcgagtggtgcggagcgtgcgggccctgctctgcaccctgcgcgcggtcccgttacccgccgcgccctgcccgccgaggccctggcagctgggggtgggcgccgtccgtacgctgcgcactggacccgctctgctctcggtgcgtaaattcacagagaaacacgaatgggtaacaacagaaaatggcattggaacagtgggaatcagcaattttgcacaggaagcgttgggagatgttgtttattgtagtctccctgaagttgggacaaaattgaacaaacaagatgagtttggtgctttggaaagtgtgaaagctgctagtgaactctattctcctttatcaggagaagtaactgaaattaatgaagctcttgcagaaaatccaggacttgtaaacaaatcttgttatgaagatggttggctgatcaagatgacactgagtaacccttcagaactagatgaacttatgagtgaagaagcatatgagaaatacataaaatctattgaggagtgaaaatggaactcctaaataaactagtatgaaataacgcaagccagcagagttgtcttaaattagtggtggatagaagacttagaatagaaacttttagtattaccgatggggaaaaaaaaactactgttaacactgctaatgaaagaaaatgccctttaactttctaatgattatagataaatataatatgcgtctttttcacaatatcctatgatttttagactaggctctagtgttcagaattcatgaaattatccatggtaaaaactagttataaaaattacataattcaaagataacattgttattcttaagccttatataatattgtaacttgcatgtatccatacctggatttgggatgaaatacttaatgatctttccattggaaataactggaagtgaagaggttttgttgcttgtacagtgtcagatgaggaacaccactatcttaattttgcgatacactgcatttgctggtgctatttttatacagtgaagcaacagctttgcagcaaaataataaaatacttcttcgttaa

SEQ ID NO: 306010 - DNA, 824 bp, Homo sapiens
cgcccccgcggcaccgcctccgcgcctccatccagccggctccctccggccgcgaactgcccctccccgccccgcctcccggcgcgggtggccgaggcgtagcgctgcgacccccgcacccctgcgaacatggcgctgcgagtggtgcggagcgtgcgggccctgctctgcaccctgcgcgcggtcccgttacccgccgcgccctgcccgccgaggccctggcagctgggggtgggcgccgtccgtacgctgcgcactggacccgctctgctctcggtcgtgtgcgtgaatttctccttagagggaaacaactgaccctgggtatagcaatcaagaatgaatggcattggtagaacatggtagggacactcaggcaacttttggcatcaggaacgcgtttggcgagatcgttggttttgatttgtagatcttcccctggagagttggagtaccaaagaaattgtagtcaataccagaagatgagtttttgggttgcggtcttgggaaagattgtgaaaagctgggttagtgaaactcgtgattgcatccctttaatcaaggaaggaaggtagactggaacaatgggagtggaatgcgtctttgcaggaaatagatccagggtaggtttggtagacacgaaatcgtgtgttgatgacagactggtttggctggagtcgaaagattgacacttgagtgacgccctttcaggaaactagagtgaaactttgtgaagtgaagaaagcatatgaggagaatacataaaaatctattgagggaagttgagaaaatgggaaggttcctaaataaaatttaggttttgaaaa

SEQ ID NO: 306011 - DNA, 351 bp, Homo sapiens
taaggaaaactcaagaatgtagcccctccagtataaaatatatactaaatcttcattataggggattcagtgtttggcttattctgtttactggagggtttagttataacttcttagagatttttggttttgtcttgttttatttaggaagcgttgggagatgttgtttattgtagtctccctgaagttgggacaaaattgaacaaacaaggtgagtgttcttaggatcttagaatgatccatgccatgaattttgtttacattgaatagtaatttgtttgtaccctggattaattagagtgcttttttttttttggagacagtctgggcaacagagcaagactccgtttt

SEQ ID NO: 306012 - DNA, 1579 bp, Homo sapiens
cgcccccgcggcaccgcctccgcgcctccatccagccggctccctccggccgcgaactgcccctccccgccccgcctcccggcgcgggtggccgaggcgtagcgctgcgacccccgcacccctgcgaacatggcgctgcgagtggtgcggagcgtgcgggccctgctctgcaccctgcgcgcggtcccgttacccgccgcgccctgcccgccgaggccctggcagctgggggtgggcgccgtccgtacgctgcgcactggacccgctctgctctcggtgcgtaaattcacagagaaacacgaatgggtaacaacagaaaatggcattggaacagtgggaatcagcaattttgcacaggaagcgttgggagatgttgtttattgtagtctccctgaagttgggacaaaattgaacaaacaagatgagtttggtgctttggaaagtgtgaaagctgctagtgaactctattctcctttatcaggagaagtaactgaaattaatgaagctcttgcagaaaatccaggacttgtaaacaaatcttgttatgaagatggttggctgatcaagatgacactgagtaacccttcagaactagatgaacttatgagtgaagaagcatatgagaaatacataaaatctattgaggagtgaaaatggaactcctaaataaactagtatgaaataacgcaagccagcagagttgtcttaaattagtggtggatagaagacttagaatagaaacttttagtattaccgatggggaaaaaaaaactactgttaacactgctaatgaaagaaaatgccctttaactttctaatgattatagataaatataatatgcgtctttttcacaatatcctatgatttttagactaggctctagtgttcagaattcatgaaattatccatggtaaaaactagttataaaaattacataattcaaagataacattgttattcttaagccttatataatattgtaacttgcatgtatccatacctggatttgggatgaaatacttaatgatctttccattggaaataactggaagtgaagaggttttgttgcttgtacagtgtcagatgaggaacaccactatcttaattttgcgatacactgcatttgctggtgctatttttatacagtgaagcaacagctttgcagcaaaataataaaatacttcttcgttaatcatgtttgttttgatgttaatatttcatttagtaactctgctagtatttgtgaaagtgctaactttaacttacggaaagttactttttaaaaggaaatttaagccagaacaatgcaaagctccaagaaaatgttttctttagtcacaaatctggtttttcttaagccaagatctgtcacctttaacataataaaaaataaatcaccaactttgattttctatcatgcgaggtctgaagaaagaagaggaaagacagaggaaggtggaagttttgatcagtatagcacatggtgtttttaagttgttaaaccacgttcaggtttccacttaagtcatgggaataaaagtggacaaggactgaagctttatgagctcagataatgga

SEQ ID NO: 306013 - DNA, 1348 bp, Homo sapiens
  misc_feature (1197)..(1197): n is a, c, g, or t
cgcccccgcggcaccgcctccgcgcctccatccagccggctccctccggccgcgaactgcccctccccgccccgcctcccggcgcgggtggccgaggcgtagcgctgcgacccccgcacccctgcgaacatggcgctgcgagtggtgcggagcgtgcgggccctgctctgcaccctgcgcgcggtcccgttacccgccgcgccctgcccgccgaggccctggcagctgggggtgggcgccgtccgtacgctgcgcactggacccgctctgctctcggtgcgtaaattcacagagaaacacgaatgggtaacaacagaaaatggcattggaacagtgggaatcagcaattttgcacaggaagcgttgggagatgttgtttattgtagtctccctgaagttgggacaaaattgaacaaacaagatgagtttggtgctttggaaagtgtgaaagctgctagtgaactctattctcctttatcaggagaagtaactgaaattaatgaagctcttgcagaaaatccaggacttgtaaacaaatcttgttatgaagatggttggctgatcaagatgacactgagtaacccttcagaactagatgaacttatgagtgaagaagcatatgagaaatacataaaatctattgaggagtgaaaatggaactcctaaataaactagtatgaaataacgcaagccagcagagttgtcttaaattagtggtggatagaagacttagaatagaaacttttagtattaccgatggggaaaaaaaaactactgttaacactgctaatgaaagaaaatgccctttaactttctaatgattatagataaatataatatgcgtctttttcacaatatcctatgatttttagactaggctctagtgttcagaattcatgaaattatccatggtaaaaactagttataaaaattacataattcaaagataacattgttattcttaagccttatataatattgtaacttgcatgtatccatacctggatttgggatgaaatacttaatgatctttccattggaaataactggaagtgaagaggttttgttgcttgtacagtgtcagatgaggaacaccactatcttaattttgcgatacactgcatttgctggtgctatttttatacagtgaagcaacagctttgcagcaaaataataaaatacttcttcgttaaaaanaaacaacaaaaaaaccaacacgaaaatcaaccaacaaaacacaaaccacacaaacagaggccaatcatcaccatgagaacccaccacacaagagtacaacactaaaaaacacactccaaaaaaacccatcacaaccccaaacaaacaaaca

SEQ ID NO: 306014 - DNA, 1692 bp, Homo sapiens
cgcccccgcggcaccgcctccgcgcctccatccagccggctccctccggccgcgaactgcccctccccgccccgcctcccggcgcgggtggccgaggcgtagcgctgcgacccccgcacccctgcgaacatggcgctgcgagtggtgcggagcgtgcgggccctgctctgcaccctgcgcgcggtcccgttacccgccgcgccctgcccgccgaggccctggcagctgggggtgggcgccgtccgtacgctgcgcactggacccgctctgctctcgggttaaactcatttcttatatgagccatctttatgctgcctccctaaacctcatcaccccaaattttgtcttcagaggcacagatttttttttctgcaagacagaccagtaatatgcgtaaattcacagagaaacacgaatgggtaacaacagaaaatggcattggaacagtgggaatcagcaattttgcacaggaagcgttgggagatgttgtttattgtagtctccctgaagttgggacaaaattgaacaaacaagatgagtttggtgctttggaaagtgtgaaagctgctagtgaactctattctcctttatcaggagaagtaactgaaattaatgaagctcttgcagaaaatccaggacttgtaaacaaatcttgttatgaagatggttggctgatcaagatgacactgagtaacccttcagaactagatgaacttatgagtgaagaagcatatgagaaatacataaaatctattgaggagtgaaaatggaactcctaaataaactagtatgaaataacgcaagccagcagagttgtcttaaattagtggtggatagaagacttagaatagaaacttttagtattaccgatggggaaaaaaaaactactgttaacactgctaatgaaagaaaatgccctttaactttctaatgattatagataaatataatatgcgtctttttcacaatatcctatgatttttagactaggctctagtgttcagaattcatgaaattatccatggtaaaaactagttataaaaattacataattcaaagataacattgttattcttaagccttatataatattgtaacttgcatgtatccatacctggatttgggatgaaatacttaatgatctttccattggaaataactggaagtgaagaggttttgttgcttgtacagtgtcagatgaggaacaccactatcttaattttgcgatacactgcatttgctggtgctatttttatacagtgaagcaacagctttgcagcaaaataataaaatacttcttcgttaatcatgtttgttttgatgttaatatttcatttagtaactctgctagtatttgtgaaagtgctaactttaacttacggaaagttactttttaaaaggaaatttaagccagaacaatgcaaagctccaagaaaatgttttctttagtcacaaatctggtttttcttaagccaagatctgtcacctttaacataataaaaaataaatcaccaactttgattttctatcatgcgaggtctgaagaaagaagaggaaagacagaggaaggtggaagttttgatcagtatagcacatggtgtttttaagttgttaaaccacgttcaggtttccacttaagtcatgggaataaaagtggacaaggactgaagctttatgagctcagataatgga

SEQ ID NO: 306015 - DNA, 1373 bp, Homo sapiens
tgcaagcttggggtggatgtggcggccagatcccgttatctggctgcgcactggacccgctctgctctcggtgcgtaaattcacagagaaacacgaatgggtaacaacagaaaatggcattggaacagtgggaatcagcaattttgcacaggaagcgttgggagatgttgtttattgtagtctccctgaagttgggacaaaattgaacaaacaagatgagtttggtgctttggaaagtgtgaaagctgctagtgaactctattctcctttatcaggagaagtaactgaaattaatgaagctcttgcagaaaatccaggacttgtaaacaaatcttgttatgaagatggttggctgatcaagatgacactgagtaacccttcagaactagatgaacttatgagtgaagaagcatatgagaaatacataaaatctattgaggagtgaaaatggaactcctaaataaactagtatgaaataacgcaagccagcagagttgtcttaaattagtggtggatagaagacttagaatagaaacttttagtattaccgatggggaaaaaaaaactactgttaacactgctaatgaaagaaaatgccctttaactttctaatgattatagataaatataatatgcgtctttttcacaatatcctatgatttttagactaggctctagtgttcagaattcatgaaattatccatggtaaaaactagttataaaaattacataattcaaagataacattgttattcttaagccttatataatattgtaacttgcatgtatccatacctggatttgggatgaaatacttaatgatctttccattggaaataactggaagtgaagaggttttgttgcttgtacagtgtcagatgaggaacaccactatcttaattttgcgatacactgcatttgctggtgctatttttatacagtgaagcaacagctttgcagcaaaataataaaatacttcttcgttaatcatgtttgttttgatgttaatatttcatttagtaactctgctagtatttgtgaaagtgctaactttaacttacggaaagttactttttaaaaggaaatttaagccagaacaatgcaaagctccaagaaaatgttttctttagtcacaaatctggtttttcttaagccaagatctgtcacctttaacataataaaaaataaatcaccaactttgattttctatcatgcgaggtctgaagaaagaagaggaaagacagaggaaggtggaagttttgatcagtatagcacatggtgtttttaagttgttaaaccacgttcaggtttccacttaagtcatgggaataaaagtggacaaggactgaagctttatgagctcagataatgga

SEQ ID NO: 306016 - DNA, 1435 bp, Homo sapiens
cgcccccgcggcaccgcctccgcgcctccatccagccggctccctccggccgcgaactgcccctccccgccccgcctcccggcgcgggtggccgaggcgtagcgctgcgacccccgcacccctgcgaacatggcgctgcgagtggtgcggagcgtgcgggccctgctctgcaccctgcgcgcggtcccgttacccgccgcgccctgcccgccgaggccctggcagctgggggtgggcgccgtccgtacgctgcgcactggacccgctctgctctcggatgagtttggtgctttggaaagtgtgaaagctgctagtgaactctattctcctttatcaggagaagtaactgaaattaatgaagctcttgcagaaaatccaggacttgtaaacaaatcttgttatgaagatggttggctgatcaagatgacactgagtaacccttcagaactagatgaacttatgagtgaagaagcatatgagaaatacataaaatctattgaggagtgaaaatggaactcctaaataaactagtatgaaataacgcaagccagcagagttgtcttaaattagtggtggatagaagacttagaatagaaacttttagtattaccgatggggaaaaaaaaactactgttaacactgctaatgaaagaaaatgccctttaactttctaatgattatagataaatataatatgcgtctttttcacaatatcctatgatttttagactaggctctagtgttcagaattcatgaaattatccatggtaaaaactagttataaaaattacataattcaaagataacattgttattcttaagccttatataatattgtaacttgcatgtatccatacctggatttgggatgaaatacttaatgatctttccattggaaataactggaagtgaagaggttttgttgcttgtacagtgtcagatgaggaacaccactatcttaattttgcgatacactgcatttgctggtgctatttttatacagtgaagcaacagctttgcagcaaaataataaaatacttcttcgttaatcatgtttgttttgatgttaatatttcatttagtaactctgctagtatttgtgaaagtgctaactttaacttacggaaagttactttttaaaaggaaatttaagccagaacaatgcaaagctccaagaaaatgttttctttagtcacaaatctggtttttcttaagccaagatctgtcacctttaacataataaaaaataaatcaccaactttgattttctatcatgcgaggtctgaagaaagaagaggaaagacagaggaaggtggaagttttgatcagtatagcacatggtgtttttaagttgttaaaccacgttcaggtttccacttaagtcatgggaataaaagtggacaaggactgaagctttatgagctcagataatgga

SEQ ID NO: 306017 - DNA, 1309 bp, Homo sapiens
cgcccccgcggcaccgcctccgcgcctccatccagccggctccctccggccgcgaactgcccctccccgccccgcctcccggcgcgggtggccgaggcgtagcgctgcgacccccgcacccctgcgaacatggcgctgcgagtggtgcggagcgtgcgggccctgctctgcaccctgcgcgcggtcccgttacccgccgcgccctgcccgccgaggccctggcagctgggggtgggcgccgtccgtacgctgcgcactggacccgctctgctctcggtgcgtaaattcacagagaaacacgaatgggtaacaacagaaaatggcattggaacagtgggaatcagcaattttgcacaggaagcgttgggagatgttgtttattgtagtctccctgaagttgggacaaaattgaacaaacaagatgagtttggtgctttggaaagtgtgaaagctgctagtgaactctattctcctttatcaggagaagtaactgaaattaatgaagctcttgcagaaaatccaggacttgtaaacaaatcttgttatgaagatggttttgttttgttttgttttgttttgttttgtttgagatggagtttcgctcttcttgtccaagctggagtgcaatggcacaatcttgggctcactgcaacctccgcctcccgggttcaagtgattcttctgcctcagccccctgagtagctggggttacagcacaggaaaaagaagataaagtaggagagggatcagtttcacattcagtcctaagcagcaacacggttgagatgtaatcataaaagcaaatatttcacccaggacatggaaaagcggcggatcaccagaaagcagagagtcaaacgctgcaagcagaagcagtaagaagacgccacgtttggagcaaggtcttatttacacctgccatggtcatcggctcgctcttttaggtctccccaacccggcccccaaaaagaggttatatgcagaggtaatataatatatgtacttttgaaaataacaaagtcaccgtggagataatttcaaaacaatttattttcattttcagatacattggactatttcactgatgttaaaaagagtatgacttgtttaaattttttgttgtttcttttttgcagcctaatgttctgtaatagtaacttgcttccaagtaaagtatgaaaagttagtggaggggccatggctgtggtctctgataggtcaaactatactattttggaatgcgtggagttagaacaaagtttttattttgttattaattagtaaagcaataaataaaattgtcttacta

SEQ ID NO: 306018 - DNA, 1432 bp, Homo sapiens
aacccgcagctgcgtccatcagcatctccacactatctctttcgaccacctttgctatgtagatactcgtgctatgcagtcagtaagaaacactttctataactatctacctatatgctttagtcgtctgctggttggcaccccgagtgggcaacaacatcgcgcaggatcccctagagtcaagtagcaggacctgcaaatttggcattgaccatattttcaaatgttgtcttcaggctcactgatcattacttctatagctactgctctgatattaaccccatctattaaaaatttaaggtacctgatgggacgaagactggcccatcagcaggagaagtaactgaaattaatgaagctcttgcagaaaatccaggacttgtaaacaaatcttgttatgaagatggttggctgatcaagatgacactgagtaacccttcagaactagatgaacttatgagtgaagaagcatatgagaaatacataaaatctattgaggagtgaaaatggaactcctaaataaactagtatgaaataacgcaagccagcagagttgtcttaaattagtggtggatagaagacttagaatagaaacttttagtattaccgatggggaaaaaaaaactactgttaacactgctaatgaaagaaaatgccctttaactttctaatgattatagataaatataatatgcgtctttttcacaatatcctatgatttttagactaggctctagtgttcagaattcatgaaattatccatggtaaaaactagttataaaaattacataattcaaagataacattgttattcttaagccttatataatattgtaacttgcatgtatccatacctggatttgggatgaaatacttaatgatctttccattggaaataactggaagtgaagaggttttgttgcttgtacagtgtcagatgaggaacaccactatcttaattttgcgatacactgcatttgctggtgctatttttatacagtgaagcaacagctttgcagcaaaataataaaatacttcttcgttaatcatgtttgttttgatgttaatatttcatttagtaactctgctagtatttgtgaaagtgctaactttaacttacggaaagttactttttaaaaggaaatttaagccagaacaatgcaaagctccaagaaaatgttttctttagtcacaaatctggtttttcttaagccaagatctgtcacctttaacataataaaaaataaatcaccaactttgattttctatcatgcgaggtctgaagaaagaagaggaaagacagaggaaggtggaagttttgatcagtatagcacatggtgtttttaagttgttaaaccacgttcaggtttccacttaagtcatgggaataaaagtggacaaggactgaagctttatgagctcagataatgga

SEQ ID NO: 306019 - DNA, 790 bp, Homo sapiens
cgcccccgcggcaccgcctccgcgcctccatccagccggctccctccggccgcgaactgcccctccccgccccgcctcccggcgcgggtggccgaggcgtagcgctgcgacccccgcacccctgcgaacatggcgctgcgagtggtgcggagcgtgcgggccctgctctgcaccctgcgcgcggtcccgttacccgccgcgccctgcccgccgaggccctggcagctgggggtgggcgccgtccgtacgctgcgcactggacccgctctgctctcggtgcgtaaattcacagagaaacacgaatgggtaacaacagaaaatggcattggaacagtgggaatcagcaattttgcacaggaagcgttgggagatgttgtttattgtagtctccctgaagttgggacaaaattgaacaaacaagatgagtttggtgctttggaaagtgtgaaagctgctagtgaactctattctcctttatcaggagaagtaactgaaattaatgaagctcttgcagaaaatccaggacttgtaaacaaatcttgttatgaagatggttggctgatcaagatgacactgagtaacccttcagaactagatgaacttatgagtgaagaagcatatgagaaatacataaaatctattgaggaagttgtcttaaattagtggtggatagaagacttagaatagaaacttttagtattaccgatggggaaaaaaaaactactgttaacactggtggtgagagtgcgctgagggtgtgaggatgtagatgatgtgggggtcgtggggg

SEQ ID NO: 306020 - DNA, 1383 bp, Homo sapiens
cgcccccgcggcaccgcctccgcgcctccatccagccggctccctccggccgcgaactgcccctccccgccccgcctcccggcgcgggtggccgaggcgtagcgctgcgacccccgcacccctgcgaacatggcgctgcgagtggtgcggagcgtgcgggccctgctctgcaccctgcgcgcggtcccgttacccgccgcgccctgcccgccgaggccctggcagctgggggtgggcgccgtccgtacgctgcgcactggacccgctctgctctcggtgcgtaaattcacagagaaacacgaatgggtaacaacagaaaatggcattggaacagtgggaatcagcaattttgcacaggttggctgatcaagatgacactgagtaacccttcagaactagatgaacttatgagtgaagaagcatatgagaaatacataaaatctattgaggagtgaaaatggaactcctaaataaactagtatgaaataacgcaagccagcagagttgtcttaaattagtggtggatagaagacttagaatagaaacttttagtattaccgatggggaaaaaaaaactactgttaacactgctaatgaaagaaaatgccctttaactttctaatgattatagataaatataatatgcgtctttttcacaatatcctatgatttttagactaggctctagtgttcagaattcatgaaattatccatggtaaaaactagttataaaaattacataattcaaagataacattgttattcttaagccttatataatattgtaacttgcatgtatccatacctggatttgggatgaaatacttaatgatctttccattggaaataactggaagtgaagaggttttgttgcttgtacagtgtcagatgaggaacaccactatcttaattttgcgatacactgcatttgctggtgctatttttatacagtgaagcaacagctttgcagcaaaataataaaatacttcttcgttaatcatgtttgttttgatgttaatatttcatttagtaactctgctagtatttgtgaaagtgctaactttaacttacggaaagttactttttaaaaggaaatttaagccagaacaatgcaaagctccaagaaaatgttttctttagtcacaaatctggtttttcttaagccaagatctgtcacctttaacataataaaaaataaatcaccaactttgattttctatcatgcgaggtctgaagaaagaagaggaaagacagaggaaggtggaagttttgatcagtatagcacatggtgtttttaagttgttaaaccacgttcaggtttccacttaagtcatgggaataaaagtggacaaggactgaagctttatgagctcagataatgga

SEQ ID NO: 306021 - DNA, 1256 bp, Homo sapiens
taattatactagacgttctggtatgattcattcatcctgatgggagcaagatcgtcttctcccatcagtcattgtgtgacactcattactgctgttttgataaccaacaagaggtaatgtataaaatccgctgatgggccatcttctcccatcagcaggagaagtaactgaaattaatgaagctcttgcagaaaatccaggacttgtaaacaaatcttgttatgaagatggttggctgatcaagatgacactgagtaacccttcagaactagatgaacttatgagtgaagaagcatatgagaaatacataaaatctattgaggagtgaaaatggaactcctaaataaactagtatgaaataacgcaagccagcagagttgtcttaaattagtggtggatagaagacttagaatagaaacttttagtattaccgatggggaaaaaaaaactactgttaacactgctaatgaaagaaaatgccctttaactttctaatgattatagataaatataatatgcgtctttttcacaatatcctatgatttttagactaggctctagtgttcagaattcatgaaattatccatggtaaaaactagttataaaaattacataattcaaagataacattgttattcttaagccttatataatattgtaacttgcatgtatccatacctggatttgggatgaaatacttaatgatctttccattggaaataactggaagtgaagaggttttgttgcttgtacagtgtcagatgaggaacaccactatcttaattttgcgatacactgcatttgctggtgctatttttatacagtgaagcaacagctttgcagcaaaataataaaatacttcttcgttaatcatgtttgttttgatgttaatatttcatttagtaactctgctagtatttgtgaaagtgctaactttaacttacggaaagttactttttaaaaggaaatttaagccagaacaatgcaaagctccaagaaaatgttttctttagtcacaaatctggtttttcttaagccaagatctgtcacctttaacataataaaaaataaatcaccaactttgattttctatcatgcgaggtctgaagaaagaagaggaaagacagaggaaggtggaagttttgatcagtatagcacatggtgtttttaagttgttaaaccacgttcaggtttccacttaagtcatgggaataaaagtggacaaggactgaagctttatgagctcagataatgga

SEQ ID NO: 306022 - DNA, 1238 bp, Homo sapiens
caaaggagcacttctctaatcatgccctcccgaagactggctgggagaaggtttaaaaacaaaaaatccaggagtaagagccttaggtcagtttgaaattggagacaaactgtctgatgggagcaaatgcccatcagcaggagaagtaactgaaattaatgaagctcttgcagaaaatccaggacttgtaaacaaatcttgttatgaagatggttggctgatcaagatgacactgagtaacccttcagaactagatgaacttatgagtgaagaagcatatgagaaatacataaaatctattgaggagtgaaaatggaactcctaaataaactagtatgaaataacgcaagccagcagagttgtcttaaattagtggtggatagaagacttagaatagaaacttttagtattaccgatggggaaaaaaaaactactgttaacactgctaatgaaagaaaatgccctttaactttctaatgattatagataaatataatatgcgtctttttcacaatatcctatgatttttagactaggctctagtgttcagaattcatgaaattatccatggtaaaaactagttataaaaattacataattcaaagataacattgttattcttaagccttatataatattgtaacttgcatgtatccatacctggatttgggatgaaatacttaatgatctttccattggaaataactggaagtgaagaggttttgttgcttgtacagtgtcagatgaggaacaccactatcttaattttgcgatacactgcatttgctggtgctatttttatacagtgaagcaacagctttgcagcaaaataataaaatacttcttcgttaatcatgtttgttttgatgttaatatttcatttagtaactctgctagtatttgtgaaagtgctaactttaacttacggaaagttactttttaaaaggaaatttaagccagaacaatgcaaagctccaagaaaatgttttctttagtcacaaatctggtttttcttaagccaagatctgtcacctttaacataataaaaaataaatcaccaactttgattttctatcatgcgaggtctgaagaaagaagaggaaagacagaggaaggtggaagttttgatcagtatagcacatggtgtttttaagttgttaaaccacgttcaggtttccacttaagtcatgggaataaaagtggacaaggactgaagctttatgagctcagataatgga

SEQ ID NO: 306023 - DNA, 614 bp, Homo sapiens
cgcccccgcggcaccgcctccgcgcctccatccagccggctccctccggccgcgaactgcccctccccgccccgcctcccggcgcgggtggccgaggcgtagcgctgcgacccccgcacccctgcgaacatggcgctgcgagtggtgcggagcgtgcgggccctgctctgcaccctgcgcgcggtcccgttacccgccgcgccctgcccgccgaggccctggcagctgggggtgggcgccgtccgtacgctgcgcactggacccgctctgctctcggtgcgtaaattcacagagaaacacgaatgggtaacaacagaaaatggcattggaacagtgggaatcagcaattttgcacaggaagcgttgggagatgttgtttattgtagtctccctgaagttgggacaaaattgaacaaacaagatgagtttggtgctttggaaagtgtgaaagctgctagtgaactctattctcctttatcaggagaagtaactgaaattaatgaagctcttgcagaaaatccaggacttgtaaacaaatcttgttatgaagatggtaagctgttgctagaaatttctcaaggaattactactacagtaaatattttatctagaat

SEQ ID NO: 306024 - DNA, 431 bp, Homo sapiens
  misc_feature (366)..(366): n is a, c, g, or t
cgcccccgcggcaccgcctccgcgcctccatccagccggctccctccggccgcgaactgcccctccccgccccgcctcccggcgcgggtggccgaggcgtagcgctgcgacccccgcacccctgcgaacatggcgctgcgagtggtgcggagcgtgcgggccctgctctgcaccctgcgcgcggtcccgttacccgccgcgccctgcccgccgaggccctggcagctgggggtgggcgccgtccgtacgctgcgcactggacccgctctgctctcggtgcgtaaattcacagagaaacacgaatgggtaacaacagaaaatggcattggaacagtgggaatcagcaattttgcacagaagcgatgntagatgttgtttattgtagcctccctgacgttgggactgaactctattcttctttatcagggggg

SEQ ID NO: 306025 - DNA, 329 bp, Homo sapiens
gtctctgataggtcaaactatactattttggaatgcgtggagttagaacaaagtttttattttgttattaattagtaaagcaataaataaaattgtcttactaatatttatgagtttttgttttgttatttattagtaaggcagtaaaacatttagtgttttttctggagtttgttgaagaaactgaatattgatagtgttccagctatggcatagccagtgctgcttttactgattcatatagcttgggccttgctcctttcaagcaagctgatttttaaatgcagtgcccctgtgaacgtcaagaacaccgacaacctgagagccgt

SEQ ID NO: 306026 - DNA, 2765 bp, Homo sapiens
ttgtaagaggttgaacttgagagaccagatcaggcagtgccgcttaataccatcacatgatcctccccgaggccctgtatttaattaaaatagagagggaggcaccacagatgccagaagaacactgttgctcttggtggacgggcccagaggaattcagagttaaaccttgagtgcctgcgtccgtgagaattcagcatggaatgtctctactatttcctgggatttctgctcctggctgcaagattgccacttgatgccgccaaacgatttcatgatgtgctgggcaatgaaagaccttctgcttacatgagggagcacaatcaattaaatggctggtcttctgatgaaaatgactggaatgaaaaactctacccagtgtggaagcggggagacatgaggtggaaaaactcctggaagggaggccgtgtgcaggcggtcctgaccagtgactcaccagccctcgtgggctcaaatataacatttgcggtgaacctgatattccctagatgccaaaaggaagatgccaatggcaacatagtctatgagaagaactgcagaaatgaggctggtttatctgctgatccgtatgtttacaactggacagcatggtcagaggacagtgacggggaaaatggcaccggccaaagccatcataacgtcttccctgatgggaaaccttttcctcaccaccccggatggagaagatggaatttcatctacgtcttccacacacttggtcagtatttccagaaattgggacgatgttcagtgagagtttctgtgaacacagccaatgtgacacttgggcctcaactcatggaagtgactgtctacagaagacatggacgggcatatgttcccatcgcacaagtgaaagatgtgtacgtggtaacagatcagattcctgtgtttgtgactatgttccagaagaacgatcgaaattcatccgacgaaaccttcctcaaagatctccccattatgtttgatgtcctgattcatgatcctagccacttcctcaattattctaccattaactacaagtggagcttcggggataatactggcctgtttgtttccaccaatcatactgtgaatcacacgtatgtgctcaatggaaccttcagccttaacctcactgtgaaagctgcagcaccaggaccttgtccgccaccgccaccaccacccagaccttcaaaacccaccccttctttaggacctgctggtgacaaccccctggagctgagtaggattcctgatgaaaactgccagattaacagatatggccactttcaagccaccatcacaattgtagagggaatcttagaggttaacatcatccagatgacagacgtcctgatgccggtgccatggcctgaaagctccctaatagactttgtcgtgacctgccaagggagcattcccacggaggtctgtaccatcatttctgaccccacctgcgagatcacccagaacacagtctgcagccctgtggatgtggatgagatgtgtctgctgactgtgagacgaaccttcaatgggtctgggacgtactgtgtgaacctcaccctgggggatgacacaagcctggctctcacgagcaccctgatttctgttcctgacagagacccagcctcgcctttaaggatggcaaacagtgccctgatctccgttggctgcttggccatatttgtcactgtgatctccctcttggtgtacaaaaaacacaaggaatacaacccaatagaaaatagtcctgggaatgtggtcagaagcaaaggcctgagtgtctttctcaaccgtgcaaaagccgtgttcttcccgggaaaccaggaaaaggatccgctactcaaaaaccaagaatttaaaggagtttcttaaatttcgaccttgtttctgaagctcacttttcagtgccattgatgtgagatgtgctggagtggctattaacctttttttcctaaagattattgttaaatagatattgtggtttggggaagttgaattttttataggttaaatgtcattttagagatggggagagggattatactgcaggcagcttcagccatgttgtgaaactgataaaagcaacttagcaaggcttcttttcattattttttatgtttcacttataaagtcttaggtaactagtaggatagaaacactgtgtcccgagagtaaggagagaagctactattgattagagcctaacccaggttaactgcaagaagaggcgggatactttcagctttccatgtaactgtatgcataaagccaatgtagtccagtttctaagatcatgttccaagctaactgaatcccacttcaatacacactcatgaactcctgatggaacaataacaggcccaagcctgtggtatgatgtgcacacttgctagactcagaaaaaatactactctcataaatgggtgggagtattttggtgacaacctactttgcttggctgagtgaaggaatgatattcatatattcatttattccatggacatttagttagtgctttttatataccaggcatgatgctgagtgacactcttgtgtatatttccaaatttttgtacagtcgctgcacatatttgaaatcatatattaagactttccaaagatgaggtccctggtttttcatggcaacttgatcagtaaggatttcacctctgtttgtaactaaaaccatctactatatgttagacatgacattctttttctctccttcctgaaaaataaagtgtgggaagagacaa

SEQ ID NO: 306027 - DNA, 1725 bp, Homo sapiens
ttgtaagaggttgaacttgagagaccagatcaggcagtgccgcttaataccatcacatgatcctccccgaggccctgtatttaattaaaatagagagggaggcaccacagatgccagaagaacactgttgctcttggtggacgggcccagaggaattcagagttaaaccttgagtgcctgcgtccgtgagaattcagcatggaatgtctctactatttcctgggatttctgctcctggctgcaagattgccacttgatgccgccaaacgatttcatgatgtgctgggcaatgaaagaccttctgcttacatgagggagcacaatcaattaaatggctggtcttctgatgaaaatgactggaatgaaaaactctacccagtgtggaagcggggagacatgaggtggaaaaactcctggaagggaggccgtgtgcaggcggtcctgaccagtgactcaccagccctcgtgggctcaaatataacatttgcggtgaacctgatattccctagatgccaaaaggaagatgccaatggcaacatagtctatgagaagaactgcagaaatgaggctggtttatctgctgatccgtatgtttacaactggacagcatggtcagaggacagtgacggggaaaatggcaccggccaaagccatcataacgtcttccctgatgggaaaccttttcctcaccaccccggatggagaagatggaatttcatctacgtcttccacacacttggttggcttttacaaacccctaagcttcttctttacctttccttaaaatttcaaccttctcttttcttactctataattgagaatgataacacagagagttaataacagtcaccctgctaactttccttagcatgagtgaacagtgagagataaaaatgaaatcttggttaaccttgccaaatctccaggacaccgaagagttaaaaagagagaaaaacaaaaagattaagctctttttcaaaaaaacaaaaccacttaatttttttctacctaaaaccataacaagaaaaaatgctaacacttatttatttgaatggcacatggagaccgggcatgtggctcacacttgtaatcccagcaccttggaaggcggaggcgggtggatcacctgaagtcaggagttcaagaccagcctggccaacatggtgaagtcccgtccctactaaaaatacaaaaattagccaggtgtggtggtgcgcacctgtaatcccagctactcaggaggctgaggcaggagaatcacttgaatccgggaggtggaggttgcagtgagaggagattgagccattgcactccagcctgggcaacagagtgagactccatctcgaaaaacaaacaaacaaacaaaaaacagaatggcacattgatgagcattcattgattgattctttagtttttttatgttctctaaagaatttttaagatttaaagaagcatgtgctatttatttgtaggaaatcctcagaaaaggtacaaataaaaaataaaaattatccataattaataccagagattataattgttaattattatggtgttttctttgctagtatttaagatcattattaagatcacatacacatttttgcttactatcattagcatttgatgatatgatttttttaatttttatacattgttttaatggctgcacgatatttcattgtgtacaaataaaataactactgttccgctttgacctagcc

SEQ ID NO: 306028 - DNA, 381 bp, Homo sapiens
atgggtggaagtattttggtgcaggggagagggccgcgctgttaaagaaacttatattttatggggcgctttattgggggactgaaagtgaaggaatgatattcatatattcatttattccatggacatttagttagtgctttttatataccaggcatgatgctgagtgacactcttgtgtatatttccaaatttttgtacagtcgctgcacatatttgaaatcatatattaagactttccaaagatgaggtccctggtttttcatggcaacttgatcagtaaggatttcacctctgtttgtaactaaaaccatctactatatgttagacatgacattctttttctctccttcctgaaaaataaagtgtgggaagagacaa

SEQ ID NO: 306029 - DNA, 431 bp, Homo sapiens
ttgtaagaggttgaacttgagagaccagatcaggcagtgccgcttaataccatcacatgatcctccccgaggccctgtatttaattaaaatagagagggaggcaccacagatgccagaagaacactgttgctcttggtggacgggcccagaggaattcagagttaaaccttgagtgcctgcgtccgtgagaattcagcatggaatgtctctactatttcctgggatttctgctcctggctgcaagattgccacttgatgccgccaaacccagggtccagaccactgaagcagtgtgcagattcgcgagaggaagagagctgagccgctgtaaccctgggcctgggattgcggggacgggacgggtgggaagcggccaaaggcgcagcggcttctggtcagagccgcagaggcctgagacgtgggccgcgcc

SEQ ID NO: 306030 - DNA, 2801 bp, Homo sapiens
ttgtaagaggttgaacttgagagaccagatcaggcagtgccgcttaataccatcacatgatcctccccgaggccctgtatttaattaaaatagagagggaggcaccacagatgccagaagaacactgttgctcttggtggacgggcccagaggaattcagagttaaaccttgagtgcctgcgtccgtgagaattcagcatggaatgtctctactatttcctgggatttctgctcctggctgcaagattgccacttgatgccgccaaacgatttcatgatgtgctgggcaatgaaagaccttctgcttacatgagggagcacaatcaattaaatggctggtcttctgatgaaaatgactggaatgaaaaactctacccagtgtggaagcggggagacatgaggtggaaaaactcctggaagggaggccgtgtgcaggcggtcctgaccagtgactcaccagccctcgtgggctcaaatataacatttgcggtgaacctgatattccctagatgccaaaaggaagatgccaatggcaacatagtctatgagaagaactgcagaaatgaggctggtttatctgctgatccgtatgtttacaactggacagcatggtcagaggacagtgacggggaaaatggcaccggccaaagccatcataacgtcttccctgatgggaaaccttttcctcaccaccccggatggagaagatggaatttcatctacgtcttccacacacttggtcagtatttccagaaattgggacgatgttcagtgagagtttctgtgaacacagccaatgtgacacttgggcctcaactcatggaagtgactgtctacagaagacatggacgggcatatgttcccatcgcacaagtgaaagatgtgtacgtggtaacagatcagattcctgtgtttgtgactatgttccagaagaacgatcgaaattcatccgacgaaaccttcctcaaagatctccccattatgtttgatgtcctgattcatgatcctagccacttcctcaattattctaccattaactacaagtggagcttcggggataatactggcctgtttgtttccaccaatcatactgtgaatcacacgtatgtgctcaatggaaccttcagccttaacctcactgtgaaagctgcagcaccaggaccttgtccgccaccgccaccaccacccagaccttcaaaacccaccccttctttagcaactactctaaaatcttatgattcaaacaccccaggacctgctggtgacaaccccctggagctgagtaggattcctgatgaaaactgccagattaacagatatggccactttcaagccaccatcacaattgtagagggaatcttagaggttaacatcatccagatgacagacgtcctgatgccggtgccatggcctgaaagctccctaatagactttgtcgtgacctgccaagggagcattcccacggaggtctgtaccatcatttctgaccccacctgcgagatcacccagaacacagtctgcagccctgtggatgtggatgagatgtgtctgctgactgtgagacgaaccttcaatgggtctgggacgtactgtgtgaacctcaccctgggggatgacacaagcctggctctcacgagcaccctgatttctgttcctgacagagacccagcctcgcctttaaggatggcaaacagtgccctgatctccgttggctgcttggccatatttgtcactgtgatctccctcttggtgtacaaaaaacacaaggaatacaacccaatagaaaatagtcctgggaatgtggtcagaagcaaaggcctgagtgtctttctcaaccgtgcaaaagccgtgttcttcccgggaaaccaggaaaaggatccgctactcaaaaaccaagaatttaaaggagtttcttaaatttcgaccttgtttctgaagctcacttttcagtgccattgatgtgagatgtgctggagtggctattaacctttttttcctaaagattattgttaaatagatattgtggtttggggaagttgaattttttataggttaaatgtcattttagagatggggagagggattatactgcaggcagcttcagccatgttgtgaaactgataaaagcaacttagcaaggcttcttttcattattttttatgtttcacttataaagtcttaggtaactagtaggatagaaacactgtgtcccgagagtaaggagagaagctactattgattagagcctaacccaggttaactgcaagaagaggcgggatactttcagctttccatgtaactgtatgcataaagccaatgtagtccagtttctaagatcatgttccaagctaactgaatcccacttcaatacacactcatgaactcctgatggaacaataacaggcccaagcctgtggtatgatgtgcacacttgctagactcagaaaaaatactactctcataaatgggtgggagtattttggtgacaacctactttgcttggctgagtgaaggaatgatattcatatattcatttattccatggacatttagttagtgctttttatataccaggcatgatgctgagtgacactcttgtgtatatttccaaatttttgtacagtcgctgcacatatttgaaatcatatattaagactttccaaagatgaggtccctggtttttcatggcaacttgatcagtaaggatttcacctctgtttgtaactaaaaccatctactatatgttagacatgacattctttttctctccttcctgaaaaataaagtgtgggaagagacaa

SEQ ID NO: 306031 - DNA, 2931 bp, Homo sapiens
ttgtaagaggttgaacttgagagaccagatcaggcagtgccgcttaataccatcacatgatcctccccgaggccctgtatttaattaaaatagagagggaggcaccacagatgccagaagaacactgttgctcttggtggacgggcccagaggaattcagagttaaaccttgagtgcctgcgtccgtgagaattcagcatggaatgtctctactatttcctgggatttctgctcctggctgcaagattgccacttgatgccgccaaacgatttcatgatgtgctgggcaatgaaagaccttctgcttacatgagggagcacaatcaattaaatggctggtcttctgatgaaaatgactggaatgaaaaactctacccagtgtggaagcggggagacatgaggtggaaaaactcctggaagggaggccgtgtgcaggcggtcctgaccagtgactcaccagccctcgtgggctcaaatataacatttgcggtgaacctgatattccctagatgccaaaaggaagatgccaatggcaacatagtctatgagaagaactgcagaaatgaggctggtttatctgctgatccgtatgtttacaactggacagcatggtcagaggacagtgacggggaaaatggcaccggccaaagccatcataacgtcttccctgatgggaaaccttttcctcaccaccccggatggagaagatggaatttcatctacgtcttccacacacttggtcagtatttccagaaattgggacgatgttcagtgagagtttctgtgaacacagccaatgtgacacttgggcctcaactcatggaagtgactgtctacagaagacatggacgggcatatgttcccatcgcacaagtgaaagatgtgtacgtggtaacagatcagattcctgtgtttgtgactatgttccagaagaacgatcgaaattcatccgacgaaaccttcctcaaagatctccccattatgtttgatgtcctgattcatgatcctagccacttcctcaattattctaccattaactacaagtggagcttcggggataatactggcctgtttgtttccaccaatcatactgtgaatcacacgtatgtgctcaatggaaccttcagccttaacctcactgtgaaagctgcagcaccaggaccttgtccgccaccgccaccaccacccagaccttcaaaacccaccccttctttaggacctgctggtgacaaccccctggagctgagtaggattcctgatgaaaactgccagattaacagatatggccactttcaagccaccatcacaattgtagagggaatcttagaggttaacatcatccagatgacagacgtcctgatgccggtgccatggcctgaaagctccctaatagactttgtcgtgacctgccaagggagcattcccacggaggtctgtaccatcatttctgaccccacctgcgagatcacccagaacacagtctgcagccctgtggatgtggatgagatgtgtctgctgactgtgagacgaaccttcaatgggtctgggacgtactgtgtgaacctcaccctgggggatgacacaagcctggctctcacgagcaccctgatttctgttcctgacagagacccagcctcgcctttaaggatggcaaacagtgccctgatctccgttggctgcttggccatatttgtcactgtgatctccctcttggtgtacaaaaaacacaaggaatacaacccaatagaaaatagtcctgggaatgtggtcagaagcaaaggcctgagtgtctttctcaaccgtgcaaaagccgtgttcttcccgggaaaccaggaaaaggatccgctactcaaaaaccaagaatttaaaggagtttcttaaatttcgaccttgtttctgaagctcacttttcagtgccattgatgtgagatgtgctggagtggctattaacctttttttcctaaagattattgttaaatagatattgtggtttggggaagttgaattttttataggttaaatgtcattttagagatggggagagggattatactgcaggcagcttcagccatgttgtgaaactgataaaagcaacttagcaaggcttcttttcattattttttatgtttcacttataaagtcttaggtaactagtaggatagaaacactgtgtcccgagagtaaggagagaagctactattgattagagcctaacccaggttaactgcaagaagaggcgggatactttcagctttccatgtaactgtatgcataaagccaatgtagtccagtttctaagatcatgttccaagctaactgaatcccacttcaatacacactcatgaactcctgatggaacaataacaggcccaagcctgtggtatgatgtgcacacttgctagactcagaaaaaatactactctcataaatgggtgggagtattttggtgacaacctactttgcttggctgagtgaaggaatgatattcatatattcatttattccatggacatttagttagtgctttttatataccaggcatgatgctgagtgacactcttgtgtatatttccaaatttttgtacagtcgctgcacatatttgaaatcatatattaagactttccaaagatgaggtccctggtttttcatggcaacttgatcagtaaggatttcacctctgtttgtaactaaaaccatctactatatgttagacatgacattctttttctctccttcctgaaaaataaagtgtgggaagagacaaaaaaaaaacagataaaaccaaaaaaaaagaagggggcggaaaaaccaggggcacgagggcccccttttgaaaggcccagggcttaaaacagcgggtacaacggggaacagacggccgagaccctcgggatcgaacaaaaacagatacgtgtacgcgcctgctacaa

SEQ ID NO: 306032 - DNA, 2649 bp, Homo sapiens
gagaaatctgcgttttgattatgttcctggaaacaataactttctttcaagatctgaggaagaggaagactctctggaacagtggaaagaacttgtccttgtcctgggaatcaaaagatgtgaatcttgatttctactaaagatgaccctaggatttcatgatgtgctgggcaatgaaagaccttctgcttacatgagggagcacaatcaattaaatggctggtcttctgatgaaaatgactggaatgaaaaactctacccagtgtggaagcggggagacatgaggtggaaaaactcctggaagggaggccgtgtgcaggcggtcctgaccagtgactcaccagccctcgtgggctcaaatataacatttgcggtgaacctgatattccctagatgccaaaaggaagatgccaatggcaacatagtctatgagaagaactgcagaaatgaggctggtttatctgctgatccgtatgtttacaactggacagcatggtcagaggacagtgacggggaaaatggcaccggccaaagccatcataacgtcttccctgatgggaaaccttttcctcaccaccccggatggagaagatggaatttcatctacgtcttccacacacttggtcagtatttccagaaattgggacgatgttcagtgagagtttctgtgaacacagccaatgtgacacttgggcctcaactcatggaagtgactgtctacagaagacatggacgggcatatgttcccatcgcacaagtgaaagatgtgtacgtggtaacagatcagattcctgtgtttgtgactatgttccagaagaacgatcgaaattcatccgacgaaaccttcctcaaagatctccccattatgtttgatgtcctgattcatgatcctagccacttcctcaattattctaccattaactacaagtggagcttcggggataatactggcctgtttgtttccaccaatcatactgtgaatcacacgtatgtgctcaatggaaccttcagccttaacctcactgtgaaagctgcagcaccaggaccttgtccgccaccgccaccaccacccagaccttcaaaacccaccccttctttaggacctgctggtgacaaccccctggagctgagtaggattcctgatgaaaactgccagattaacagatatggccactttcaagccaccatcacaattgtagagggaatcttagaggttaacatcatccagatgacagacgtcctgatgccggtgccatggcctgaaagctccctaatagactttgtcgtgacctgccaagggagcattcccacggaggtctgtaccatcatttctgaccccacctgcgagatcacccagaacacagtctgcagccctgtggatgtggatgagatgtgtctgctgactgtgagacgaaccttcaatgggtctgggacgtactgtgtgaacctcaccctgggggatgacacaagcctggctctcacgagcaccctgatttctgttcctgacagagacccagcctcgcctttaaggatggcaaacagtgccctgatctccgttggctgcttggccatatttgtcactgtgatctccctcttggtgtacaaaaaacacaaggaatacaacccaatagaaaatagtcctgggaatgtggtcagaagcaaaggcctgagtgtctttctcaaccgtgcaaaagccgtgttcttcccgggaaaccaggaaaaggatccgctactcaaaaaccaagaatttaaaggagtttcttaaatttcgaccttgtttctgaagctcacttttcagtgccattgatgtgagatgtgctggagtggctattaacctttttttcctaaagattattgttaaatagatattgtggtttggggaagttgaattttttataggttaaatgtcattttagagatggggagagggattatactgcaggcagcttcagccatgttgtgaaactgataaaagcaacttagcaaggcttcttttcattattttttatgtttcacttataaagtcttaggtaactagtaggatagaaacactgtgtcccgagagtaaggagagaagctactattgattagagcctaacccaggttaactgcaagaagaggcgggatactttcagctttccatgtaactgtatgcataaagccaatgtagtccagtttctaagatcatgttccaagctaactgaatcccacttcaatacacactcatgaactcctgatggaacaataacaggcccaagcctgtggtatgatgtgcacacttgctagactcagaaaaaatactactctcataaatgggtgggagtattttggtgacaacctactttgcttggctgagtgaaggaatgatattcatatattcatttattccatggacatttagttagtgctttttatataccaggcatgatgctgagtgacactcttgtgtatatttccaaatttttgtacagtcgctgcacatatttgaaatcatatattaagactttccaaagatgaggtccctggtttttcatggcaacttgatcagtaaggatttcacctctgtttgtaactaaaaccatctactatatgttagacatgacattctttttctctccttcctgaaaaataaagtgtgggaagagacaa

SEQ ID NO: 306033 - DNA, 2711 bp, Homo sapiens
ttgtaagaggttgaacttgagagaccagatcaggcagtgccgcttaataccatcacatgatcctccccgaggccctgtatttaattaaaatagagagggaggcaccacagatgccagaagaacactgttgctcttggtggacgggcccagaggaattcagagttaaaccttgagtgcctgcgtccgtgagaattcagcatggaatgtctctactatttcctgggatttctgctcctggctgcaagattgccacttgatgccgccaaacgatttcatgatgtgctgggcaatgaaagaccttctgcttacatgagggagcacaatcaattaaatggctggtcttctgatgaaaatgactggaatgaaaaactctacccagtgtggaagcggggagacatgaggtggaaaaactcctggaagggaggccgtgtgcaggcggtcctgaccagtgactcaccagccctcgtgggctcaaatataacatttgcggtgaacctgatattccctagatgccaaaaggaagatgccaatggcaacatagtctatgagaagaactgcagaaatgaggctggtttatctgctgatccgtatgtttacaactggacagcatggtcagaggacagtgacggtcctcaccaccccggatggagaagatggaatttcatctacgtcttccacacacttggtcagtatttccagaaattgggacgatgttcagtgagagtttctgtgaacacagccaatgtgacacttgggcctcaactcatggaagtgactgtctacagaagacatggacgggcatatgttcccatcgcacaagtgaaagatgtgtacgtggtaacagatcagattcctgtgtttgtgactatgttccagaagaacgatcgaaattcatccgacgaaaccttcctcaaagatctccccattatgtttgatgtcctgattcatgatcctagccacttcctcaattattctaccattaactacaagtggagcttcggggataatactggcctgtttgtttccaccaatcatactgtgaatcacacgtatgtgctcaatggaaccttcagccttaacctcactgtgaaagctgcagcaccaggaccttgtccgccaccgccaccaccacccagaccttcaaaacccaccccttctttaggacctgctggtgacaaccccctggagctgagtaggattcctgatgaaaactgccagattaacagatatggccactttcaagccaccatcacaattgtagagggaatcttagaggttaacatcatccagatgacagacgtcctgatgccggtgccatggcctgaaagctccctaatagactttgtcgtgacctgccaagggagcattcccacggaggtctgtaccatcatttctgaccccacctgcgagatcacccagaacacagtctgcagccctgtggatgtggatgagatgtgtctgctgactgtgagacgaaccttcaatgggtctgggacgtactgtgtgaacctcaccctgggggatgacacaagcctggctctcacgagcaccctgatttctgttcctgacagagacccagcctcgcctttaaggatggcaaacagtgccctgatctccgttggctgcttggccatatttgtcactgtgatctccctcttggtgtacaaaaaacacaaggaatacaacccaatagaaaatagtcctgggaatgtggtcagaagcaaaggcctgagtgtctttctcaaccgtgcaaaagccgtgttcttcccgggaaaccaggaaaaggatccgctactcaaaaaccaagaatttaaaggagtttcttaaatttcgaccttgtttctgaagctcacttttcagtgccattgatgtgagatgtgctggagtggctattaacctttttttcctaaagattattgttaaatagatattgtggtttggggaagttgaattttttataggttaaatgtcattttagagatggggagagggattatactgcaggcagcttcagccatgttgtgaaactgataaaagcaacttagcaaggcttcttttcattattttttatgtttcacttataaagtcttaggtaactagtaggatagaaacactgtgtcccgagagtaaggagagaagctactattgattagagcctaacccaggttaactgcaagaagaggcgggatactttcagctttccatgtaactgtatgcataaagccaatgtagtccagtttctaagatcatgttccaagctaactgaatcccacttcaatacacactcatgaactcctgatggaacaataacaggcccaagcctgtggtatgatgtgcacacttgctagactcagaaaaaatactactctcataaatgggtgggagtattttggtgacaacctactttgcttggctgagtgaaggaatgatattcatatattcatttattccatggacatttagttagtgctttttatataccaggcatgatgctgagtgacactcttgtgtatatttccaaatttttgtacagtcgctgcacatatttgaaatcatatattaagactttccaaagatgaggtccctggtttttcatggcaacttgatcagtaaggatttcacctctgtttgtaactaaaaccatctactatatgttagacatgacattctttttctctccttcctgaaaaataaagtgtgggaagagacaa

SEQ ID NO: 306034 - DNA, 2711 bp, Homo sapiens
ttgtaagaggttgaacttgagagaccagatcaggcagtgccgcttaataccatcacatgatcctccccgaggccctgtatttaattaaaatagagagggaggcaccacagatgccagaagaacactgttgctcttggtggacgggcccagaggaattcagagttaaaccttgagtgcctgcgtccgtgagaattcagcatggaatgtctctactatttcctgggatttctgctcctggctgcaagattgccacttgatgccgccaaacgatttcatgatgtgctgggcaatgaaagaccttctgcttacatgagggagcacaatcaattaaatggctggtcttctgatgaaaatgactggaatgaaaaactctacccagtgtggaagcggggagacatgaggtggaaaaactcctggaagggaggccgtgtgcaggcggtcctgaccagtgactcaccagccctcgtgggctcaaatataacatttgcggtgaacctgatattccctagatgccaaaaggaagatgccaatggcaacatagtctatgagaagaactgcagaaatgaggctggtttatctgctgatccgtatgtttacaactggacagcatggtcagaggacagtgacggggaaaatggcaccggccaaagccatcataacgtcttccctgatgggaaaccttttcctcaccaccccggatggagaagatggaatttcatctacgtcttccacacacttggtcagtatttccagaaattgggacgatgttcagtgagagtttctgtgaacacagccaatgtgacacttgggcctcaactcatggaagtgactgtctacagaagacatggacgggcatatgttcccatcgcacaagtgaaagatgtgtacgtggtaacagatcagattcctgtgtttgtgactatgttccagaagaacgatcgaaattcatccgacgaaaccttcctcaaagatctccccattatgtttgatgtcctgattcatgatcctagccacttcctcaattattctaccattaactacaagtggagcttcggggataatactggcctgtttgtttccaccaatcatactgtgaatcacacgtatgtgctcaatggaaccttcagccttaacctcactgtgaaagctgcagcaccaggaccttgtccgccaccgccaccaccacccagaccttcaaaacccaccccttctttaggacctgctggtgacaaccccctggagctgagtaggattcctgatgaaaactgccagattaacagatatggccactttcaagccaccatcacaattgtagagggaatcttagaggttaacatcatccagatgacagacgtcctgatgccggtgccatggcctgaaagctccctaatagactttgtcgtgacctgccaagggagcattcccacggaggtctgtaccatcatttctgaccccacctgcgagatcacccagaacacagtctgcagccctgtggatgtggatgagatgtgtctgctgactgtgagacgaaccttcaatgggtctgggacgtactgtgtgaacctcaccctgggggatgacacaagcctggctctcacgagcaccctgatttctgttcctgacagagacccagcctcgcctttaaggatggcaaacagtgccctgatctccgttggctgcttggccatatttgtcactgtgatctccctcttggtgtacaaaaaacacaaggaatacaacccaatagaaaatagtcctgggaatgtggtcagaagcaaaggcctgagtgtctttctcaaccgtgcaaaagccgtgttcttcccgggaaaccaggaaaaggatccgctactcaaaaaccaagaatttaaaggagtttcttaaatttcgaccttgtttctgaagctcacttttcagtgccattgatgtgagatgtgctggagtggctattaacctttttttcctaaagattattgttaaatagatattgtggtttggggaagttgaattttttataggttaaatgtcattttagagatggggagagggattatactgcaggcagcttcagccatgttgtgaaactgataaaagcaacttagcaaggcttcttttcattattttttatgtttcacttataaactactattgattagagcctaacccaggttaactgcaagaagaggcgggatactttcagctttccatgtaactgtatgcataaagccaatgtagtccagtttctaagatcatgttccaagctaactgaatcccacttcaatacacactcatgaactcctgatggaacaataacaggcccaagcctgtggtatgatgtgcacacttgctagactcagaaaaaatactactctcataaatgggtgggagtattttggtgacaacctactttgcttggctgagtgaaggaatgatattcatatattcatttattccatggacatttagttagtgctttttatataccaggcatgatgctgagtgacactcttgtgtatatttccaaatttttgtacagtcgctgcacatatttgaaatcatatattaagactttccaaagatgaggtccctggtttttcatggcaacttgatcagtaaggatttcacctctgtttgtaactaaaaccatctactatatgttagacatgacattctttttctctccttcctgaaaaataaagtgtgggaagagacaa

SEQ ID NO: 306035 - DNA, 1606 bp, Homo sapiens
gtacatcataggtcgtggcacgcacaccaccagacttcaaaacccacccttctttaggacctgctggtgacaaccccctggagctgagtaggattcctgatgaaaactgccagattaacagatatggccactttcaagccaccatcacaattgtagagggaatcttagaggttaacatcatccagatgacagacgtcctgatgccggtgccatggcctgaaagctccctaatagactttgtcgtgacctgccaagggagcattcccacggaggtctgtaccatcatttctgaccccacctgcgagatcacccagaacacagtctgcagccctgtggatgtggatgagatgtgtctgctgactgtgagacgaaccttcaatgggtctgggacgtactgtgtgaacctcaccctgggggatgacacaagcctggctctcacgagcaccctgatttctgttcctgacagagacccagcctcgcctttaaggatggcaaacagtgccctgatctccgttggctgcttggccatatttgtcactgtgatctccctcttggtgtacaaaaaacacaaggaatacaacccaatagaaaatagtcctgggaatgtggtcagaagcaaaggcctgagtgtctttctcaaccgtgcaaaagccgtgttcttcccgggaaaccaggaaaaggatccgctactcaaaaaccaagaatttaaaggagtttcttaaatttcgaccttgtttctgaagctcacttttcagtgccattgatgtgagatgtgctggagtggctattaacctttttttcctaaagattattgttaaatagatattgtggtttggggaagttgaattttttataggttaaatgtcattttagagatggggagagggattatactgcaggcagcttcagccatgttgtgaaactgataaaagcaacttagcaaggcttcttttcattattttttatgtttcacttataaagtcttaggtaactagtaggatagaaacactgtgtcccgagagtaaggagagaagctactattgattagagcctaacccaggttaactgcaagaagaggcgggatactttcagctttccatgtaactgtatgcataaagccaatgtagtccagtttctaagatcatgttccaagctaactgaatcccacttcaatacacactcatgaactcctgatggaacaataacaggcccaagcctgtggtatgatgtgcacacttgctagactcagaaaaaatactactctcataaatgggtgggagtattttggtgacaacctactttgcttggctgagtgaaggaatgatattcatatattcatttattccatggacatttagttagtgctttttatataccaggcatgatgctgagtgacactcttgtgtatatttccaaatttttgtacagtcgctgcacatatttgaaatcatatattaagactttccaaagatgaggtccctggtttttcatggcaacttgatcagtaaggatttcacctctgtttgtaactaaaaccatctactatatgttagacatgacattctttttctctccttcctgaaaaataaagtgtgggaagagacaa

SEQ ID NO: 306036 - DNA, 1578 bp, Homo sapiens
atgagccggggaagggcactcctgtaagggggcacggaggtctgaagagcacggggagtatggccaactttcatggatttttagcacagctagaaggtaagtagagagagaggaagctggaggcacggccgcctgatcacaggagcccttccacacggtggcgctgctgggtcacccaagacctgagcaggtgtctccaggacgtgacatctctcccccgcgcccttaccacagtgttccagacatgctgactcattctctaaatagaagataagctgacccaaagactatgtattatttaatagaaaagattactgaaagcccagagggagccatatatcttctgtgacggctcccttcctcatttatttaatggcattataagcggcatgtcctctaggtggaagacataactaacatgctcttgcttctgttttaagacccagcctcgcctttaaggatggcaaacagtgccctgatctccgttggctgcttggccatatttgtcactgtgatctccctcttggtgtacaaaaaacacaaggaatacaacccaatagaaaatagtcctgggaatgtggtcagaagcaaaggcctgagtgtctttctcaaccgtgcaaaagccgtgttcttcccgggaaaccaggaaaaggatccgctactcaaaaaccaagaatttaaaggagtttcttaaatttcgaccttgtttctgaagctcacttttcagtgccattgatgtgagatgtgctggagtggctattaacctttttttcctaaagattattgttaaatagatattgtggtttggggaagttgaattttttataggttaaatgtcattttagagatggggagagggattatactgcaggcagcttcagccatgttgtgaaactgataaaagcaacttagcaaggcttcttttcattattttttatgtttcacttataaagtcttaggtaactagtaggatagaaacactgtgtcccgagagtaaggagagaagctactattgattagagcctaacccaggttaactgcaagaagaggcgggatactttcagctttccatgtaactgtatgcataaagccaatgtagtccagtttctaagatcatgttccaagctaactgaatcccacttcaatacacactcatgaactcctgatggaacaataacaggcccaagcctgtggtatgatgtgcacacttgctagactcagaaaaaatactactctcataaatgggtgggagtattttggtgacaacctactttgcttggctgagtgaaggaatgatattcatatattcatttattccatggacatttagttagtgctttttatataccaggcatgatgctgagtgacactcttgtgtatatttccaaatttttgtacagtcgctgcacatatttgaaatcatatattaagactttccaaagatgaggtccctggtttttcatggcaacttgatcagtaaggatttcacctctgtttgtaactaaaaccatctactatatgttagacatgacattctttttctctccttcctgaaaaataaagtgtgggaagagacaa

SEQ ID NO: 306037 - DNA, 1234 bp, Homo sapiens
atgagccggggaagggcactcctgtaagggggcacggaggtctgaagagcacggggagtatggccaactttcatggatttttagcacagctagaagacccagcctcgcctttaaggatggcaaacagtgccctgatctccgttggctgcttggccatatttgtcactgtgatctccctcttggtgtacaaaaaacacaaggaatacaacccaatagaaaatagtcctgggaatgtggtcagaagcaaaggcctgagtgtctttctcaaccgtgcaaaagccgtgttcttcccgggaaaccaggaaaaggatccgctactcaaaaaccaagaatttaaaggagtttcttaaatttcgaccttgtttctgaagctcacttttcagtgccattgatgtgagatgtgctggagtggctattaacctttttttcctaaagattattgttaaatagatattgtggtttggggaagttgaattttttataggttaaatgtcattttagagatggggagagggattatactgcaggcagcttcagccatgttgtgaaactgataaaagcaacttagcaaggcttcttttcattattttttatgtttcacttataaagtcttaggtaactagtaggatagaaacactgtgtcccgagagtaaggagagaagctactattgattagagcctaacccaggttaactgcaagaagaggcgggatactttcagctttccatgtaactgtatgcataaagccaatgtagtccagtttctaagatcatgttccaagctaactgaatcccacttcaatacacactcatgaactcctgatggaacaataacaggcccaagcctgtggtatgatgtgcacacttgctagactcagaaaaaatactactctcataaatgggtgggagtattttggtgacaacctactttgcttggctgagtgaaggaatgatattcatatattcatttattccatggacatttagttagtgctttttatataccaggcatgatgctgagtgacactcttgtgtatatttccaaatttttgtacagtcgctgcacatatttgaaatcatatattaagactttccaaagatgaggtccctggtttttcatggcaacttgatcagtaaggatttcacctctgtttgtaactaaaaccatctactatatgttagacatgacattctttttctctccttcctgaaaaataaagtgtgggaagagacaa

SEQ ID NO: 306038 - DNA, 1908 bp, Homo sapiens
ttgtaagaggttgaacttgagagaccagatcaggcagtgccgcttaataccatcacatgatcctccccgaggccctgtatttaattaaaatagagagggaggcaccacagatgccagaagaacactgttgctcttggtggacgggcccagaggaattcagagttaaaccttgagtgcctgcgtccgtgagaattcagcatggaatgtctctactatttcctgggatttctgctcctggctgcaagattgccacttgatgccgccaaacgatttcatgatgtgctgggcaatgaaagaccttctgcttacatgagggagcacaatcaattaaatggctggtcttctgatgaaaatgactggaatgaaaaactctacccagtgtggaagcggggagacatgaggtggaaaaactcctggaagggaggccgtgtgcaggcggtcctgaccagtgactcaccagccctcgtgggctcaaatataacatttgcggtgaacctgatattccctagatgccaaaaggaagatgccaatggcaacatagtctatgagaagaactgcagaaatgaggctggtttatctgctgatccgtatgtttacaactggacagcatggtcagaggacagtgacggggaaaatggcaccggccaaagccatcataacgtcttccctgatgggaaaccttttcctcaccaccccggatggagaagatggaatttcatctacgtcttccacacacttggtcagtatttccagaaattgggacgatgttcagtgagagtttctgtgaacacagccaatgtgacacttgggcctcaactcatggaagtgactgtctacagaagacatggacgggcatatgttcccatcgcacaagtgaaagatgtgtacgtggtaacagatcagattcctgtgtttgtgactatgttccagaagaacgatcgaaattcatccgacgaaaccttcctcaaagatctccccattatgtttgatgtcctgattcatgatcctagccacttcctcaattattctaccattaactacaagtggagcttcggggataatactggcctgtttgtttccaccaatcatactgtgaatcacacgtatgtgctcaatggaaccttcagccttaacctcactgtgaaagctgcagcaccaggaccttgtccgccaccgccaccaccacccagaccttcaaaacccaccccttctttaggacctgctggtgacaaccccctggagctgagtaggattcctgatgaaaactgccagattaacagatatggccactttcaagccaccatcacaattgtagagggaatcttagaggttaacatcatccagatgacagacgtcctgatgccggtgccatggcctgaaagctccctaatagactttgtcgtgacctgccaagggagcattcccacggaggtctgtaccatcatttctgaccccacctgcgagatcacccagaacacagtctgcagccctgtggatgtggatgagatgtgtctgctgactgtgagacgaaccttcaatgggtctgggacgtactgtgtgaacctcaccctgggggatgacacaagcctggctctcacgagcaccctgatttctgttcctgacagagacccagcctcgcctttaaggatggcaaacagtgccctgatctccgttggctgcttggccatatttgtcactgtgatctccctcttggtgtacaaaaaacacaaggaatacaacccaatagaaaatagtcctgggaatgtggtcagaagcaaaggcctgagtgtctttctcaaccgtgcaaaagccgtgttcttccggccagctggttctgaaccttacttttcagtggcattgatgtgaaattgcctgaatggttattccttttttcctgattattggtct

SEQ ID NO: 306039 - DNA, 2037 bp, Homo sapiens
ttgtaagaggttgaacttgagagaccagatcaggcagtgccgcttaataccatcacatgatcctccccgaggccctgtatttaattaaaatagagagggaggcaccacagatgccagaagaacactgttgctcttggtggacgggcccagaggaattcagagttaaaccttgagtgcctgcgtccgtgagaattcagcatggaatgtctctactatttcctgggatttctgctcctggctgcaagattgccacttgatgccgccaaacgatttcatgatgtgctgggcaatgaaagaccttctgcttacatgagggagcacaatcaattaaatggctggtcttctgatgaaaatgactggaatgaaaaactctacccagtgtggaagcggggagacatgaggtggaaaaactcctggaagggaggccgtgtgcaggcggtcctgaccagtgactcaccagccctcgtgggctcaaatataacatttgcggtgaacctgatattccctagatgccaaaaggaagatgccaatggcaacatagtctatgagaagaactgcagaaatgaggctggtttatctgctgatccgtatgtttacaactggacagcatggtcagaggacagtgacggggaaaatggcaccggccaaagccatcataacgtcttccctgatgggaaaccttttcctcaccaccccggatggagaagatggaatttcatctacgtcttccacacacttggtcagtatttccagaaattgggacgatgttcagtgagagtttctgtgaacacagccaatgtgacacttgggcctcaactcatggaagtgactgtctacagaagacatggacgggcatatgttcccatcgcacaagtgaaagatgtgtacgtggtaacagatcagattcctgtgtttgtgactatgttccagaagaacgatcgaaattcatccgacgaaaccttcctcaaagatctccccattatgtttgatgtcctgattcatgatcctagccacttcctcaattattctaccattaactacaagtggagcttcggggataatactggcctgtttgtttccaccaatcatactgtgaatcacacgtatgtgctcaatggaaccttcagccttaacctcactgtgaaagctgcagcaccaggaccttgtccgccaccgccaccaccacccagaccttcaaaacccaccccttctttaggacctgctggtgacaaccccctggagctgagtaggattcctgatgaaaactgccagattaacagatatggccactttcaagccaccatcacaattgtagagggaatcttagaggttaacatcatccagatgacagacgtcctgatgccggtgccatggcctgaaagctccctaatagactttgtcgtgacctgccaagggagcattcccacggaggtctgtaccatcatttctgaccccacctgcgagatcacccagaacacagtctgcagccctgtggatgtggatgagatgtgtctgctgactgtgagacgaaccttcaatgggtctgggacgtactgtgtgaacctcaccctgggggatgacacaagcctggctctcacgagcaccctgatttctgttcctgacagagacccagcctcgcctttaaggatggcaaacagtgccctgatctccgttggctgcttggccatatttgtcactgtgatctccctcttggtgtacaagtaagtttttggttcctacgctttatatcactatagtgtattgtcaaaagtgaatatatctctgtgtaaataggcatttttcccttttttgcttttaaacattttgtgtaggggaggaaaatattacattgaatggtgaataccaaactggcctgttaatcttgttgtggtttgtttttaatcctaaaagatgctaccagatctcagtaactttacaaaattatgtcaacttaattttaacatgatagtctcaaattatagtaagcaggcacatttcttgcatgaacaagagtaaataaatgtactttcataagac

SEQ ID NO: 306040 - DNA, 1236 bp, Homo sapiens
ttgtaagaggttgaacttgagagaccagatcaggcagtgccgcttaataccatcacatgatcctccccgaggccctgtatttaattaaaatagagagggaggcaccacagatgccagaagaacactgttgctcttggtggacgggcccagaggaattcagagttaaaccttgagtgcctgcgtccgtgagaattcagcatggaatgtctctactatttcctgggatttctgctcctggctgcaagattgccacttgatgccgccaaacgatttcatgatgtgctgggcaatgaaagaccttctgcttacatgagggagcacaatcaattaaatggctggtcttctgatgaaaatgactggaatgaaaaactctacccagtgtggaagcggggagacatgaggtggaaaaactcctggaagggaggccgtgtgcaggcggtcctgaccagtgactcaccagccctcgtgggctcaaatataacatttgcggtgaacctgatattccctagatgccaaaaggaagatgccaatggcaacatagtctatgagaagaactgcagaaatgaggctggtttatctgctgatccgtatgtttacaactggacagcatggtcagaggacagtgacggggaaaatggcaccggccaaagccatcataacgtcttccctgatgggaaaccttttcctcaccaccccggatggagaagatggaatttcatctacgtcttccacacacttggtcagtatttccagaaattgggacgatgttcagtgagagtttctgtgaacacagccaatgtgacacttgggcctcaactcatggaagtgactgtctacagaagacatggacgggcatatgttcccatcgcacaagtgaaagatgtgtacgtggtaacagatcagattcctgtgtttgtgactatgttccagaagaacgatcgaaattcatccgacgaaaccttcctcaaagatctccccattatgtttgatgtcctgattcatgatcctagccacttcctcaattattctaccattaactacaagtggagcttcggggataatactggcctgtttgtttccaccaatcatactgtgaatcacacgtatgtgctcaatggaaccttcagccttaacctcactgtgaaagctgcagcaccaggaccttgtccgccaccgccaccaccacccagaccttcaaaacccaccccttctttagacttgtgaacaaatctgaaa

SEQ ID NO: 306041 - DNA, 1989 bp, Homo sapiens
ttgtaagaggttgaacttgagagaccagatcaggcagtgccgcttaataccatcacatgatcctccccgaggccctgtatttaattaaaatagagagggaggcaccacagatgccagaagaacactgttgctcttggtggacgggcccagaggaattcagagttaaaccttgagtgcctgcgtccgtgagaattcagcatggaatgtctctactatttcctgggatttctgctcctggctgcaagattgccacttgatgccgccaaacgatttcatgatgtgctgggcaatgaaagaccttctgcttacatgagggagcacaatcaattaaatggctggtcttctgatgaaaatgactggaatgaaaaactctacccagtgtggaagcggggagacatgaggtggaaaaactcctggaagggaggccgtgtgcaggcggtcctgaccagtgactcaccagccctcgtgggctcaaatataacatttgcggtgaacctgatattccctagatgccaaaaggaagatgccaatggcaacatagtctatgagaagaactgcagaaatgaggctggtttatctgctgatccgtatgtttacaactggacagcatggtcagaggacagtgacggggaaaatggcaccggccaaagccatcataacgtcttccctgatgggaaaccttttcctcaccaccccggatggagaagatggaatttcatctacgtcttccacacacttggtcagtatttccagaaattgggacgatgttcagtgagagtttctgtgaacacagccaatgtgacacttgggcctcaactcatggaagtgactgtctacagaagacatggacgggcatatgttcccatcgcacaagtgaaagatgtgtacgtggtaacagatcagattcctgtgtttgtgactatgttccagaagaacgatcgaaattcatccgacgaaaccttcctcaaagatctccccattatgtttgatgtcctgattcatgatcctagccacttcctcaattattctaccattaactacaagtggagcttcggggataatactggcctgtttgtttccaccaatcatactgtgaatcacacgtatgtgctcaatggaaccttcagccttaacctcactgtgaaagctgcagcaccaggaccttgtccgccaccgccaccaccacccagaccttcaaaacccaccccttctttaggtaaggtttcgcagtgatctttgagggaggctccttaatggctaacaaaatattcacgcaggtcatattattaaatccctccttaaggggatattgtaaggactctgcggtgattccattttctacctgttgattttttaaagcaaagttatcaccattttacacctatagaacacagaagaaggaagaatgtatgtaaagtcactttgcaaatagaattcagtgacttgtagaaagttctttgaccctcctcatttgcactggtccctgctatgtgtacacactctcccctcttctaacctgtcacatttttgtttatctcccattttttatggctatgagaaggcacactggctccttatacgatcaggtcatttctatgttccttcctctcccccactaatttctttccctaccctgcccacacctacccagtgtccatgaaaacacagctgtacttgaaagcaatttccaaatggtccaagaaagaatgtagcttgagagtatgtctgggttagcaagctgcagtgactcctgacattaaaattgtgctgcatcgtatgtttattgcggcactattcacaatagcaaagacttggaatgaacccaaatgtccatcaatgatagactggattaagaaaatgtggcacatatacaccatagaatactatgcagtcataaaaaaggatgagttcatgtcctttgtaggaacatggatgaagctggaaaccatcattctgagcaaactatcacaaggacagaaaaccaaacgc

SEQ ID NO: 306042 - DNA, 1592 bp, Homo sapiens
ttgtaagaggttgaacttgagagaccagatcaggcagtgccgcttaataccatcacatgatcctccccgaggccctgtatttaattaaaatagagagggaggcaccacagatgccagaagaacactgttgctcttggtggacgggcccagaggaattcagagttaaaccttgagtgcctgcgtccgtgagaattcagcatggaatgtctctactatttcctgggatttctgctcctggctgcaagattgccacttgatgccgccaaacgatttcatgatgtgctgggcaatgaaagaccttctgcttacatgagggagcacaatcaattaaatggctggtcttctgatgaaaatgactggaatgaaaaactctacccagtgtggaagcggggagacatgaggtggaaaaactcctggaagggaggccgtgtgcaggcggtcctgaccagtgactcaccagccctcgtgggctcaaatataacatttgcggtgaacctgatattccctagatgccaaaaggaagatgccaatggcaacatagtctatgagaagaactgcagaaatgaggctggtttatctgctgatccgtatgtttacaactggacagcatggtcagaggacagtgacggggaaaatggcaccggccaaagccatcataacgtcttccctgatgggaaaccttttcctcaccaccccggatggagaagatggaatttcatctacgtcttccacacacttggttggcttttacaaacccctaagcttcttctttacctttccttaaaatttcaaccttctcttttcttactctataattgagaatgataacacagagagttaataacagtcaccctgctaactttccttagcatgagtgaacagtgagagataaaaatgaaatcttggttaaccttgccaaatctccaggacaccgaagagttaaaaagagagaaaaacaaaaagattaagctctttttcaaaaaaacaaaaccacttaatttttttctacctaaaaccataacaagaaaaaatgctaacacttatttatttgaatggcacatggagaccgggcatgtggctcacacttgtaatcccagcaccttggaaggcggaggcgggtggatcacctgaagtcaggagttcaagaccagcctggccaacatggtgaagtcccgtccctactaaaaatacaaaaattagccaggtgtggtggtgcgcacctgtaatcccagctactcaggaggctgaggcaggagaatcacttgaatccgggaggtggaggttgcagtgagaggagattgagccattgcactccagcctgggcaacagagtgagactccatctcgaaaaacaaacaaacaaacaaaaaacagaatggcacattgatgagcattcattgattgattctttagtttttttatgttctctaaagaatttttaagatttaaagaagcatgtgctatttatttgtaggaaatcctcagaaaggtccactaccaataaaatttcctattataccagagttttatgtcaatatatgggttcttgcagtattagatcttattagatccctacccttttgttcttcctag

SEQ ID NO: 306043 - DNA, 477 bp, Homo sapiens
ttgtaagaggttgaacttgagagaccagatcaggcagtgccgcttaataccatcacatgatcctccccgaggccctgtatttaattaaaatagagagggaggcaccacagatgccagaagaacactgttgctcttggtggacgggcccagaggaattcagagttaaaccttgagtgcctgcgtccgtgagaattcagcatggaatgtctctactatttcctgggatttctgctcctggctgcaagattgccacttgatgccgccaaacgtgagtaacccttaatttctatgtttaacccattctctggccattggctgaaatgatggctaataatatcctctgaactagaggttggactgaagttcttcaggaagctttcatctctggctcactcatctcttcttctgcaaactgttgggaaggctgaaactacagcaaaatgcctccagctccattctttgctttcggctcatgga

SEQ ID NO: 306044 - DNA, 458 bp, Homo sapiens
gctgagtgacactcttgtgtatatttccaaatttttgtacagtcgctgcacatatttgaaatcatatattaagactttccaaagatgaggtccctggtttttcatggcaacttgatcagtaaggatttcacctctgtttgtaactaaaaccatctactatatgttagacatgacattctttttctctccttcctgaaaaataaagtgtgggaagagacaagaccttggtattgtaattatttttctgattcatcatttgcttttcaatttcacttacagttgtttcttttttttagatgagggtctccctatattgtccaagctggtctcagactcctggcctcaaaggatcctcctgcctcagcatcccaaagcgctgggattacaggagtaagccactgtacccagcctcaatttcatttatagtttttgacaagtaaaaagttgtttaacaatgt

SEQ ID NO: 306045 - DNA, 383 bp, Homo sapiens
ttaaatgtcattttagagatggggagagggattatactgcaggcagcttcagccatgttgtgaaactgataaaagcaacttagcaaggcttcttttcattattttttatgtttcacttataaagtcttaggtaactagtaggatagaaacactgtgtcccgagagtaaggagagaagctactattgattagagcctaacccaggttaactgcaagaagaggcgggatactttcagctttccatgtaactgtatgcataaagccaatgtagtccagtttctaagatcatgttccaagctaactgaatcccacttcaatacacactcatgaactcctgatggaacaataacaggcccaagcctgtggtatgatgtgcacacttgc

SEQ ID NO: 306046 - DNA, 1777 bp, Homo sapiens
tacagctttgattttataacatcctgctaatttttgttcttacagaaatacactttcgggaaatggcctctaaatcctggctgaattttttaaccttcctctgtggatcagcaataggatttcttttatgttctcagctatttagtattttgttgggagaaaaggttgacacccagcctaatgttcttcataatgatcctcatgcaaggcattcagatgataatggacagaatcatctagaaggacaaatgaacttcaatgcagattctagccaacataaagatgagaacacagacattgctgaaaacctctatcagaaagttagaattctttgctgggttatgaccggccctcaaaacctagagaaaaaggccaaacacgtcaaagctacttgggcccagcgttgtaacaaagtgttgtttatgagttcagaagaaaataaagacttccctgctgtgggactgaaaaccaaagaaggcagagatcaactatactggaaaacaattaaagcttttcagtatgttcatgaacattatttagaagatgctgattggtttttgaaagcagatgatgacacgtatgtcatactagacaatttgaggtggcttctttcaaaatacgaccctgaagaacccatttactttgggagaagatttaagccttatgtaaagcagggctacatgagtggaggagcaggatatgtactaagcaaagaagccttgaaaagatttgttgatgcatttaaaacagacaagtgtacacatagttcctccattgaagacttagcactggggagatgcatggaaattatgaatgtagaagcaggagattccagagataccattggaaaagaaacttttcatccctttgtgccagaacaccatttaattaaaggttatctacctagaacgttttggtactggaattacaactattatcctcctgtagagggtcctggttgctgctctgatcttgcagtttcttttcactatgttgattctacaaccatgtatgagttagaatacctcgtttatcatcttcgtccatatggttatttatacagatatcaacctaccttacctgaacgtatactaaaggaaattagtcaagcaaacaaaaatgaagatacaaaagtgaagttaggaaatccttgaaagaaaatcatgaatgaacaaaggtaatatgtctagcactgcactgaaaaaggacttctgcatttctgacatagaacactggaatcccagtgaggaattctaagtgaacattccttatagaaacctttcacatgaatgactataaactgaagctttaaatgagctgtgaagtgtgttaaaatgtgttttgatacagtaatatataaatatatctatatatatgaggaacttgtgttttttaaatggtggccaggtagaggaactagaaaagagattttgttgcctgttttctgaccatctgtgttattgtcactgagaaactaaaatagtaaatttactaaaactacactgcaccatgttagtaataaacagatctgccttaaagaaaagaaaattttagaaagaaatattgttgctcagtgttgttaatatagctcaagaattgagtttatatttgcagtatgctataaatgatacccccctaccacacccacacacacagtttttgtctaatgaaaatgttgctgtgattatttataattggtagtatttcttccagaagaagctaaaataagactggcacttaccctgaagtgcattaataaaaccacactttaaaatta

SEQ ID NO: 306047 - DNA, 992 bp, Homo sapiens
tacagctttgattttataacatcctgctaatttttgttcttacagaaatacactttcgggaaatggcctctaaatcctggctgaattttttaaccttcctctgtggatcagcaataggatttcttttatgttctcagctatttagtattttgttgggagaaaaggttgacacccagcctaatgttcttcataatgatcctcatgcaaggcattcagatgataatggacagaatcatctagaaggacaaatgaacttcaatgcagattctagccaacataaagatgagaacacagacattgctgaaaacctctatcagaaagttagaattctttgctgggttatgaccggccctcaaaacctagagaaaaaggccaaacacgtcaaagctacttgggcccagcgttgtaacaaagtgttgtttatgagttcagaagaaaataaagacttccctgctgtgggactgaaaaccaaagaaggcagagatcaactatactggaaaacaattaaagcttttcagtatgttcatgaacattatttagaagatgctgattggtttttgaaagcagatgatgacacgtatgtcatactagacaatttgaggtggcttctttcaaaatacgaccctgaagaacccatttactttgggagaagatttaagccttatgtaaagcagggctacatgagtggaggagcaggatatgtactaagcaaagaagccttgaaaagatttgttgatgcatttaaaacagacaagtgtacacatagttcctccattgaagacttagcactggggagatgcatggaaattatgaatgtagaagcaggagattccagagataccattggaaaagaaacttttcatccctttgtgccagaacaccatttaattaaaggttatctacctagaacgttttggtactggaattacaactattatcctcctgtagaggtaagtttagaaattttattactatgtcaatacttggactga

SEQ ID NO: 306048 - DNA, 1873 bp, Homo sapiens
tacagctttgattttataacatcctgctaatttttgttcttacagaaatacactttcgggaaatggcctctaaatcctggctgaattttttaaccttcctctgtggatcagcaataggatttcttttatgttctcagctatttagtattttgttgggagaaaaggttgacacccagcctaatgttcttcataatgatcctcatgcaaggcattcagatgataatggacagaatcatctagaaggacaaatgaacttcaatgcagattctagccaacataaagatgagaacacagacattgctgaaaacctctatcagaaagttagaattctttgctgggttatgaccggccctcaaaacctagagaaaaaggccaaacacgtcaaagctacttgggcccagcgttgtaacaaagtgttgtttatgagttcagaagaaaataaagacttccctgctgtgggactgaaaaccaaagaaggcagagatcaactatactggaaaacaattaaagcttttcagtatgttcatgaacattatttagaagatgctgattggtttttgaaagcagatgatgacacgtatgtcatactagacaatttgaggtggcttctttcaaaatacgaccctgaagaacccatttactttgggagaagatttaagccttatgtaaagcagggctacatgagtggaggagcaggatatgtactaagcaaagaagccttgaaaagatttgttgatgcatttaaaacagacaagtgtacacatagttcctccattgaagacttagcactggggagatgcatggaaattatgaatgtagaagcaggagattccagagataccattggaaaagaaacttttcatccctttgtgccagaacaccatttaattaaaggttatctacctagaacgttttggtactggaattacaactattatcctcctgtagagggtcctggttgctgctctgatcttgcagtttcttttcactatgttgattctacaaccatgtatgagttagaatacctcgtttatcatcttcgtccatatggttatttatacagatatcaacctaccttacctgaacgtatactaaaggaaattagtcaagcaaacaaaaatgaagatacaaaagtgaagttaggaaatccttgaaagaaaatcatgaatgaacaaaggtaatatgtctagcactgcactgaaaaaggacttctgcatttctgacatagaacactggaatcccagtgaggaattctaagtgaacattccttatagaaacctttcacatgaatgactataaactgaagctttaaatgagctgtgaagtgtgttaaaatgtgttttgatacagtaatatataaatatatctatatatatgaggaacttgtgttttttaaatggtggccaggtagaggaactagaaaagagattttgttgcctgttttctgaccatctgtgttattgtcactgagaaactaaaatagtaaatttactaaaactacactgcaccatgttagtaataaacagatctgccttaaagaaaagaaaattttagaaagaaatattgttgctcagtgttgttaatatagctcaagaattgagtttatatttgcagtatgctataaatgatacccccctaccacacccacacacacagtttttgtctaatgaaaatgttgctgtgattatttataattggtagtatttcttccagaagaagctaaaataagactggcacttaccctgaagtgcattaataaaaccacactttaaaattaaaaatcatccacaaccacaaaacagaaaataaaaaaaggcagccatactcagggggatgaacaccctcaacggcgtatgtaatcaaaagcggcaaa

SEQ ID NO: 306049 - DNA, 1835 bp, Homo sapiens
  misc_feature (1551)..(1551): n is a, c, g, or t
tacagctttgattttataacatcctgctaatttttgttcttacagaaatacactttcgggaaatggcctctaaatcctggctgaattttttaaccttcctctgtggatcagcaataggatttcttttatgttctcagctatttagtattttgttgggagaaaaggttgacacccagcctaatgttcttcataatgatcctcatgcaaggcattcagatgataatggacagaatcatctagaaggacaaatgaacttcaatgcagattctagccaacataaagatgagaacacagacattgctgaaaacctctatcagaaagttagaattctttgctgggttatgaccggccctcaaaacctagagaaaaaggccaaacacgtcaaagctacttgggcccagcgttgtaacaaagtgttgtttatgagttcagaagaaaataaagacttccctgctgtgggactgaaaaccaaagaaggcagagatcaactatactggaaaacaattaaagcttttcagtatgttcatgaacattatttagaagatgctgattggtttttgaaagcagatgatgacacgtatgtcatactagacaatttgaggtggcttctttcaaaatacgaccctgaagaacccatttactttgggagaagatttaagccttatgtaaagcagggctacatgagtggaggagcaggatatgtactaagcaaagaagccttgaaaagatttgttgatgcatttaaaacagacaagtgtacacatagttcctccattgaagacttagcactggggagatgcatggaaattatgaatgtagaagcaggagattccagagataccattggaaaagaaacttttcatccctttgtgccagaacaccatttaattaaaggttatctacctagaacgttttggtactggaattacaactattatcctcctgtagagggtcctggttgctgctctgatcttgcagtttcttttcactatgttgattctacaaccatgtatgagttagaatacctcgtttatcatcttcgtccatatggttatttatacagatatcaacctaccttacctgaacgtatactaaaggaaattagtcaagcaaacaaaaatgaagatacaaaagtgaagttaggaaatccttgaaagaaaatcatgaatgaacaaaggtaatatgtctagcactgcactgaaaaaggacttctgcatttctgacatagaacactggaatcccagtgaggaattctaagtgaacattccttatagaaacctttcacatgaatgactataaactgaagctttaaatgagctgtgaagtgtgttaaaatgtgttttgatacagtaatatataaatatatctatatatatgaggaacttgtgttttttaaatggtggccaggtagaggaactagaaaagagattttgttgcctcacttgcgacacactgtataaacttcactgacctactatattaggacataaactcaaactacattgcaaaacgaaaccattaatcatatgtgatttaattaatagacccttntaagaaattcctctcaatacttatttgaagatctgtagctgataacaacaagtccacatactcaccttgtatctccaacacctccccaacttctttcacactcggacctctctttttccttcccacacccaccacgacccaactcaaaacccctctccttcacttctacacccaccctctcatgtaacactcaccacccccctcctccctctttcccctacaattaatctttcctttccaactcctctcccctctttattcaaccctcctccataccaccaacc

SEQ ID NO: 306050 - DNA, 766 bp, Homo sapiens
aatctcaggtcactgcaaccctgcctcccaggttcaagcaattctcctgcctcagcctccaagtagctgggactacaggcacatgctaccactgccggctaattttttgtattttagtagagatggggttttaccatgttgcccaggctgatttcgaactcctgatctcaggcaatccgcctgcctctgcctgccaaagtgctgggattacaggcgtgagcgaccgtgcctggcccatattttcttttattgaagtatactttcctgtttctttgtgtaccttcttgtgattttttttgttgttgtttttgaaaactggacttttgaatagtatattgtggcaactctgaaaataagattcttctccttctttggggtttactgttttattttatttatttttttgtgtgtgtggttgtttttgttttcattgttgagacctgtaatagtcttgttctagtaacttttcctatttttgcagagacttttctttgtcatgtgtggttgctgaagtctctgtcccttagcttgtattcagtgagtggggtttttttgtttgtttgtttgtttttgagacagagtttttgctctgttgcccaggctggagtgaactggcctgatgtcagctcactgcaatctcccaggttcaagcaattctcctgcctcagcctcctgtgtagctaagattgcaggcacatgccaccacacccagctaaattttgtatttttagtagagatggggtttcaccatgttgtccgggctggc

SEQ ID NO: 306051 - DNA, 242 bp, Homo sapiens
ttttgattttgggtagaaacaggtgtcactatggtgcccaggctagtaactcctgtgctccagcaatcctcctgccttggcctcccaaactcctgggattacaggcctgagtcaccaagctcagcctctcctcatcaaaaccattccctctttgtaagattcttcctatgtcttaaaacttaatacctttaatccttccctggagccatagttttatttatttatttatttatttatgagac

SEQ ID NO: 306052 - DNA, 5184 bp, Homo sapiens
cctttccgtccttgcttcttttttcattgatgtaaatttttttaacttaatatgaaaactctccaagtcttgatcatcagccaggattttgccacagcaatttcattctcttatcggagcttgtatgtgtcaaagtatacttcagagtgcaaacattaagcaagtaatatattttacctacagatacttatgaagacattctttcgctatcgtgagtaaaagtatataaagctgtttctaactgaaaatgcttgaaataagcctgtaatagaaatattttttcattttttaaaaaagggcggaattccactgtcttcgccttcttgcacttcgcgggagaagttgttggcgcgaatggatcctgagcctcgataacagattcctcaaccggcccacccgccagccagccagcgccttcatcctggggctgcgatggacattcggaaattctttggagtaataccaagtggaaagaaacttgtaagtgaaacagtaaagaagaatgagaaaacaaagtctgatgaagaaactttaaaagcaaagaaaggaataaaggaaatcaaggtaaatagctcccgtaaagaggatgacttcaaacaaaagcaaccaagcaagaaaaagaggatcatctatgattcagattcagagtcagaggagacgttgcaggtaaaaaatgccaaaaagccaccagaaaaactgccagtatcttctaaacctggtaaaatttcacggcaggatcctgttacatacatttcagaaacagatgaagaagatgactttatgtgtaagaaggcggcctctaaatcaaaagagaatggaagatctacaaatagtcatcttggaacatcaaacatgaaaaagaatgaagaaaacactaagaccaagaataagcctttatcaccaataaaacttacacccacatcagtacttgattattttggaactggaagtgtccaaagatctaataagaagatggtggcaagcaaaagaaaagagctttcacaaaatacagatgagtctggattaaatgatgaagccatcgccaagcaattacagcttgatgaagatgcggagctggagaggcagttgcatgaagatgaagagtttgccagaacattagccatgttggatgaagaacccaagaccaaaaaggctcgaaaggacacagaagcgggagaaacgttttcatctgtccaagccaatttaagtaaagcagaaaaacataaatatcctcataaagtaaaaacagcacaagtttcagatgaaagaaagagctacagtcctaggaagcaaagtaaatatgaaagttcaaaagaatctcagcaacattccaagtcatcagctgacaaaataggagaagtctcttctcccaaggccagttctaagctggcaattatgaaaagaaaagaagagagctcttataaagaaatagagcctgtggcctcaaaaagaaaagaaaatgccattaaattgaaaggagagacaaaaactcctaagaaaaccaaaagttctccagctaaaaaagagtctgtaagtcctgaagattctgaaaagaaacgcactaattatcaagcttatcgaagctacttaaatcgagaaggtcccaaggctctgggctccaaagaaataccaaagggagctgaaaattgcttggaaggccttatatttgtaatcacaggcgtgctggagtctattgaacgagatgaggccaagtctctaattgaacgttatgggggaaaagtaacaggaaatgtcagcaagaaaacaaattatcttgtcatgggtcgtgatagtggacagtccaagagtgataaggccgcagccttggggacaaaaattattgatgaagatggcctgttgaatctgattcggactatgccaggcaagaaatccaagtatgaaatagcagttgaaactgagatgaagaaagagtccaaactggagagaacaccccaaaaaaatgtccaaggaaaaagaaaaattagtccatctaaaaaggaatcagaatctaaaaagagcaggccgacttccaaaagggacagtttggcaaagacaataaaaaaggaaacagatgtgttttggaaaagcctggatttcaaggagcaggtggctgaggagacaagtggtgacagcaaggctaggaatttggctgatgacagcagtgaaaacaaagtggaaaatttgctctgggtggataaatataagccaacctcgctcaagaccataattggacagcaaggtgaccagagctgtgccaacaaactcctacgctggctccgaaactggcaaaagagttcttccgaagataaaaaacacgcagcaaagtttggtaaattttccggcaaagatgatggctctagttttaaagcagcgttgctgtcaggccctcctggtgttggcaaaaccaccacagcttccctggtgtgtcaggagttgggatacagctacgtggaactgaatgcaagtgacacccggagtaagagcagtttgaaggcgattgttgctgagtcactgaacaataccagcatcaaaggcttttattcaaatggagcagcctcttcagtaagcacgaaacatgctctcatcatggatgaagtagatggcatggcaggcaatgaggataggggaggaattcaggaattaattggcctgataaaacatactaaaattcccattatttgtatgtgcaatgatagaaatcatcccaagattcgctctctggttcattattgttttgatcttcgttttcaaagacctcgggttgaacagattaagggtgctatgatgtctattgcatttaaagaaggtttaaagattccccctccagctatgaatgaaataattttgggagccaatcaagatatcagacaggttttacataatctgagtatgtggtgtgcacgaagtaaagcattaacctatgaccaggccaaagctgattctcacagagccaaaaaggatatcaaaatgggcccatttgatgttgcccggaaagtgtttgcagctggagaggagactgctcacatgtcacttgtggacaagtcagatctcttttttcatgattattcaatagcacccctcttcgtccaggaaaattacatacacgtgaagcctgtagcagcagggggtgacatgaaaaagcacctgatgcttttaagcagagcagcagacagcatatgcgatggtgacctagtggacagccagatccggagtaagcaaaactggagtcttctgcctgcgcaggccatttatgccagtgttcttcctggagagttgatgagggggtacatgacccagtttcccaccttcccaagctggctggggaagcactcgtctacaggcaaacatgatcgtattgttcaggacctggccttgcatatgagtctcagaacttactccagcaaaaggactgtaaacatggattatctgtcgcttctaagggatgcacttgtacagcccttgacctcacaaggagtagacggagtacaggatgttgttgcacttatggacacatattatttgatgaaagaagactttgagaatatcatggaaatcagcagctggggtggcaaacctagtcccttttcaaagctggatcccaaggtgaaagcagccttcacaagagcttacaataaggaagcccaccttactccatactcacttcaagctataaaggcatctagacacagcacaagcccatccctggattcggaatacaatgaagaattaaatgaagatgactctcaatctgatgagaaagaccaagatgctatagaaactgatgccatgatcaagaaaaagacaaaatcttcaaagccttcaaaaccagaaaaagataaggagcccagaaaaggaaaaggaaaaagttcgaagaaatgaaaccatttttcactagcgacagccactttttactctccctcctgaccagtccagctggtctagagaaagccttgttttttcccagagcaaccatgttttagcataatgggatgacctggtgtcccattataaataaagggtggtatggctagaagggtatgagcagtaggcttatgtacacctcttatagaggttgataggactgcttgggtcctccactgtcctctgtcaatctagttagacgtgcttctgaatgactgtagaattggaactagaaactacacctgggctttggagtcagattttagttaacaataatgagcctgggagcagtagtactaaggcgtcttttgtaggcttaagaatttatcctaatggcctttataggaccaatgctgattttttttaaaggcagttcctattatgtggtgaaattttgtaaataaatgattatacaaaacagtcaccacctagaactgggtattctttgtacattgtcagatatctttcaaagtataaattaggaataaaaatgttccacatgatatgtgtacaaattctttttaagattgtcatcttgtacagcaaaatattatgttggtatattacttccttattaatttgcaaatgattggattaaaaaagctcactgtattccttactaacctgttgtgtgaaacataacattggcagtcgaggagtcagaactcggattcccagcctcactccctctgtgtgtgttgaccacgtctctgctgtgaataggatttcatgcagtggtctgttatggggctttgcagcgtggggggctgcagaagattctcagacattcttatccttctggagtctcaacccatcaggttcagaccagtaggaaccaggctgggtcaggctcttaatttcactacggtgggggacaaaatgaacactggcttttgttcactttgcccctgagagatctagtcctgtcctgtgatggcttccacaaaccctgttggaagtttgggttattcctataactgtatgtgttgagtggccgtgaggctatggacctagcctggaatttagatgtctagctattttttaatcttgttggtaaatgctcagaggtctgtgctacctctgtgaggtatatactaaaatgaatgtaaaataaggatcgtattccctgctttaaggaactggtagtcttgtttgggtgatgagacaaagttcttgagacatttaaactgtatttaccagtgtgaaaaatgtcatttatggagattaattcattatggaaataaaacattgcctaagcccttg

SEQ ID NO: 306053 - DNA, 4958 bp, Homo sapiens
tcagtctggtactcttttttgaatgttgtcaaaactagttaattggaagttaacggtactatttatactaaaagagtaccagactgtcttcgccttcttgcacttcgcgggagaagttgttggcgcgaatggatcctgagcctcgataacagattcctcaaccggcccacccgccagccagccagcgccttcatcctggggctgcgatggacattcggaaattctttggagtaataccaagtggaaagaaacttgtaagtgaaacagtaaagaagaatgagaaaacaaagtctgatgaagaaactttaaaagcaaagaaaggaataaaggaaatcaaggtaaatagctcccgtaaagaggatgacttcaaacaaaagcaaccaagcaagaaaaagaggatcatctatgattcagattcagagtcagaggagacgttgcaggtaaaaaatgccaaaaagccaccagaaaaactgccagtatcttctaaacctggtaaaatttcacggcaggatcctgttacatacatttcagaaacagatgaagaagatgactttatgtgtaagaaggcggcctctaaatcaaaagagaatggaagatctacaaatagtcatcttggaacatcaaacatgaaaaagaatgaagaaaacactaagaccaagaataagcctttatcaccaataaaacttacacccacatcagtacttgattattttggaactggaagtgtccaaagatctaataagaagatggtggcaagcaaaagaaaagagctttcacaaaatacagatgagtctggattaaatgatgaagccatcgccaagcaattacagcttgatgaagatgcggagctggagaggcagttgcatgaagatgaagagtttgccagaacattagccatgttggatgaagaacccaagaccaaaaaggctcgaaaggacacagaagcgggagaaacgttttcatctgtccaagccaatttaagtaaagcagaaaaacataaatatcctcataaagtaaaaacagcacaagtttcagatgaaagaaagagctacagtcctaggaagcaaagtaaatatgaaagttcaaaagaatctcagcaacattccaagtcatcagctgacaaaataggagaagtctcttctcccaaggccagttctaagctggcaattatgaaaagaaaagaagagagctcttataaagaaatagagcctgtggcctcaaaaagaaaagaaaatgccattaaattgaaaggagagacaaaaactcctaagaaaaccaaaagttctccagctaaaaaagagtctgtaagtcctgaagattctgaaaagaaacgcactaattatcaagcttatcgaagctacttaaatcgagaaggtcccaaggctctgggctccaaagaaataccaaagggagctgaaaattgcttggaaggccttatatttgtaatcacaggcgtgctggagtctattgaacgagatgaggccaagtctctaattgaacgttatgggggaaaagtaacaggaaatgtcagcaagaaaacaaattatcttgtcatgggtcgtgatagtggacagtccaagagtgataaggccgcagccttggggacaaaaattattgatgaagatggcctgttgaatctgattcggactatgccaggcaagaaatccaagtatgaaatagcagttgaaactgagatgaagaaagagtccaaactggagagaacaccccaaaaaaatgtccaaggaaaaagaaaaattagtccatctaaaaaggaatcagaatctaaaaagagcaggccgacttccaaaagggacagtttggcaaagacaataaaaaaggaaacagatgtgttttggaaaagcctggatttcaaggagcaggtggctgaggagacaagtggtgacagcaaggctaggaatttggctgatgacagcagtgaaaacaaagtggaaaatttgctctgggtggataaatataagccaacctcgctcaagaccataattggacagcaaggtgaccagagctgtgccaacaaactcctacgctggctccgaaactggcaaaagagttcttccgaagataaaaaacacgcagcaaagtttggtaaattttccggcaaagatgatggctctagttttaaagcagcgttgctgtcaggccctcctggtgttggcaaaaccaccacagcttccctggtgtgtcaggagttgggatacagctacgtggaactgaatgcaagtgacacccggagtaagagcagtttgaaggcgattgttgctgagtcactgaacaataccagcatcaaaggcttttattcaaatggagcagcctcttcagtaagcacgaaacatgctctcatcatggatgaagtagatggcatggcaggcaatgaggataggggaggaattcaggaattaattggcctgataaaacatactaaaattcccattatttgtatgtgcaatgatagaaatcatcccaagattcgctctctggttcattattgttttgatcttcgttttcaaagacctcgggttgaacagattaagggtgctatgatgtctattgcatttaaagaaggtttaaagattccccctccagctatgaatgaaataattttgggagccaatcaagatatcagacaggttttacataatctgagtatgtggtgtgcacgaagtaaagcattaacctatgaccaggccaaagctgattctcacagagccaaaaaggatatcaaaatgggcccatttgatgttgcccggaaagtgtttgcagctggagaggagactgctcacatgtcacttgtggacaagtcagatctcttttttcatgattattcaatagcacccctcttcgtccaggaaaattacatacacgtgaagcctgtagcagcagggggtgacatgaaaaagcacctgatgcttttaagcagagcagcagacagcatatgcgatggtgacctagtggacagccagatccggagtaagcaaaactggagtcttctgcctgcgcaggccatttatgccagtgttcttcctggagagttgatgagggggtacatgacccagtttcccaccttcccaagctggctggggaagcactcgtctacaggcaaacatgatcgtattgttcaggacctggccttgcatatgagtctcagaacttactccagcaaaaggactgtaaacatggattatctgtcgcttctaagggatgcacttgtacagcccttgacctcacaaggagtagacggagtacaggatgttgttgcacttatggacacatattatttgatgaaagaagactttgagaatatcatggaaatcagcagctggggtggcaaacctagtcccttttcaaagctggatcccaaggtgaaagcagccttcacaagagcttacaataaggaagcccaccttactccatactcacttcaagctataaaggcatctagacacagcacaagcccatccctggattcggaatacaatgaagaattaaatgaagatgactctcaatctgatgagaaagaccaagatgctatagaaactgatgccatgatcaagaaaaagacaaaatcttcaaagccttcaaaaccagaaaaagataaggagcccagaaaaggaaaaggaaaaagttcgaagaaatgaaaccatttttcactagcgacagccactttttactctccctcctgaccagtccagctggtctagagaaagccttgttttttcccagagcaaccatgttttagcataatgggatgacctggtgtcccattataaataaagggtggtatggctagaagggtatgagcagtaggcttatgtacacctcttatagaggttgataggactgcttgggtcctccactgtcctctgtcaatctagttagacgtgcttctgaatgactgtagaattggaactagaaactacacctgggctttggagtcagattttagttaacaataatgagcctgggagcagtagtactaaggcgtcttttgtaggcttaagaatttatcctaatggcctttataggaccaatgctgattttttttaaaggcagttcctattatgtggtgaaattttgtaaataaatgattatacaaaacagtcaccacctagaactgggtattctttgtacattgtcagatatctttcaaagtataaattaggaataaaaatgttccacatgatatgtgtacaaattctttttaagattgtcatcttgtacagcaaaatattatgttggtatattacttccttattaatttgcaaatgattggattaaaaaagctcactgtattccttactaacctgttgtgtgaaacataacattggcagtcgaggagtcagaactcggattcccagcctcactccctctgtgtgtgttgaccacgtctctgctgtgaataggatttcatgcagtggtctgttatggggctttgcagcgtggggggctgcagaagattctcagacattcttatccttctggagtctcaacccatcaggttcagaccagtaggaaccaggctgggtcaggctcttaatttcactacggtgggggacaaaatgaacactggcttttgttcactttgcccctgagagatctagtcctgtcctgtgatggcttccacaaaccctgttggaagtttgggttattcctataactgtatgtgttgagtggccgtgaggctatggacctagcctggaatttagatgtctagctattttttaatcttgttggtaaatgctcagaggtctgtgctacctctgtgaggtatatactaaaatgaatgtaaaataaggatcgtattccctgctttaaggaactggtagtcttgtttgggtgatgagacaaagttcttgagacatttaaactgtatttaccagtgtgaaaaatgtcatttatggagattaattcattatggaaataaaacattgcctaagcccttg

SEQ ID NO: 306054 - DNA, 469 bp, Homo sapiens
aataaaatatgcctcatttgccttggaaattttgtggatgaatgaatgacagtttattgtagtgtcctgctagttgaaaggtgacccttaaaattttgatggattttaacaacagattttatggtaatagtttttctattatttgtcacatttgacacttttaaaatttgtttaggctcgaaaggacacagaagcgggagaaacgttttcatctgtccaagccaatttaagtaaagcagaaaaacataaatatcctcataaagtaaaaacagcacaagtttcagatgaaagaaagagctacagtcctaggaagcaaagtaaatatgaaagttcaaaagaatctcagcaacattccaagtcatcagctgacaaaataggagaagtctcttctcccaaggccagttctaagctggcaattatgaaaagaaaagaagagagctcttataaagaaatagagcctgtggcctca

SEQ ID NO: 306055 - DNA, 5147 bp, Homo sapiens
cctttccgtccttgcttcttttttcattgatgtaaatttttttaacttaatatgaaaactctccaagtcttgatcatcagccaggattttgccacagcaatttcattctcttatcggagcttgtatgtgtcaaagtatacttcagagtgcaaacattaagcaagtaatatattttacctacagatacttatgaagacattctttcgctatcgtgagtaaaagtatataaagctgtttctaactgaaaatgcttgaaataagcctgtaatagaaatattttttcattttttaaaaaagggcggaattccacggcgcgaatggatcctgagcctcgataacagattcctcaaccggcccacccgccagccagccagcgccttcatcctggggctgcgatggacattcggaaattctttggagtaataccaagtggaaagaaacttgtaagtgaaacagtaaagaagaatgagaaaacaaagtctgatgaagaaactttaaaagcaaagaaaggaataaaggaaatcaaggtaaatagctcccgtaaagaggatgacttcaaacaaaagcaaccaagcaagaaaaagaggatcatctatgattcagattcagagtcagaggagacgttgcaggtaaaaaatgccaaaaagccaccagaaaaactgccagtatcttctaaacctggtaaaatttcacggcaggatcctgttacatacatttcagaaacagatgaagaagatgactttatgtgtaagaaggcggcctctaaatcaaaagagaatggaagatctacaaatagtcatcttggaacatcaaacatgaaaaagaatgaagaaaacactaagaccaagaataagcctttatcaccaataaaacttacacccacatcagtacttgattattttggaactggaagtgtccaaagatctaataagaagatggtggcaagcaaaagaaaagagctttcacaaaatacagatgagtctggattaaatgatgaagccatcgccaagcaattacagcttgatgaagatgcggagctggagaggcagttgcatgaagatgaagagtttgccagaacattagccatgttggatgaagaacccaagaccaaaaaggctcgaaaggacacagaagcgggagaaacgttttcatctgtccaagccaatttaagtaaagcagaaaaacataaatatcctcataaagtaaaaacagcacaagtttcagatgaaagaaagagctacagtcctaggaagcaaagtaaatatgaaagttcaaaagaatctcagcaacattccaagtcatcagctgacaaaataggagaagtctcttctcccaaggccagttctaagctggcaattatgaaaagaaaagaagagagctcttataaagaaatagagcctgtggcctcaaaaagaaaagaaaatgccattaaattgaaaggagagacaaaaactcctaagaaaaccaaaagttctccagctaaaaaagagtctgtaagtcctgaagattctgaaaagaaacgcactaattatcaagcttatcgaagctacttaaatcgagaaggtcccaaggctctgggctccaaagaaataccaaagggagctgaaaattgcttggaaggccttatatttgtaatcacaggcgtgctggagtctattgaacgagatgaggccaagtctctaattgaacgttatgggggaaaagtaacaggaaatgtcagcaagaaaacaaattatcttgtcatgggtcgtgatagtggacagtccaagagtgataaggccgcagccttggggacaaaaattattgatgaagatggcctgttgaatctgattcggactatgccaggcaagaaatccaagtatgaaatagcagttgaaactgagatgaagaaagagtccaaactggagagaacaccccaaaaaaatgtccaaggaaaaagaaaaattagtccatctaaaaaggaatcagaatctaaaaagagcaggccgacttccaaaagggacagtttggcaaagacaataaaaaaggaaacagatgtgttttggaaaagcctggatttcaaggagcaggtggctgaggagacaagtggtgacagcaaggctaggaatttggctgatgacagcagtgaaaacaaagtggaaaatttgctctgggtggataaatataagccaacctcgctcaagaccataattggacagcaaggtgaccagagctgtgccaacaaactcctacgctggctccgaaactggcaaaagagttcttccgaagataaaaaacacgcagcaaagtttggtaaattttccggcaaagatgatggctctagttttaaagcagcgttgctgtcaggccctcctggtgttggcaaaaccaccacagcttccctggtgtgtcaggagttgggatacagctacgtggaactgaatgcaagtgacacccggagtaagagcagtttgaaggcgattgttgctgagtcactgaacaataccagcatcaaaggcttttattcaaatggagcagcctcttcagtaagcacgaaacatgctctcatcatggatgaagtagatggcatggcaggcaatgaggataggggaggaattcaggaattaattggcctgataaaacatactaaaattcccattatttgtatgtgcaatgatagaaatcatcccaagattcgctctctggttcattattgttttgatcttcgttttcaaagacctcgggttgaacagattaagggtgctatgatgtctattgcatttaaagaaggtttaaagattccccctccagctatgaatgaaataattttgggagccaatcaagatatcagacaggttttacataatctgagtatgtggtgtgcacgaagtaaagcattaacctatgaccaggccaaagctgattctcacagagccaaaaaggatatcaaaatgggcccatttgatgttgcccggaaagtgtttgcagctggagaggagactgctcacatgtcacttgtggacaagtcagatctcttttttcatgattattcaatagcacccctcttcgtccaggaaaattacatacacgtgaagcctgtagcagcagggggtgacatgaaaaagcacctgatgcttttaagcagagcagcagacagcatatgcgatggtgacctagtggacagccagatccggagtaagcaaaactggagtcttctgcctgcgcaggccatttatgccagtgttcttcctggagagttgatgagggggtacatgacccagtttcccaccttcccaagctggctggggaagcactcgtctacaggcaaacatgatcgtattgttcaggacctggccttgcatatgagtctcagaacttactccagcaaaaggactgtaaacatggattatctgtcgcttctaagggatgcacttgtacagcccttgacctcacaaggagtagacggagtacaggatgttgttgcacttatggacacatattatttgatgaaagaagactttgagaatatcatggaaatcagcagctggggtggcaaacctagtcccttttcaaagctggatcccaaggtgaaagcagccttcacaagagcttacaataaggaagcccaccttactccatactcacttcaagctataaaggcatctagacacagcacaagcccatccctggattcggaatacaatgaagaattaaatgaagatgactctcaatctgatgagaaagaccaagatgctatagaaactgatgccatgatcaagaaaaagacaaaatcttcaaagccttcaaaaccagaaaaagataaggagcccagaaaaggaaaaggaaaaagttcgaagaaatgaaaccatttttcactagcgacagccactttttactctccctcctgaccagtccagctggtctagagaaagccttgttttttcccagagcaaccatgttttagcataatgggatgacctggtgtcccattataaataaagggtggtatggctagaagggtatgagcagtaggcttatgtacacctcttatagaggttgataggactgcttgggtcctccactgtcctctgtcaatctagttagacgtgcttctgaatgactgtagaattggaactagaaactacacctgggctttggagtcagattttagttaacaataatgagcctgggagcagtagtactaaggcgtcttttgtaggcttaagaatttatcctaatggcctttataggaccaatgctgattttttttaaaggcagttcctattatgtggtgaaattttgtaaataaatgattatacaaaacagtcaccacctagaactgggtattctttgtacattgtcagatatctttcaaagtataaattaggaataaaaatgttccacatgatatgtgtacaaattctttttaagattgtcatcttgtacagcaaaatattatgttggtatattacttccttattaatttgcaaatgattggattaaaaaagctcactgtattccttactaacctgttgtgtgaaacataacattggcagtcgaggagtcagaactcggattcccagcctcactccctctgtgtgtgttgaccacgtctctgctgtgaataggatttcatgcagtggtctgttatggggctttgcagcgtggggggctgcagaagattctcagacattcttatccttctggagtctcaacccatcaggttcagaccagtaggaaccaggctgggtcaggctcttaatttcactacggtgggggacaaaatgaacactggcttttgttcactttgcccctgagagatctagtcctgtcctgtgatggcttccacaaaccctgttggaagtttgggttattcctataactgtatgtgttgagtggccgtgaggctatggacctagcctggaatttagatgtctagctattttttaatcttgttggtaaatgctcagaggtctgtgctacctctgtgaggtatatactaaaatgaatgtaaaataaggatcgtattccctgctttaaggaactggtagtcttgtttgggtgatgagacaaagttcttgagacatttaaactgtatttaccagtgtgaaaaatgtcatttatggagattaattcattatggaaataaaacattgcctaagcccttg

SEQ ID NO: 306056 - DNA, 5182 bp, Homo sapiens
cctttccgtccttgcttcttttttcattgatgtaaatttttttaacttaatatgaaaactctccaagtcttgatcatcagccaggattttgccacagcaatttcattctcttatcggagcttgtatgtgtcaaagtatacttcagagtgcaaacattaagcaagtaatatattttacctacagatacttatgaagacattctttcgctatcgtgagtaaaagtatataaagctgtttctaactgaaaatgcttgaaataagcctgtaatagaaatattttttcattttttaaaaaagggcggaattccacggcgcgaatggatcctgagcctcgataacagattcctcaaccggcccacccgccagccagccagcgccttcatcctggggctgcgatggacattcggaaattctttggagtaataccaagtggaaagaaacttgtaagtgaaacagtaaagaagaatgagaaaacaaagtctgatgaagaaactttaaaagcaaagaaaggaataaaggaaatcaaggtaaatagctcccgtaaagaggatgacttcaaacaaaagcaaccaagcaagaaaaagaggatcatctatgattcagattcagagtcagaggagacgttgcaggtaaaaaatgccaaaaagccaccagaaaaactgccagtatcttctaaacctggtaaaatttcacggcaggatcctgttacatacatttcagaaacagatgaagaagatgactttatgtgtaagaaggcggcctctaaatcaaaagagaatggaagatctacaaatagtcatcttggaacatcaaacatgaaaaagaatgaagaaaacactaagaccaagaataagcctttatcaccaataaaacttacacccacatcagtacttgattattttggaactggaagtgtccaaagatctaataagaagatggtggcaagcaaaagaaaagagctttcacaaaatacagatgagtctggattaaatgatgaagccatcgccaagcaattacagcttgatgaagatgcggagctggagaggcagttgcatgaagatgaagagtttgccagaacattagccatgttggatgaagaacccaagaccaaaaaggctcgaaaggacacagaagcgggagaaacgttttcatctgtccaagccaatttaagtaaagcagaaaaacataaatatcctcataaagtaaaaacagcacaagtttcagatgaaagaaagagctacagtcctaggaagcaaagtaaatatgaaagttcaaaagaatctcagcaacattccaagtcatcagctgacaaaataggagaagtctcttctcccaaggccagttctaagctggcaattatgaaaagaaaagaagagagctcttataaagaaatagagcctgtggcctcaaaaagaaaagaaaatgccattaaattgaaaggagagacaaaaactcctaagaaaaccaaaagttctccagctaaaaaagagtctgtaagtcctgaagattctgaaaagaaacgcactaattatcaagcttatcgaagctacttaaatcgagaaggtcccaaggctctgggctccaaagaaataccaaagggagctgaaaattgcttggaaggccttatatttgtaatcacaggcgtgctggagtctattgaacgagatgaggccaagtctctaattgaacgttatgggggaaaagtaacaggaaatgtcagcaagaaaacaaattatcttgtcatgggtcgtgatagtggacagtccaagagtgataaggccgcagccttggggacaaaaattattgatgaagatggcctgttgaatctgattcggactatgccaggcaagaaatccaagtatgaaatagcagttgaaactgagatgaagaaagagtccaaactggagagaacaccccaaaaaaatgtccaaggaaaaagaaaaattagtccatctaaaaaggaatcagaatctaaaaagagcaggccgacttccaaaagggacagtttggcaaagacaataaaaaaggaaacagatgtgttttggaaaagcctggatttcaaggagcaggtggctgaggagacaagtggtgacagcaaggctaggaatttggctgatgacagcagtgaaaacaaagtggaaaatttgctctgggtggataaatataagccaacctcgctcaagaccataattggacagcaaggtgaccagagctgtgccaacaaactcctacgctggctccgaaactggcaaaagagttcttccgaagataaaaaacacgcagcaaagtttggtaaattttccggcaaagatgatggctctagttttaaagcagcgttgctgtcaggccctcctggtgttggcaaaaccaccacagcttccctggtgtgtcaggagttgggatacagctacgtggaactgaatgcaagtgacacccggagtaagagcagtttgaaggcgattgttgctgagtcactgaacaataccagcatcaaaggcttttattcaaatggagcagcctcttcagtaagcacgaaacatgctctcatcatggatgaagtagatggcatggcaggcaatgaggataggggaggaattcaggaattaattggcctgataaaacatactaaaattcccattatttgtatgtgcaatgatagaaatcatcccaagattcgctctctggttcattattgttttgatcttcgttttcaaagacctcgggttgaacagattaagggtgctatgatgtctattgcatttaaagaaggtttaaagattccccctccagctatgaatgaaataattttgggagccaatcaagatatcagacaggttttacataatctgagtatgtggtgtgcacgaagtaaagcattaacctatgaccaggccaaagctgattctcacagagccaaaaaggatatcaaaatgggcccatttgatgttgcccggaaagtgtttgcagctggagaggagactgctcacatgtcacttgtggacaagtcagatctcttttttcatgattattcaatagcacccctcttcgtccaggaaaattacatacacgtgaagcctgtagcagcagggggtgacatgaaaaagcacctgatgcttttaagcagagcagcagacagcatatgcgatggtgacctagtggacagccagatccggagtaagcaaaactggagtcttctgcctgcgcaggccatttatgccagtgttcttcctggagagttgatgagggggtacatgacccagtttcccaccttcccaagctggctggggaagcactcgtctacaggcaaacatgatcgtattgttcaggacctggccttgcatatgagtctcagaacttactccagcaaaaggactgtaaacatggattatctgtcgcttctaagggatgcacttgtacagcccttgacctcacaaggagtagacggagtacaggatgttgttgcacttatggacacatattatttgatgaaagaagactttgagaatatcatggaaatcagcagctggggtggcaaacctagtcccttttcaaagctggatcccaaggtgaaagcagccttcacaagagcttacaataaggaagcccaccttactccatactcacttcaagctataaaggcatctagacacagcacaagcccatccctggattcggaatacaatgaagaattaaatgaagatgactctcaatctgatgagaaagaccaagatgctatagaaactgatgccatgatcaagaaaaagacaaaatcttcaaagccttcaaaaccagaaaaagataaggagcccagaaaaggaaaaggaaaaagttcgaagaaatgaaaccatttttcactagcgacagccactttttactctccctcctgaccagtccagctggtctagagaaagccttgttttttcccagagcaaccatgttttagcataatgggatgacctggtgtcccattataaataaagggtggtatggctagaagggtatgagcagtaggcttatgtacacctcttatagaggttgataggactgcttgggtcctccactgtcctctgtcaatctagttagacgtgcttctgaatgactgtagaattggaactagaaactacacctgggctttggagtcagattttagttaacaataatgagcctgggagcagtagtactaaggcgtcttttgtaggcttaagaatttatcctaatggcctttataggaccaatgctgattttttttaaaggcagttcctattatgtggtgaaattttgtaaataaatgattatacaaaacagtcaccacctagaactgggtattctttgtacattgtcagatatctttcaaagtataaattaggaataaaaatgttccacatgatatgtgtacaaattctttttaagattgtcatcttgtacagcaaaatattatgttggtatattacttccttattaatttgcaaatgattggattaaaaaagctcactgtattccttactaacctgttgtgtgaaacataacattggcagtcgaggagtcagaactcggattcccagcctcactccctctgtgtgtgttgaccacgtctctgctgtgaataggatttcatgcagtggtctgttatggggctttgcagcgtggggggctgcagaagattctcagacattcttatccttctggagtctcaacccatcaggttcagaccagtaggaaccaggctgggtcaggctcttaatttcactacggtgggggacaaaatgaacactggcttttgttcactttgcccctgagagatctagtcctgtcctgtgatggcttccacaaaccctgttggaagtttgggttattcctataactgtatgtgttgagtggccgtgaggctatggacctagcctggaatttagatgtctagctattttttaatcttgttggtaaatgctcagaggtctgtgctacctctgtgaggtatatactaaaatgaatgtaaaataaggatcgtattccctgctttaaggaactggtagtcttgtttgggtgatgagacaaagttcttgagacatttaaactgtatttaccagtgtgaaaaatgtcatttatggagattaattcattatggaaataaaacattgcctaagcccttgaaaaaaaaaaaacgctaagcgacagagcgagaaag

SEQ ID NO: 306057 - DNA, 5497 bp, Homo sapiens
cctttccgtccttgcttcttttttcattgatgtaaatttttttaacttaatatgaaaactctccaagtcttgatcatcagccaggattttgccacagcaatttcattctcttatcggagcttgtatgtgtcaaagtatacttcagagtgcaaacattaagcaagtaatatattttacctacagatacttatgaagacattctttcgctatcgtgagtaaaagtatataaagctgtttctaactgaaaatgcttgaaataagcctgtaatagaaatattttttcattttttaaaaaagggcggaattccacggcgcgaatggatcctgagcctcgataacagattcctcaaccggcccacccgccagccagccagcgccttcatcctggggctgcgatggacattcggaaattctttggagtaataccaagtggaaagaaacttgtaagtgaaacagtaaagaagaatgagaaaacaaagtctgatgaagaaactttaaaagcaaagaaaggaataaaggaaatcaaggtaaatagctcccgtaaagaggatgacttcaaacaaaagcaaccaagcaagaaaaagaggatcatctatgattcagattcagagtcagaggagacgttgcaggtaaaaaatgccaaaaagccaccagaaaaactgccagtatcttctaaacctggtaaaatttcacggcaggatcctgttacatacatttcagaaacagatgaagaagatgactttatgtgtaagaaggcggcctctaaatcaaaagagaatggaagatctacaaatagtcatcttggaacatcaaacatgaaaaagaatgaagaaaacactaagaccaagaataagcctttatcaccaataaaacttacacccacatcagtacttgattattttggaactggaagtgtccaaagatctaataagaagatggtggcaagcaaaagaaaagagctttcacaaaatacagatgagtctggattaaatgatgaagccatcgccaagcaattacagcttgatgaagatgcggagctggagaggcagttgcatgaagatgaagagtttgccagaacattagccatgttggatgaagaacccaagaccaaaaaggctcgaaaggacacagaagcgggagaaacgttttcatctgtccaagccaatttaagtaaagcagaaaaacataaatatcctcataaagtaaaaacagcacaagtttcagatgaaagaaagagctacagtcctaggaagcaaagtaaatatgaaagttcaaaagaatctcagcaacattccaagtcatcagctgacaaaataggagaagtctcttctcccaaggccagttctaagctggcaattatgaaaagaaaagaagagagctcttataaagaaatagagcctgtggcctcaaaaagaaaagaaaatgccattaaattgaaaggagagacaaaaactcctaagaaaaccaaaagttctccagctaaaaaagagtctgtaagtcctgaagattctgaaaagaaacgcactaattatcaagcttatcgaagctacttaaatcgagaaggtcccaaggctctgggctccaaagaaataccaaagggagctgaaaattgcttggaaggccttatatttgtaatcacaggcgtgctggagtctattgaacgagatgaggccaagtctctaattgaacgttatgggggaaaagtaacaggaaatgtcagcaagaaaacaaattatcttgtcatgggtcgtgatagtggacagtccaagagtgataaggccgcagccttggggacaaaaattattgatgaagatggcctgttgaatctgattcggactatgccaggcaagaaatccaagtatgaaatagcagttgaaactgagatgaagaaagagtccaaactggagagaacaccccaaaaaaatgtccaaggaaaaagaaaaattagtccatctaaaaaggaatcagaatctaaaaagagcaggccgacttccaaaagggacagtttggcaaagacaataaaaaaggaaacagatgtgttttggaaaagcctggatttcaaggagcaggtggctgaggagacaagtggtgacagcaaggctaggaatttggctgatgacagcagtgaaaacaaagtggaaaatttgctctgggtggataaatataagccaacctcgctcaagaccataattggacagcaaggtgaccagagctgtgccaacaaactcctacgctggctccgaaactggcaaaagagttcttccgaagataaaaaacacgcagcaaagtttggtaaattttccggcaaagatgatggctctagttttaaagcagcgttgctgtcaggccctcctggtgttggcaaaaccaccacagcttccctggtgtgtcaggagttgggatacagctacgtggaactgaatgcaagtgacacccggagtaagagcagtttgaaggcgattgttgctgagtcactgaacaataccagcatcaaaggcttttattcaaatggagcagcctcttcagtaagcacgaaacatgctctcatcatggatgaagtagatggcatggcaggcaatgaggataggggaggaattcaggaattaattggcctgataaaacatactaaaattcccattatttgtatgtgcaatgatagaaatcatcccaagattcgctctctggttcattattgttttgatcttcgttttcaaagacctcgggttgaacagattaagggtgctatgatgtctattgcatttaaagaaggtttaaagattccccctccagctatgaatgaaataattttgggagccaatcaagatatcagacaggttttacataatctgagtatgtggtgtgcacgaagtaaagcattaacctatgaccaggccaaagctgattctcacagagccaaaaaggatatcaaaatgggcccatttgatgttgcccggaaagtgtttgcagctggagaggagactgctcacatgtcacttgtggacaagtcagatctcttttttcatgattattcaatagcacccctcttcgtccaggaaaattacatacacgtgaagcctgtagcagcagggggtgacatgaaaaagcacctgatgcttttaagcagagcagcagacagcatatgcgatggtgacctagtggacagccagatccggagtaagcaaaactggagtcttctgcctgcgcaggccatttatgccagtgttcttcctggagagttgatgagggggtacatgacccagtttcccaccttcccaagctggctggggaagcactcgtctacaggcaaacatgatcgtattgttcaggacctggccttgcatatgagtctcagaacttactccagcaaaaggactgtaaacatggattatctgtcgcttctaagggatgcacttgtacagcccttgacctcacaaggagtagacggagtacaggatgttgttgcacttatggacacatattatttgatgaaagaagactttgagaatatcatggaaatcagcagctggggtggcaaacctagtcccttttcaaagctggatcccaaggtgaaagcagccttcacaagagcttacaataaggaagcccaccttactccatactcacttcaagctataaaggcatctagacacagcacaagcccatccctggattcggaatacaatgaagaattaaatgaagatgactctcaatctgatgagaaagaccaagatgctatagaaactgatgccatgatcaagaaaaagacaaaatcttcaaagccttcaaaaccagaaaaagataaggagcccagaaaaggaaaaggaaaaagttcgaagaaatgaaaccatttttcactagcgacagccactttttactctccctcctgaccagtccagctggtctagagaaagccttgttttttcccagagcaaccatgttttagcataatgggatgacctggtgtcccattataaataaagggtggtatggctagaagggtatgagcagtaggcttatgtacacctcttatagaggttgataggactgcttgggtcctccactgtcctctgtcaatctagttagacgtgcttctgaatgactgtagaattggaactagaaactacacctgggctttggagtcagattttagttaacaataatgagcctgggagcagtagtactaaggcgtcttttgtaggcttaagaatttatcctaatggcctttataggaccaatgctgattttttttaaaggcagttcctattatgtggtgaaattttgtaaataaatgattatacaaaacagtcaccacctagaactgggtattctttgtacattgtcagatatctttcaaagtataaattaggaataaaaatgttccacatgatatgtgtacaaattctttttaagattgtcatcttgtacagcaaaatattatgttggtatattacttccttattaatttgcaaatgattggattaaaaaagctcactgtattccttactaacctgttgtgtgaaacataacattggcagtcgaggagtcagaactcggattcccagcctcactccctctgtgtgtgttgaccacgtctctgctgtgaataggatttcatgcagtggtctgttatggggctttgcagcgtggggggctgcagaagattctcagacattcttatccttctggagtctcaacccatcaggttcagaccagtaggaaccaggctgggtcaggctcttaatttcactacggtgggggacaaaatgaacactggcttttgttcactttgcccctgagagatctagtcctgtcctgtgatggcttccacaaaccctgttggaagtttgggttattcctataactgtatgtgttgagtggccgtgaggctatggacctagcctggaatttagatgtctagctattttttaatcttgttggtaaatgctcagaggtctgtgctacctctgtgaggtatatactaaaatgaatgtaaaataaggatcgtattccctgctttaaggaactggtagtcttgtttgggtgatgagacaaagttcttgagacatttaaactgtatttaccagtgtgaaaaatgtcatttatggagattaattcattatggaaataaaacattgcctaagcccttgcctgctgagtcacgaccctgtctttgttaaagtccatcttgaaattcttatgcttcaggaaaggttttctcaccagtagggtgaggctggctttcctattcatgttcttccatttctatgccttttggatatgcaagtcacgtctccctaggtcttctgcagcccccaggagagagacttgaatctccatgcagccaggatgcggcatagtgtccttcacttgttcattatgattttgtttgtaattttaaatgttttaaacccaagattgggataatatgtgtgtaaaattaatagcatttcttttagaattagaaattgtaaatataccctttatgaggatggcatag

SEQ ID NO: 306058 - DNA, 4421 bp, Homo sapiens
ttctgttgagaattgtttgtgtcgcatttacagcgactgtgctgaagggaacaagtcatacttgtcctagtcatcttggaacatcaaacatgaaaaagaatgaagaaaacactaagaccaagaataagcctttatcaccaataaaacttacacccacatcagtacttgattattttggaactggaagtgtccaaagatctaataagaagatggtggcaagcaaaagaaaagagctttcacaaaatacagatgagtctggattaaatgatgaagccatcgccaagcaattacagcttgatgaagatgcggagctggagaggcagttgcatgaagatgaagagtttgccagaacattagccatgttggatgaagaacccaagaccaaaaaggctcgaaaggacacagaagcgggagaaacgttttcatctgtccaagccaatttaagtaaagcagaaaaacataaatatcctcataaagtaaaaacagcacaagtttcagatgaaagaaagagctacagtcctaggaagcaaagtaaatatgaaagttcaaaagaatctcagcaacattccaagtcatcagctgacaaaataggagaagtctcttctcccaaggccagttctaagctggcaattatgaaaagaaaagaagagagctcttataaagaaatagagcctgtggcctcaaaaagaaaagaaaatgccattaaattgaaaggagagacaaaaactcctaagaaaaccaaaagttctccagctaaaaaagagtctgtaagtcctgaagattctgaaaagaaacgcactaattatcaagcttatcgaagctacttaaatcgagaaggtcccaaggctctgggctccaaagaaataccaaagggagctgaaaattgcttggaaggccttatatttgtaatcacaggcgtgctggagtctattgaacgagatgaggccaagtctctaattgaacgttatgggggaaaagtaacaggaaatgtcagcaagaaaacaaattatcttgtcatgggtcgtgatagtggacagtccaagagtgataaggccgcagccttggggacaaaaattattgatgaagatggcctgttgaatctgattcggactatgccaggcaagaaatccaagtatgaaatagcagttgaaactgagatgaagaaagagtccaaactggagagaacaccccaaaaaaatgtccaaggaaaaagaaaaattagtccatctaaaaaggaatcagaatctaaaaagagcaggccgacttccaaaagggacagtttggcaaagacaataaaaaaggaaacagatgtgttttggaaaagcctggatttcaaggagcaggtggctgaggagacaagtggtgacagcaaggctaggaatttggctgatgacagcagtgaaaacaaagtggaaaatttgctctgggtggataaatataagccaacctcgctcaagaccataattggacagcaaggtgaccagagctgtgccaacaaactcctacgctggctccgaaactggcaaaagagttcttccgaagataaaaaacacgcagcaaagtttggtaaattttccggcaaagatgatggctctagttttaaagcagcgttgctgtcaggccctcctggtgttggcaaaaccaccacagcttccctggtgtgtcaggagttgggatacagctacgtggaactgaatgcaagtgacacccggagtaagagcagtttgaaggcgattgttgctgagtcactgaacaataccagcatcaaaggcttttattcaaatggagcagcctcttcagtaagcacgaaacatgctctcatcatggatgaagtagatggcatggcaggcaatgaggataggggaggaattcaggaattaattggcctgataaaacatactaaaattcccattatttgtatgtgcaatgatagaaatcatcccaagattcgctctctggttcattattgttttgatcttcgttttcaaagacctcgggttgaacagattaagggtgctatgatgtctattgcatttaaagaaggtttaaagattccccctccagctatgaatgaaataattttgggagccaatcaagatatcagacaggttttacataatctgagtatgtggtgtgcacgaagtaaagcattaacctatgaccaggccaaagctgattctcacagagccaaaaaggatatcaaaatgggcccatttgatgttgcccggaaagtgtttgcagctggagaggagactgctcacatgtcacttgtggacaagtcagatctcttttttcatgattattcaatagcacccctcttcgtccaggaaaattacatacacgtgaagcctgtagcagcagggggtgacatgaaaaagcacctgatgcttttaagcagagcagcagacagcatatgcgatggtgacctagtggacagccagatccggagtaagcaaaactggagtcttctgcctgcgcaggccatttatgccagtgttcttcctggagagttgatgagggggtacatgacccagtttcccaccttcccaagctggctggggaagcactcgtctacaggcaaacatgatcgtattgttcaggacctggccttgcatatgagtctcagaacttactccagcaaaaggactgtaaacatggattatctgtcgcttctaagggatgcacttgtacagcccttgacctcacaaggagtagacggagtacaggatgttgttgcacttatggacacatattatttgatgaaagaagactttgagaatatcatggaaatcagcagctggggtggcaaacctagtcccttttcaaagctggatcccaaggtgaaagcagccttcacaagagcttacaataaggaagcccaccttactccatactcacttcaagctataaaggcatctagacacagcacaagcccatccctggattcggaatacaatgaagaattaaatgaagatgactctcaatctgatgagaaagaccaagatgctatagaaactgatgccatgatcaagaaaaagacaaaatcttcaaagccttcaaaaccagaaaaagataaggagcccagaaaaggaaaaggaaaaagttcgaagaaatgaaaccatttttcactagcgacagccactttttactctccctcctgaccagtccagctggtctagagaaagccttgttttttcccagagcaaccatgttttagcataatgggatgacctggtgtcccattataaataaagggtggtatggctagaagggtatgagcagtaggcttatgtacacctcttatagaggttgataggactgcttgggtcctccactgtcctctgtcaatctagttagacgtgcttctgaatgactgtagaattggaactagaaactacacctgggctttggagtcagattttagttaacaataatgagcctgggagcagtagtactaaggcgtcttttgtaggcttaagaatttatcctaatggcctttataggaccaatgctgattttttttaaaggcagttcctattatgtggtgaaattttgtaaataaatgattatacaaaacagtcaccacctagaactgggtattctttgtacattgtcagatatctttcaaagtataaattaggaataaaaatgttccacatgatatgtgtacaaattctttttaagattgtcatcttgtacagcaaaatattatgttggtatattacttccttattaatttgcaaatgattggattaaaaaagctcactgtattccttactaacctgttgtgtgaaacataacattggcagtcgaggagtcagaactcggattcccagcctcactccctctgtgtgtgttgaccacgtctctgctgtgaataggatttcatgcagtggtctgttatggggctttgcagcgtggggggctgcagaagattctcagacattcttatccttctggagtctcaacccatcaggttcagaccagtaggaaccaggctgggtcaggctcttaatttcactacggtgggggacaaaatgaacactggcttttgttcactttgcccctgagagatctagtcctgtcctgtgatggcttccacaaaccctgttggaagtttgggttattcctataactgtatgtgttgagtggccgtgaggctatggacctagcctggaatttagatgtctagctattttttaatcttgttggtaaatgctcagaggtctgtgctacctctgtgaggtatatactaaaatgaatgtaaaataaggatcgtattccctgctttaaggaactggtagtcttgtttgggtgatgagacaaagttcttgagacatttaaactgtatttaccagtgtgaaaaatgtcatttatggagattaattcattatggaaataaaacattgcctaagcccttg

SEQ ID NO: 306059 - DNA, 5367 bp, Homo sapiens
cctttccgtccttgcttcttttttcattgatgtaaatttttttaacttaatatgaaaactctccaagtcttgatcatcagccaggattttgccacagcaatttcattctcttatcggagcttgtatgtgtcaaagtatacttcagagtgcaaacattaagcaagtaatatattttacctacagatacttatgaagacattctttcgctatcgtgagtaaaagtatataaagctgtttctaactgaaaatgcttgaaataagcctgtaatagaaatattttttcattttttaaaaaagggcggaattccactgtcttcgccttcttgcacttcgcgggagaagttgttggcgcgaatggatcctgagcctcgataacagattcctcaaccggcccacccgccagccagccagcgccttcatcctggggctgcgatggacattcggaaattctttggagtaataccaagtggaaagaaacttgtaagtgaaacagtaaagaagaatgagaaaacaaagtctgatgaagaaactttaaaagcaaagaaaggaataaaggaaatcaaggtaaatagctcccgtaaagaggatgacttcaaacaaaagcaaccaagcaagaaaaagaggatcatctatgattcagattcagagtcagaggagacgttgcaggtaaaaaatgccaaaaagccaccagaaaaactgccagtatcttctaaacctggtaaaatttcacggcaggatcctgttacatacatttcagaaacagaggagacaataaccggaataatacgggatgctgtacgtgaaagggccagacccagtgcctgacacattgagtagcagtccaaaggaaaaaataaaaagaaaaacaaagtccataggtgaactttgtaggttacgtgaaacatttgttgatgaaactgttcaaaatatcaaagacaaaaagtaaatgaagaagatgactttatgtgtaagaaggcggcctctaaatcaaaagagaatggaagatctacaaatagtcatcttggaacatcaaacatgaaaaagaatgaagaaaacactaagaccaagaataagcctttatcaccaataaaacttacacccacatcagtacttgattattttggaactggaagtgtccaaagatctaataagaagatggtggcaagcaaaagaaaagagctttcacaaaatacagatgagtctggattaaatgatgaagccatcgccaagcaattacagcttgatgaagatgcggagctggagaggcagttgcatgaagatgaagagtttgccagaacattagccatgttggatgaagaacccaagaccaaaaaggctcgaaaggacacagaagcgggagaaacgttttcatctgtccaagccaatttaagtaaagcagaaaaacataaatatcctcataaagtaaaaacagcacaagtttcagatgaaagaaagagctacagtcctaggaagcaaagtaaatatgaaagttcaaaagaatctcagcaacattccaagtcatcagctgacaaaataggagaagtctcttctcccaaggccagttctaagctggcaattatgaaaagaaaagaagagagctcttataaagaaatagagcctgtggcctcaaaaagaaaagaaaatgccattaaattgaaaggagagacaaaaactcctaagaaaaccaaaagttctccagctaaaaaagagtctgtaagtcctgaagattctgaaaagaaacgcactaattatcaagcttatcgaagctacttaaatcgagaaggtcccaaggctctgggctccaaagaaataccaaagggagctgaaaattgcttggaaggccttatatttgtaatcacaggcgtgctggagtctattgaacgagatgaggccaagtctctaattgaacgttatgggggaaaagtaacaggaaatgtcagcaagaaaacaaattatcttgtcatgggtcgtgatagtggacagtccaagagtgataaggccgcagccttggggacaaaaattattgatgaagatggcctgttgaatctgattcggactatgccaggcaagaaatccaagtatgaaatagcagttgaaactgagatgaagaaagagtccaaactggagagaacaccccaaaaaaatgtccaaggaaaaagaaaaattagtccatctaaaaaggaatcagaatctaaaaagagcaggccgacttccaaaagggacagtttggcaaagacaataaaaaaggaaacagatgtgttttggaaaagcctggatttcaaggagcaggtggctgaggagacaagtggtgacagcaaggctaggaatttggctgatgacagcagtgaaaacaaagtggaaaatttgctctgggtggataaatataagccaacctcgctcaagaccataattggacagcaaggtgaccagagctgtgccaacaaactcctacgctggctccgaaactggcaaaagagttcttccgaagataaaaaacacgcagcaaagtttggtaaattttccggcaaagatgatggctctagttttaaagcagcgttgctgtcaggccctcctggtgttggcaaaaccaccacagcttccctggtgtgtcaggagttgggatacagctacgtggaactgaatgcaagtgacacccggagtaagagcagtttgaaggcgattgttgctgagtcactgaacaataccagcatcaaaggcttttattcaaatggagcagcctcttcagtaagcacgaaacatgctctcatcatggatgaagtagatggcatggcaggcaatgaggataggggaggaattcaggaattaattggcctgataaaacatactaaaattcccattatttgtatgtgcaatgatagaaatcatcccaagattcgctctctggttcattattgttttgatcttcgttttcaaagacctcgggttgaacagattaagggtgctatgatgtctattgcatttaaagaaggtttaaagattccccctccagctatgaatgaaataattttgggagccaatcaagatatcagacaggttttacataatctgagtatgtggtgtgcacgaagtaaagcattaacctatgaccaggccaaagctgattctcacagagccaaaaaggatatcaaaatgggcccatttgatgttgcccggaaagtgtttgcagctggagaggagactgctcacatgtcacttgtggacaagtcagatctcttttttcatgattattcaatagcacccctcttcgtccaggaaaattacatacacgtgaagcctgtagcagcagggggtgacatgaaaaagcacctgatgcttttaagcagagcagcagacagcatatgcgatggtgacctagtggacagccagatccggagtaagcaaaactggagtcttctgcctgcgcaggccatttatgccagtgttcttcctggagagttgatgagggggtacatgacccagtttcccaccttcccaagctggctggggaagcactcgtctacaggcaaacatgatcgtattgttcaggacctggccttgcatatgagtctcagaacttactccagcaaaaggactgtaaacatggattatctgtcgcttctaagggatgcacttgtacagcccttgacctcacaaggagtagacggagtacaggatgttgttgcacttatggacacatattatttgatgaaagaagactttgagaatatcatggaaatcagcagctggggtggcaaacctagtcccttttcaaagctggatcccaaggtgaaagcagccttcacaagagcttacaataaggaagcccaccttactccatactcacttcaagctataaaggcatctagacacagcacaagcccatccctggattcggaatacaatgaagaattaaatgaagatgactctcaatctgatgagaaagaccaagatgctatagaaactgatgccatgatcaagaaaaagacaaaatcttcaaagccttcaaaaccagaaaaagataaggagcccagaaaaggaaaaggaaaaagttcgaagaaatgaaaccatttttcactagcgacagccactttttactctccctcctgaccagtccagctggtctagagaaagccttgttttttcccagagcaaccatgttttagcataatgggatgacctggtgtcccattataaataaagggtggtatggctagaagggtatgagcagtaggcttatgtacacctcttatagaggttgataggactgcttgggtcctccactgtcctctgtcaatctagttagacgtgcttctgaatgactgtagaattggaactagaaactacacctgggctttggagtcagattttagttaacaataatgagcctgggagcagtagtactaaggcgtcttttgtaggcttaagaatttatcctaatggcctttataggaccaatgctgattttttttaaaggcagttcctattatgtggtgaaattttgtaaataaatgattatacaaaacagtcaccacctagaactgggtattctttgtacattgtcagatatctttcaaagtataaattaggaataaaaatgttccacatgatatgtgtacaaattctttttaagattgtcatcttgtacagcaaaatattatgttggtatattacttccttattaatttgcaaatgattggattaaaaaagctcactgtattccttactaacctgttgtgtgaaacataacattggcagtcgaggagtcagaactcggattcccagcctcactccctctgtgtgtgttgaccacgtctctgctgtgaataggatttcatgcagtggtctgttatggggctttgcagcgtggggggctgcagaagattctcagacattcttatccttctggagtctcaacccatcaggttcagaccagtaggaaccaggctgggtcaggctcttaatttcactacggtgggggacaaaatgaacactggcttttgttcactttgcccctgagagatctagtcctgtcctgtgatggcttccacaaaccctgttggaagtttgggttattcctataactgtatgtgttgagtggccgtgaggctatggacctagcctggaatttagatgtctagctattttttaatcttgttggtaaatgctcagaggtctgtgctacctctgtgaggtatatactaaaatgaatgtaaaataaggatcgtattccctgctttaaggaactggtagtcttgtttgggtgatgagacaaagttcttgagacatttaaactgtatttaccagtgtgaaaaatgtcatttatggagattaattcattatggaaataaaacattgcctaagcccttg

SEQ ID NO: 306060 - DNA, 5305 bp, Homo sapiens
cctttccgtccttgcttcttttttcattgatgtaaatttttttaacttaatatgaaaactctccaagtcttgatcatcagccaggattttgccacagcaatttcattctcttatcggagcttgtatgtgtcaaagtatacttcagagtgcaaacattaagcaagtaatatattttacctacagatacttatgaagacattctttcgctatcgtgagtaaaagtatataaagctgtttctaactgaaaatgcttgaaataagcctgtaatagaaatattttttcattttttaaaaaagggcggaattccactgtcttcgccttcttgcacttcgcgggagaagttgttggcgcgaatggatcctgagcctcgataacagattcctcaaccggcccacccgccagccagccagcgccttcatcctggggctgcgatggtgaagtctcgctctgtcaccaggctggagtgcagtggcatgatctcggctcactgcagcctccacctcccgggttcaagcggttttcctgcctcagcttcccaagtagctgggactacaggacattcggaaattctttggagtaataccaagtggaaagaaacttgtaagtgaaacagtaaagaagaatgagaaaacaaagtctgatgaagaaactttaaaagcaaagaaaggaataaaggaaatcaaggtaaatagctcccgtaaagaggatgacttcaaacaaaagcaaccaagcaagaaaaagaggatcatctatgattcagattcagagtcagaggagacgttgcaggtaaaaaatgccaaaaagccaccagaaaaactgccagtatcttctaaacctggtaaaatttcacggcaggatcctgttacatacatttcagaaacagatgaagaagatgactttatgtgtaagaaggcggcctctaaatcaaaagagaatggaagatctacaaatagtcatcttggaacatcaaacatgaaaaagaatgaagaaaacactaagaccaagaataagcctttatcaccaataaaacttacacccacatcagtacttgattattttggaactggaagtgtccaaagatctaataagaagatggtggcaagcaaaagaaaagagctttcacaaaatacagatgagtctggattaaatgatgaagccatcgccaagcaattacagcttgatgaagatgcggagctggagaggcagttgcatgaagatgaagagtttgccagaacattagccatgttggatgaagaacccaagaccaaaaaggctcgaaaggacacagaagcgggagaaacgttttcatctgtccaagccaatttaagtaaagcagaaaaacataaatatcctcataaagtaaaaacagcacaagtttcagatgaaagaaagagctacagtcctaggaagcaaagtaaatatgaaagttcaaaagaatctcagcaacattccaagtcatcagctgacaaaataggagaagtctcttctcccaaggccagttctaagctggcaattatgaaaagaaaagaagagagctcttataaagaaatagagcctgtggcctcaaaaagaaaagaaaatgccattaaattgaaaggagagacaaaaactcctaagaaaaccaaaagttctccagctaaaaaagagtctgtaagtcctgaagattctgaaaagaaacgcactaattatcaagcttatcgaagctacttaaatcgagaaggtcccaaggctctgggctccaaagaaataccaaagggagctgaaaattgcttggaaggccttatatttgtaatcacaggcgtgctggagtctattgaacgagatgaggccaagtctctaattgaacgttatgggggaaaagtaacaggaaatgtcagcaagaaaacaaattatcttgtcatgggtcgtgatagtggacagtccaagagtgataaggccgcagccttggggacaaaaattattgatgaagatggcctgttgaatctgattcggactatgccaggcaagaaatccaagtatgaaatagcagttgaaactgagatgaagaaagagtccaaactggagagaacaccccaaaaaaatgtccaaggaaaaagaaaaattagtccatctaaaaaggaatcagaatctaaaaagagcaggccgacttccaaaagggacagtttggcaaagacaataaaaaaggaaacagatgtgttttggaaaagcctggatttcaaggagcaggtggctgaggagacaagtggtgacagcaaggctaggaatttggctgatgacagcagtgaaaacaaagtggaaaatttgctctgggtggataaatataagccaacctcgctcaagaccataattggacagcaaggtgaccagagctgtgccaacaaactcctacgctggctccgaaactggcaaaagagttcttccgaagataaaaaacacgcagcaaagtttggtaaattttccggcaaagatgatggctctagttttaaagcagcgttgctgtcaggccctcctggtgttggcaaaaccaccacagcttccctggtgtgtcaggagttgggatacagctacgtggaactgaatgcaagtgacacccggagtaagagcagtttgaaggcgattgttgctgagtcactgaacaataccagcatcaaaggcttttattcaaatggagcagcctcttcagtaagcacgaaacatgctctcatcatggatgaagtagatggcatggcaggcaatgaggataggggaggaattcaggaattaattggcctgataaaacatactaaaattcccattatttgtatgtgcaatgatagaaatcatcccaagattcgctctctggttcattattgttttgatcttcgttttcaaagacctcgggttgaacagattaagggtgctatgatgtctattgcatttaaagaaggtttaaagattccccctccagctatgaatgaaataattttgggagccaatcaagatatcagacaggttttacataatctgagtatgtggtgtgcacgaagtaaagcattaacctatgaccaggccaaagctgattctcacagagccaaaaaggatatcaaaatgggcccatttgatgttgcccggaaagtgtttgcagctggagaggagactgctcacatgtcacttgtggacaagtcagatctcttttttcatgattattcaatagcacccctcttcgtccaggaaaattacatacacgtgaagcctgtagcagcagggggtgacatgaaaaagcacctgatgcttttaagcagagcagcagacagcatatgcgatggtgacctagtggacagccagatccggagtaagcaaaactggagtcttctgcctgcgcaggccatttatgccagtgttcttcctggagagttgatgagggggtacatgacccagtttcccaccttcccaagctggctggggaagcactcgtctacaggcaaacatgatcgtattgttcaggacctggccttgcatatgagtctcagaacttactccagcaaaaggactgtaaacatggattatctgtcgcttctaagggatgcacttgtacagcccttgacctcacaaggagtagacggagtacaggatgttgttgcacttatggacacatattatttgatgaaagaagactttgagaatatcatggaaatcagcagctggggtggcaaacctagtcccttttcaaagctggatcccaaggtgaaagcagccttcacaagagcttacaataaggaagcccaccttactccatactcacttcaagctataaaggcatctagacacagcacaagcccatccctggattcggaatacaatgaagaattaaatgaagatgactctcaatctgatgagaaagaccaagatgctatagaaactgatgccatgatcaagaaaaagacaaaatcttcaaagccttcaaaaccagaaaaagataaggagcccagaaaaggaaaaggaaaaagttcgaagaaatgaaaccatttttcactagcgacagccactttttactctccctcctgaccagtccagctggtctagagaaagccttgttttttcccagagcaaccatgttttagcataatgggatgacctggtgtcccattataaataaagggtggtatggctagaagggtatgagcagtaggcttatgtacacctcttatagaggttgataggactgcttgggtcctccactgtcctctgtcaatctagttagacgtgcttctgaatgactgtagaattggaactagaaactacacctgggctttggagtcagattttagttaacaataatgagcctgggagcagtagtactaaggcgtcttttgtaggcttaagaatttatcctaatggcctttataggaccaatgctgattttttttaaaggcagttcctattatgtggtgaaattttgtaaataaatgattatacaaaacagtcaccacctagaactgggtattctttgtacattgtcagatatctttcaaagtataaattaggaataaaaatgttccacatgatatgtgtacaaattctttttaagattgtcatcttgtacagcaaaatattatgttggtatattacttccttattaatttgcaaatgattggattaaaaaagctcactgtattccttactaacctgttgtgtgaaacataacattggcagtcgaggagtcagaactcggattcccagcctcactccctctgtgtgtgttgaccacgtctctgctgtgaataggatttcatgcagtggtctgttatggggctttgcagcgtggggggctgcagaagattctcagacattcttatccttctggagtctcaacccatcaggttcagaccagtaggaaccaggctgggtcaggctcttaatttcactacggtgggggacaaaatgaacactggcttttgttcactttgcccctgagagatctagtcctgtcctgtgatggcttccacaaaccctgttggaagtttgggttattcctataactgtatgtgttgagtggccgtgaggctatggacctagcctggaatttagatgtctagctattttttaatcttgttggtaaatgctcagaggtctgtgctacctctgtgaggtatatactaaaatgaatgtaaaataaggatcgtattccctgctttaaggaactggtagtcttgtttgggtgatgagacaaagttcttgagacatttaaactgtatttaccagtgtgaaaaatgtcatttatggagattaattcattatggaaataaaacattgcctaagcccttg

SEQ ID NO: 306061 - DNA, 4160 bp, Homo sapiens
ttttttgcgaggtctcactttgtcacccacgctggagtgcagtggtgctatctcagctcactgcaaccttgacttcttgggcttgattgatcccctcaccgcagccccccaagtagctgggactacaggctcgaaaggacacagaagcgggagaaacgttttcatctgtccaagccaatttaagtaaagcagaaaaacataaatatcctcataaagtaaaaacagcacaagtttcagatgaaagaaagagctacagtcctaggaagcaaagtaaatatgaaagttcaaaagaatctcagcaacattccaagtcatcagctgacaaaataggagaagtctcttctcccaaggccagttctaagctggcaattatgaaaagaaaagaagagagctcttataaagaaatagagcctgtggcctcaaaaagaaaagaaaatgccattaaattgaaaggagagacaaaaactcctaagaaaaccaaaagttctccagctaaaaaagagtctgtaagtcctgaagattctgaaaagaaacgcactaattatcaagcttatcgaagctacttaaatcgagaaggtcccaaggctctgggctccaaagaaataccaaagggagctgaaaattgcttggaaggccttatatttgtaatcacaggcgtgctggagtctattgaacgagatgaggccaagtctctaattgaacgttatgggggaaaagtaacaggaaatgtcagcaagaaaacaaattatcttgtcatgggtcgtgatagtggacagtccaagagtgataaggccgcagccttggggacaaaaattattgatgaagatggcctgttgaatctgattcggactatgccaggcaagaaatccaagtatgaaatagcagttgaaactgagatgaagaaagagtccaaactggagagaacaccccaaaaaaatgtccaaggaaaaagaaaaattagtccatctaaaaaggaatcagaatctaaaaagagcaggccgacttccaaaagggacagtttggcaaagacaataaaaaaggaaacagatgtgttttggaaaagcctggatttcaaggagcaggtggctgaggagacaagtggtgacagcaaggctaggaatttggctgatgacagcagtgaaaacaaagtggaaaatttgctctgggtggataaatataagccaacctcgctcaagaccataattggacagcaaggtgaccagagctgtgccaacaaactcctacgctggctccgaaactggcaaaagagttcttccgaagataaaaaacacgcagcaaagtttggtaaattttccggcaaagatgatggctctagttttaaagcagcgttgctgtcaggccctcctggtgttggcaaaaccaccacagcttccctggtgtgtcaggagttgggatacagctacgtggaactgaatgcaagtgacacccggagtaagagcagtttgaaggcgattgttgctgagtcactgaacaataccagcatcaaaggcttttattcaaatggagcagcctcttcagtaagcacgaaacatgctctcatcatggatgaagtagatggcatggcaggcaatgaggataggggaggaattcaggaattaattggcctgataaaacatactaaaattcccattatttgtatgtgcaatgatagaaatcatcccaagattcgctctctggttcattattgttttgatcttcgttttcaaagacctcgggttgaacagattaagggtgctatgatgtctattgcatttaaagaaggtttaaagattccccctccagctatgaatgaaataattttgggagccaatcaagatatcagacaggttttacataatctgagtatgtggtgtgcacgaagtaaagcattaacctatgaccaggccaaagctgattctcacagagccaaaaaggatatcaaaatgggcccatttgatgttgcccggaaagtgtttgcagctggagaggagactgctcacatgtcacttgtggacaagtcagatctcttttttcatgattattcaatagcacccctcttcgtccaggaaaattacatacacgtgaagcctgtagcagcagggggtgacatgaaaaagcacctgatgcttttaagcagagcagcagacagcatatgcgatggtgacctagtggacagccagatccggagtaagcaaaactggagtcttctgcctgcgcaggccatttatgccagtgttcttcctggagagttgatgagggggtacatgacccagtttcccaccttcccaagctggctggggaagcactcgtctacaggcaaacatgatcgtattgttcaggacctggccttgcatatgagtctcagaacttactccagcaaaaggactgtaaacatggattatctgtcgcttctaagggatgcacttgtacagcccttgacctcacaaggagtagacggagtacaggatgttgttgcacttatggacacatattatttgatgaaagaagactttgagaatatcatggaaatcagcagctggggtggcaaacctagtcccttttcaaagctggatcccaaggtgaaagcagccttcacaagagcttacaataaggaagcccaccttactccatactcacttcaagctataaaggcatctagacacagcacaagcccatccctggattcggaatacaatgaagaattaaatgaagatgactctcaatctgatgagaaagaccaagatgctatagaaactgatgccatgatcaagaaaaagacaaaatcttcaaagccttcaaaaccagaaaaagataaggagcccagaaaaggaaaaggaaaaagttcgaagaaatgaaaccatttttcactagcgacagccactttttactctccctcctgaccagtccagctggtctagagaaagccttgttttttcccagagcaaccatgttttagcataatgggatgacctggtgtcccattataaataaagggtggtatggctagaagggtatgagcagtaggcttatgtacacctcttatagaggttgataggactgcttgggtcctccactgtcctctgtcaatctagttagacgtgcttctgaatgactgtagaattggaactagaaactacacctgggctttggagtcagattttagttaacaataatgagcctgggagcagtagtactaaggcgtcttttgtaggcttaagaatttatcctaatggcctttataggaccaatgctgattttttttaaaggcagttcctattatgtggtgaaattttgtaaataaatgattatacaaaacagtcaccacctagaactgggtattctttgtacattgtcagatatctttcaaagtataaattaggaataaaaatgttccacatgatatgtgtacaaattctttttaagattgtcatcttgtacagcaaaatattatgttggtatattacttccttattaatttgcaaatgattggattaaaaaagctcactgtattccttactaacctgttgtgtgaaacataacattggcagtcgaggagtcagaactcggattcccagcctcactccctctgtgtgtgttgaccacgtctctgctgtgaataggatttcatgcagtggtctgttatggggctttgcagcgtggggggctgcagaagattctcagacattcttatccttctggagtctcaacccatcaggttcagaccagtaggaaccaggctgggtcaggctcttaatttcactacggtgggggacaaaatgaacactggcttttgttcactttgcccctgagagatctagtcctgtcctgtgatggcttccacaaaccctgttggaagtttgggttattcctataactgtatgtgttgagtggccgtgaggctatggacctagcctggaatttagatgtctagctattttttaatcttgttggtaaatgctcagaggtctgtgctacctctgtgaggtatatactaaaatgaatgtaaaataaggatcgtattccctgctttaaggaactggtagtcttgtttgggtgatgagacaaagttcttgagacatttaaactgtatttaccagtgtgaaaaatgtcatttatggagattaattcattatggaaataaaacattgcctaagcccttg

SEQ ID NO: 306062 - DNA, 4207 bp, Homo sapiens
aataaaatatgcctcatttgccttggaaattttgtggatgaatgaatgacagtttattgtagtgtcctgctagttgaaaggtgacccttaaaattttgatggattttaacaacagattttatggtaatagtttttctattatttgtcacatttgacacttttaaaatttgtttaggctcgaaaggacacagaagcgggagaaacgttttcatctgtccaagccaatttaagtaaagcagaaaaacataaatatcctcataaagtaaaaacagcacaagtttcagatgaaagaaagagctacagtcctaggaagcaaagtaaatatgaaagttcaaaagaatctcagcaacattccaagtcatcagctgacaaaataggagaagtctcttctcccaaggccagttctaagctggcaattatgaaaagaaaagaagagagctcttataaagaaatagagcctgtggcctcaaaaagaaaagaaaatgccattaaattgaaaggagagacaaaaactcctaagaaaaccaaaagttctccagctaaaaaagagtctgtaagtcctgaagattctgaaaagaaacgcactaattatcaagcttatcgaagctacttaaatcgagaaggtcccaaggctctgggctccaaagaaataccaaagggagctgaaaattgcttggaaggccttatatttgtaatcacaggcgtgctggagtctattgaacgagatgaggccaagtctctaattgaacgttatgggggaaaagtaacaggaaatgtcagcaagaaaacaaattatcttgtcatgggtcgtgatagtggacagtccaagagtgataaggccgcagccttggggacaaaaattattgatgaagatggcctgttgaatctgattcggactatgccaggcaagaaatccaagtatgaaatagcagttgaaactgagatgaagaaagagtccaaactggagagaacaccccaaaaaaatgtccaaggaaaaagaaaaattagtccatctaaaaaggaatcagaatctaaaaagagcaggccgacttccaaaagggacagtttggcaaagacaataaaaaaggaaacagatgtgttttggaaaagcctggatttcaaggagcaggtggctgaggagacaagtggtgacagcaaggctaggaatttggctgatgacagcagtgaaaacaaagtggaaaatttgctctgggtggataaatataagccaacctcgctcaagaccataattggacagcaaggtgaccagagctgtgccaacaaactcctacgctggctccgaaactggcaaaagagttcttccgaagataaaaaacacgcagcaaagtttggtaaattttccggcaaagatgatggctctagttttaaagcagcgttgctgtcaggccctcctggtgttggcaaaaccaccacagcttccctggtgtgtcaggagttgggatacagctacgtggaactgaatgcaagtgacacccggagtaagagcagtttgaaggcgattgttgctgagtcactgaacaataccagcatcaaaggcttttattcaaatggagcagcctcttcagtaagcacgaaacatgctctcatcatggatgaagtagatggcatggcaggcaatgaggataggggaggaattcaggaattaattggcctgataaaacatactaaaattcccattatttgtatgtgcaatgatagaaatcatcccaagattcgctctctggttcattattgttttgatcttcgttttcaaagacctcgggttgaacagattaagggtgctatgatgtctattgcatttaaagaaggtttaaagattccccctccagctatgaatgaaataattttgggagccaatcaagatatcagacaggttttacataatctgagtatgtggtgtgcacgaagtaaagcattaacctatgaccaggccaaagctgattctcacagagccaaaaaggatatcaaaatgggcccatttgatgttgcccggaaagtgtttgcagctggagaggagactgctcacatgtcacttgtggacaagtcagatctcttttttcatgattattcaatagcacccctcttcgtccaggaaaattacatacacgtgaagcctgtagcagcagggggtgacatgaaaaagcacctgatgcttttaagcagagcagcagacagcatatgcgatggtgacctagtggacagccagatccggagtaagcaaaactggagtcttctgcctgcgcaggccatttatgccagtgttcttcctggagagttgatgagggggtacatgacccagtttcccaccttcccaagctggctggggaagcactcgtctacaggcaaacatgatcgtattgttcaggacctggccttgcatatgagtctcagaacttactccagcaaaaggactgtaaacatggattatctgtcgcttctaagggatgcacttgtacagcccttgacctcacaaggagtagacggagtacaggatgttgttgcacttatggacacatattatttgatgaaagaagactttgagaatatcatggaaatcagcagctggggtggcaaacctagtcccttttcaaagctggatcccaaggtgaaagcagccttcacaagagcttacaataaggaagcccaccttactccatactcacttcaagctataaaggcatctagacacagcacaagcccatccctggattcggaatacaatgaagaattaaatgaagatgactctcaatctgatgagaaagaccaagatgctatagaaactgatgccatgatcaagaaaaagacaaaatcttcaaagccttcaaaaccagaaaaagataaggagcccagaaaaggaaaaggaaaaagttcgaagaaatgaaaccatttttcactagcgacagccactttttactctccctcctgaccagtccagctggtctagagaaagccttgttttttcccagagcaaccatgttttagcataatgggatgacctggtgtcccattataaataaagggtggtatggctagaagggtatgagcagtaggcttatgtacacctcttatagaggttgataggactgcttgggtcctccactgtcctctgtcaatctagttagacgtgcttctgaatgactgtagaattggaactagaaactacacctgggctttggagtcagattttagttaacaataatgagcctgggagcagtagtactaaggcgtcttttgtaggcttaagaatttatcctaatggcctttataggaccaatgctgattttttttaaaggcagttcctattatgtggtgaaattttgtaaataaatgattatacaaaacagtcaccacctagaactgggtattctttgtacattgtcagatatctttcaaagtataaattaggaataaaaatgttccacatgatatgtgtacaaattctttttaagattgtcatcttgtacagcaaaatattatgttggtatattacttccttattaatttgcaaatgattggattaaaaaagctcactgtattccttactaacctgttgtgtgaaacataacattggcagtcgaggagtcagaactcggattcccagcctcactccctctgtgtgtgttgaccacgtctctgctgtgaataggatttcatgcagtggtctgttatggggctttgcagcgtggggggctgcagaagattctcagacattcttatccttctggagtctcaacccatcaggttcagaccagtaggaaccaggctgggtcaggctcttaatttcactacggtgggggacaaaatgaacactggcttttgttcactttgcccctgagagatctagtcctgtcctgtgatggcttccacaaaccctgttggaagtttgggttattcctataactgtatgtgttgagtggccgtgaggctatggacctagcctggaatttagatgtctagctattttttaatcttgttggtaaatgctcagaggtctgtgctacctctgtgaggtatatactaaaatgaatgtaaaataaggatcgtattccctgctttaaggaactggtagtcttgtttgggtgatgagacaaagttcttgagacatttaaactgtatttaccagtgtgaaaaatgtcatttatggagattaattcattatggaaataaaacattgcctaagcccttg

SEQ ID NO: 306063 - DNA, 4423 bp, Homo sapiens
cctttccgtccttgcttcttttttcattgatgtaaatttttttaacttaatatgaaaactctccaagtcttgatcatcagccaggattttgccacagcaatttcattctcttatcggagcttgtatgtgtcaaagtatacttcagagtgcaaacattaagcaagtaatatattttacctacagatacttatgaagacattctttcgctatcgtgagtaaaagtatataaagctgtttctaactgaaaatgcttgaaataagcctgtaatagaaatattttttcattttttaaaaaagggcggaattccactgtcttcgccttcttgcacttcgcgggagaagttgttggcgcgaatggatcctgagcctcgataacagattcctcaaccggcccacccgccagccagccagcgccttcatcctggggctgcgatggacattcggaaattctttggagtaataccaagtggaaagaaacttgtaagtgaaacagtaaagaagaatgagaaaacaaagtctgatgaagaaactttaaaagcaaagaaaggaataaaggaaatcaaggtaaatagctcccgtaaagaggatgacttcaaacaaaagcaaccaagcaagaaaaagaggatcatctatgattcagattcagagtcagaggagacgttgcaggtaaaaaatgccaaaaagccaccagaaaaactgccagtatcttctaaacctggtaaaatttcacggcaggatcctgttacatacatttcagaaacagatgaagaagatgactttatgtgtaagaaggcggcctctaaatcaaaagagaatggaagatctacaaatagtcatcttggaacatcaaacatgaaaaagaatgaagaaaacactaagaccaagaataagcctttatcaccaataaaacttacacccacatcagtacttgattattttggaactggaagtgtccaaagatctaataagaagatggtggcaagcaaaagaaaagagctttcacaaaatacagatgagtctggattaaatgatgaagccatcgccaagcaattacagcttgatgaagatgcggagctggagaggcagttgcatgaagatgaagagtttgccagaacattagccatgttggatgaagaacccaagaccaaaaaggctcgaaaggacacagaagcgggagaaacgttttcatctgtccaagccaatttaagtaaagcagaaaaacataaatatcctcataaagtaaaaacagcacaagtttcagatgaaagaaagagctacagtcctaggaagcaaagtaaatatgaaagttcaaaagaatctcagcaacattccaagtcatcagctgacaaaataggagaagtctcttctcccaaggccagttctaagctggcaattatgaaaagaaaagaagagagctcttataaagaaatagagcctgtggcctcaaaaagaaaagaaaatgccattaaattgaaaggagagacaaaaactcctaagaaaaccaaaagttctccagctaaaaaagagtctgtaagtcctgaagattctgaaaagaaacgcactaattatcaagcttatcgaagctacttaaatcgagaaggtcccaaggctctgggctccaaagaaataccaaagggagctgaaaattgcttggaaggccttatatttgtaatcacaggcgtgctggagtctattgaacgagatgaggccaagtctctaattgaacgttatgggggaaaagtaacaggaaatgtcagcaagaaaacaaattatcttgtcatgggtcgtgatagtggacagtccaagagtgataaggccgcagccttggggacaaaaattattgatgaagatggcctgttgaatctgattcggactatgccaggcaagaaatccaagtatgaaatagcagttgaaactgagatgaagaaagagtccaaactggagagaacaccccaaaaaaatgtccaaggaaaaagaaaaattagtccatctaaaaaggaatcagaatctaaaaagagcaggccgacttccaaaagggacagtttggcaaagacaataaaaaaggaaacagatgtgttttggaaaagcctggatttcaaggagcaggtggctgaggagacaagtggtgacagcaaggctaggaatttggctgatgacagcagtgaaaacaaagtggaaaatttgctctgggtggataaatataagccaacctcgctcaagaccataattggacagcaaggtgaccagagctgtgccaacaaactcctacgctggctccgaaactggcaaaagagttcttccgaagataaaaaacacgcagcaaagtttggtaaattttccggcaaagatgatggctctagttttaaagcagcgttgctgtcaggccctcctggtgttggcaaaaccaccacagcttccctggtgtgtcaggagttgggatacagctacgtggaactgaatgcaagtgacacccggagtaagagcagtttgaaggcgattgttgctgagtcactgaacaataccagcatcaaaggcttttattcaaatggagcagcctcttcagtaagcacgaaacatgctctcatcatggatgaagtagatggcatggcaggcaatgaggataggggaggaattcaggaattaattggcctgataaaacatactaaaattcccattatttgtatgtgcaatgatagaaatcatcccaagattcgctctctggttcattattgttttgatcttcgttttcaaagacctcgggttgaacagattaagggtgctatgatgtctattgcatttaaagaaggtttaaagattccccctccagctatgaatgaaataattttgggagccaatcaagatatcagacaggttttacataatctgagtatgtggtgtgcacgaagtaaagcattaacctatgaccaggccaaagctgattctcacagagccaaaaaggatatcaaaatgggcccatttgatgttgcccggaaagtgtttgcagctggagaggagactgctcacatgtcacttgtggacaagtcagatctcttttttcatgattattcaatagcacccctcttcgtccaggaaaattacatacacgtgaagcctgtagcagcagggggtgacatgaaaaagcacctgatgcttttaagcagagcagcagacagcatatgcgatggtgacctagtggacagccagatccggagtaagcaaaactggagtcttctgcctgcgcaggccatttatgccagtgttcttcctggagagttgatgagggggtacatgacccagtttcccaccttcccaagctggctggggaagcactcgtctacaggcaaacatgatcgtattgttcaggacctggccttgcatatgagtctcagaacttactccagcaaaaggactgtaaacatggattatctgtcgcttctaagggatgcacttgtacagcccttgacctcacaaggagtagacggagtacaggatgttgttgcacttatggacacatattatttgatgaaagaagactttgagaatatcatggaaatcagcagctggggtggcaaacctagtcccttttcaaagctggatcccaaggtgaaagcagccttcacaagagcttacaataaggaagcccaccttactccatactcacttcaagctataaaggcatctagacacagcacaagcccatccctggattcggaatacaatgaagaattaaatgaagatgactctcaatctgatgagaaagaccaagatgctatagaaactgatgccatgatcaagaaaaagacaaaatcttcaaagccttcaaaaccagaaaaagataaggagcccagaaaaggaaaaggaaaaagttcgaagaaatgaaaccatttttcactagcgacagccactttttactctccctcctgaccagtccagctggtctagagaaagccttgttttttcccagagcaaccatgttttagcataatgggatgacctggtgtcccattataaataaagggtggtatggctagaagggtatgagcagtaggcttatgtacacctcttatagaggttgataggactgcttgggtcctccactgtcctctgtcaatctagttagacgtgcttctgaatgactgtagaattggaactagaaactacacctgggctttggagtcagattttagttaacaataatgagcctgggagcagtagtactaaggcgtcttttgtaggcttaagaatttatcctaatggcctttataggaccaatgctgattttttttaaaggcagttcctattatgtggtgaaattttgtaaataaatgattatacaaaacagtcaccacctagaactgggtattctttgtacattgtcagatatctttcaaagtataaattaggaataaaaatgttccacatg

SEQ ID NO: 306064 - DNA, 1964 bp, Homo sapiens
gaaagggtctgactgccctgtaggccatttatgccagtgttcttcctggagagttgatgagggggtacatgacccagtttcccaccttcccaagctggctggggaagcactcgtctacaggcaaacatgatcgtattgttcaggacctggccttgcatatgagtctcagaacttactccagcaaaaggactgtaaacatggattatctgtcgcttctaagggatgcacttgtacagcccttgacctcacaaggagtagacggagtacaggatgttgttgcacttatggacacatattatttgatgaaagaagactttgagaatatcatggaaatcagcagctggggtggcaaacctagtcccttttcaaagctggatcccaaggtgaaagcagccttcacaagagcttacaataaggaagcccaccttactccatactcacttcaagctataaaggcatctagacacagcacaagcccatccctggattcggaatacaatgaagaattaaatgaagatgactctcaatctgatgagaaagaccaagatgctatagaaactgatgccatgatcaagaaaaagacaaaatcttcaaagccttcaaaaccagaaaaagataaggagcccagaaaaggaaaaggaaaaagttcgaagaaatgaaaccatttttcactagcgacagccactttttactctccctcctgaccagtccagctggtctagagaaagccttgttttttcccagagcaaccatgttttagcataatgggatgacctggtgtcccattataaataaagggtggtatggctagaagggtatgagcagtaggcttatgtacacctcttatagaggttgataggactgcttgggtcctccactgtcctctgtcaatctagttagacgtgcttctgaatgactgtagaattggaactagaaactacacctgggctttggagtcagattttagttaacaataatgagcctgggagcagtagtactaaggcgtcttttgtaggcttaagaatttatcctaatggcctttataggaccaatgctgattttttttaaaggcagttcctattatgtggtgaaattttgtaaataaatgattatacaaaacagtcaccacctagaactgggtattctttgtacattgtcagatatctttcaaagtataaattaggaataaaaatgttccacatgatatgtgtacaaattctttttaagattgtcatcttgtacagcaaaatattatgttggtatattacttccttattaatttgcaaatgattggattaaaaaagctcactgtattccttactaacctgttgtgtgaaacataacattggcagtcgaggagtcagaactcggattcccagcctcactccctctgtgtgtgttgaccacgtctctgctgtgaataggatttcatgcagtggtctgttatggggctttgcagcgtggggggctgcagaagattctcagacattcttatccttctggagtctcaacccatcaggttcagaccagtaggaaccaggctgggtcaggctcttaatttcactacggtgggggacaaaatgaacactggcttttgttcactttgcccctgagagatctagtcctgtcctgtgatggcttccacaaaccctgttggaagtttgggttattcctataactgtatgtgttgagtggccgtgaggctatggacctagcctggaatttagatgtctagctattttttaatcttgttggtaaatgctcagaggtctgtgctacctctgtgaggtatatactaaaatgaatgtaaaataaggatcgtattccctgctttaaggaactggtagtcttgtttgggtgatgagacaaagttcttgagacatttaaactgtatttaccagtgtgaaaaatgtcatttatggagattaattcattatggaaataaaacattgcctaagcccttg

SEQ ID NO: 306065 - DNA, 3811 bp, Homo sapiens
cctttccgtccttgcttcttttttcattgatgtaaatttttttaacttaatatgaaaactctccaagtcttgatcatcagccaggattttgccacagcaatttcattctcttatcggagcttgtatgtgtcaaagtatacttcagagtgcaaacattaagcaagtaatatattttacctacagatacttatgaagacattctttcgctatcgtgagtaaaagtatataaagctgtttctaactgaaaatgcttgaaataagcctgtaatagaaatattttttcattttttaaaaaagggcggaattccactgtcttcgccttcttgcacttcgcgggagaagttgttggcgcgaatggatcctgagcctcgataacagattcctcaaccggcccacccgccagccagccagcgccttcatcctggggctgcgatggacattcggaaattctttggagtaataccaagtggaaagaaacttgtaagtgaaacagtaaagaagaatgagaaaacaaagtctgatgaagaaactttaaaagcaaagaaaggaataaaggaaatcaaggtaaatagctcccgtaaagaggatgacttcaaacaaaagcaaccaagcaagaaaaagaggatcatctatgattcagattcagagtcagaggagacgttgcaggtaaaaaatgccaaaaagccaccagaaaaactgccagtatcttctaaacctggtaaaatttcacggcaggatcctgttacatacatttcagaaacagatgaagaagatgactttatgtgtaagaaggcggcctctaaatcaaaagagaatggaagatctacaaatagtcatcttggaacatcaaacatgaaaaagaatgaagaaaacactaagaccaagaataagcctttatcaccaataaaacttacacccacatcagtacttgattattttggaactggaagtgtccaaagatctaataagaagatggtggcaagcaaaagaaaagagctttcacaaaatacagatgagtctggattaaatgatgaagccatcgccaagcaattacagcttgatgaagatgcggagctggagaggcagttgcatgaagatgaagagtttgccagaacattagccatgttggatgaagaacccaagaccaaaaaggctcgaaaggacacagaagcgggagaaacgttttcatctgtccaagccaatttaagtaaagcagaaaaacataaatatcctcataaagtaaaaacagcacaagtttcagatgaaagaaagagctacagtcctaggaagcaaagtaaatatgaaagttcaaaagaatctcagcaacattccaagtcatcagctgacaaaataggagaagtctcttctcccaaggccagttctaagctggcaattatgaaaagaaaagaagagagctcttataaagaaatagagcctgtggcctcaaaaagaaaagaaaatgccattaaattgaaaggagagacaaaaactcctaagaaaaccaaaagttctccagctaaaaaagagtctgtaagtcctgaagattctgaaaagaaacgcactaattatcaagcttatcgaagctacttaaatcgagaaggtcccaaggctctgggctccaaagaaataccaaagggagctgaaaattgcttggaaggccttatatttgtaatcacaggcgtgctggagtctattgaacgagatgaggccaagtctctaattgaacgttatgggggaaaagtaacaggaaatgtcagcaagaaaacaaattatcttgtcatgggtcgtgatagtggacagtccaagagtgataaggccgcagccttggggacaaaaattattgatgaagatggcctgttgaatctgattcggactatgccaggcaagaaatccaagtatgaaatagcagttgaaactgagatgaagaaagagtccaaactggagagaacaccccaaaaaaatgtccaaggaaaaagaaaaattagtccatctaaaaaggaatcagaatctaaaaagagcaggccgacttccaaaagggacagtttggcaaagacaataaaaaaggaaacagatgtgttttggaaaagcctggatttcaaggagcaggtggctgaggagacaagtggtgacagcaaggctaggaatttggctgatgacagcagtgaaaacaaagtggaaaatttgctctgggtggataaatataagccaacctcgctcaagaccataattggacagcaaggtgaccagagctgtgccaacaaactcctacgctggctccgaaactggcaaaagagttcttccgaagataaaaaacacgcagcaaagtttggtaaattttccggcaaagatgatggctctagttttaaagcagcgttgctgtcaggccctcctggtgttggcaaaaccaccacagcttccctggtgtgtcaggagttgggatacagctacgtggaactgaatgcaagtgacacccggagtaagagcagtttgaaggcgattgttgctgagtcactgaacaataccagcatcaaaggcttttattcaaatggagcagcctcttcagtaagcacgaaacatgctctcatcatggatgaagtagatggcatggcaggcaatgaggataggggaggaattcaggaattaattggcctgataaaacatactaaaattcccattatttgtatgtgcaatgatagaaatcatcccaagattcgctctctggttcattattgttttgatctagttagacgtgcttctgaatgactgtagaattggaactagaaactacacctgggctttggagtcagattttagttaacaataatgagcctgggagcagtagtactaaggcgtcttttgtaggcttaagaatttatcctaatggcctttataggaccaatgctgattttttttaaaggcagttcctattatgtggtgaaattttgtaaataaatgattatacaaaacagtcaccacctagaactgggtattctttgtacattgtcagatatctttcaaagtataaattaggaataaaaatgttccacatgatatgtgtacaaattctttttaagattgtcatcttgtacagcaaaatattatgttggtatattacttccttattaatttgcaaatgattggattaaaaaagctcactgtattccttactaacctgttgtgtgaaacataacattggcagtcgaggagtcagaactcggattcccagcctcactccctctgtgtgtgttgaccacgtctctgctgtgaataggatttcatgcagtggtctgttatggggctttgcagcgtggggggctgcagaagattctcagacattcttatccttctggagtctcaacccatcaggttcagaccagtaggaaccaggctgggtcaggctcttaatttcactacggtgggggacaaaatgaacactggcttttgttcactttgcccctgagagatctagtcctgtcctgtgatggcttccacaaaccctgttggaagtttgggttattcctataactgtatgtgttgagtggccgtgaggctatggacctagcctggaatttagatgtctagctattttttaatcttgttggtaaatgctcagaggtctgtgctacctctgtgaggtatatactaaaatgaatgtaaaataaggatcgtattccctgctttaaggaactggtagtcttgtttgggtgatgagacaaagttcttgagacatttaaactgtatttaccagtgtgaaaaatgtcatttatggagattaattcattatggaaataaaacattgcctaagcccttg

SEQ ID NO: 306066 - DNA, 2888 bp, Homo sapiens
cctttccgtccttgcttcttttttcattgatgtaaatttttttaacttaatatgaaaactctccaagtcttgatcatcagccaggattttgccacagcaatttcattctcttatcggagcttgtatgtgtcaaagtatacttcagagtgcaaacattaagcaagtaatatattttacctacagatacttatgaagacattctttcgctatcgtgagtaaaagtatataaagctgtttctaactgaaaatgcttgaaataagcctgtaatagaaatattttttcattttttaaaaaagggcggaattccactgtcttcgccttcttgcacttcgcgggagaagttgttggcgcgaatggatcctgagcctcgataacagattcctcaaccggcccacccgccagccagccagcgccttcatcctggggctgcgatggacattcggaaattctttggagtaataccaagtggaaagaaacttgtaagtgaaacagtaaagaagaatgagaaaacaaagtctgatgaagaaactttaaaagcaaagaaaggaataaaggaaatcaaggtaaatagctcccgtaaagaggatgacttcaaacaaaagcaaccaagcaagaaaaagaggatcatctatgattcagattcagagtcagaggagacgttgcaggtaaaaaatgccaaaaagccaccagaaaaactgccagtatcttctaaacctggtaaaatttcacggcaggatcctgttacatacatttcagaaacagatgaagaagatgactttatgtgtaagaaggcggcctctaaatcaaaagagaatggaagatctacaaatagtcatcttggaacatcaaacatgaaaaagaatgaagaaaacactaagaccaagaataagcctttatcaccaataaaacttacacccacatcagtacttgattattttggaactggaagtgtccaaagatctaataagaagatggtggcaagcaaaagaaaagagctttcacaaaatacagatgagtctggattaaatgatgaagccatcgccaagcaattacagcttgatgaagatgcggagctggagaggcagttgcatgaagatgaagagtttgccagaacattagccatgttggatgaagaacccaagaccaaaaaggctcgaaaggacacagaagcgggagaaacgttttcatctgtccaagccaatttaagtaaagcagaaaaacataaatatcctcataaagtaaaaacagcacaagtttcagatgaaagaaagagctacagtcctaggaagcaaagtaaatatgaaagttcaaaagaatctcagcaacattccaagtcatcagctgacaaaataggagaagtctcttctcccaaggccagttctaagctggcaattatgaaaagaaaagaagagagctcttataaagaaatagagcctgtggcctcaaaaagaaaagaaaatgccattaaattgaaaggagagacaaaaactcctaagaaaaccaaaagttctccagctaaaaaagagtctgtaagtcctgaagattctgaaaagaaacgcactaattatcaagcttatcgaagctacttaaatcgagaaggtcccaaggctctgggctccaaagaaataccaaagggagctgaaaattgcttggaaggccttatatttgtaatcacaggcgtgctggagtctattgaacgagatgaggccaagtctctaattgaacgttatgggggaaaagtaacaggaaatgtcagcaagaaaacaaattatcttgtcatgggtcgtgatagtggacagtccaagagtgataaggccgcagccttggggacaaaaattattgatgaagatggcctgttgaatctgattcggactatgccaggcaagaaatccaagtatgaaatagcagttgaaactgagatgaagaaagagtccaaactggagagaacaccccaaaaaaatgtccaaggaaaaagaaaaattagtccatctaaaaaggaatcagaatctaaaaagagcaggccgacttccaaaagggacagtttggcaaagacaataaaaaaggaaacagatgtgttttggaaaagcctggatttcaaggagcaggtggctgaggagacaagtggtgacagcaaggctaggaatttggctgatgacagcagtgaaaacaaagtggaaaatttgctctgggtggataaatataagccaacctcgctcaagaccataattggacagcaaggtgaccagagctgtgccaacaaactcctacgctggctccgaaactggcaaaagagttcttccgaagataaaaaacacgcagcaaagtttggtaaattttccggcaaagatgatggctctagttttaaagcagcgttgctgtcaggccctcctggtgttggcaaaaccaccacagcttccctggtgtgtcaggagttgggatacagctacgtggaactgaatgcaagtgacacccggagtaagagcagtttgaaggcgattgttgctgagtcactgaacaataccagcatcaaaggcttttattcaaatggagcagcctcttcagtaagcacgaaacatgctctcatcatggatgaagtagatggcatggcaggcaatgaggataggggaggaattcaggaattaattggcctgataaaacatactaaaattcccattatttgtatgtgcaatgatagaaatcatcccaagattcgctctctggttcattattgttttgatcttcgttttcaaagacctcgggttgaacagattaaggtgctatgatgtctatgctttaagacgttaagattccccccaggtataagaatatttgggccaccagaatccacggttcataacggatgggggcaaaagtacataacgcaagg

SEQ ID NO: 306067 - DNA, 1446 bp, Homo sapiens
cctttccgtccttgcttcttttttcattgatgtaaatttttttaacttaatatgaaaactctccaagtcttgatcatcagccaggattttgccacagcaatttcattctcttatcggagcttgtatgtgtcaaagtatacttcagagtgcaaacattaagcaagtaatatattttacctacagatacttatgaagacattctttcgctatcgtgagtaaaagtatataaagctgtttctaactgaaaatgcttgaaataagcctgtaatagaaatattttttcattttttaaaaaagggcggaattccactgtcttcgccttcttgcacttcgcgggagaagttgttggcgcgaatggatcctgagcctcgataacagattcctcaaccggcccacccgccagccagccagcgccttcatcctggggctgcgatggacattcggaaattctttggagtaataccaagtggaaagaaacttgtaagtgaaacagtaaagaagaatgagaaaacaaagtctgatgaagaaactttaaaagcaaagaaaggaataaaggaaatcaaggtaaatagctcccgtaaagaggatgacttcaaacaaaagcaaccaagcaagaaaaagaggatcatctatgattcagattcagagtcagaggagacgttgcaggtaaaaaatgccaaaaagccaccagaaaaactgccagtatcttctaaacctggtaaaatttcacggcaggatcctgttacatacatttcagaaacagatgaagaagatgactttatgtgtaagaaggcggcctctaaatcaaaagagaatggaagatctacaaatagtcatcttggaacatcaaacatgaaaaagaatgaagaaaacactaagaccaagaataagcctttatcaccaataaaacttacacccacatcagtacttgattattttggaactggaagtgtccaaagatctaataagaagatggtggcaagcaaaagaaaagagctttcacaaaatacagatgagtctggattaaatgatgaagccatcgccaagcaattacagcttgatgaagatgcggagctggagaggcagttgcatgaagatgaagagtttgccagaacattagccatgttggatgaagaacccaagaccaaaaaggctcgaaaggacacagaagcgggagaaacgttttcatctgtccaagccaatttaagtaaagcagaaaaacataaatatcctcataaagtaaaaacagcacaagtttcagatgaaagaaagagctacagtcctaggaagcaaagtaaatatgaaagttcaaaagaatctcagcaacattccaagtcatcagctgacaaaataggagaagtctcttctcccaaggccagttctaagctggcaattatgaaaagaaaagaagagagctcttataaagaaatagagcctgtggcctca

SEQ ID NO: 306068 - DNA, 1567 bp, Homo sapiens
cctttccgtccttgcttcttttttcattgatgtaaatttttttaacttaatatgaaaactctccaagtcttgatcatcagccaggattttgccacagcaatttcattctcttatcggagcttgtatgtgtcaaagtatacttcagagtgcaaacattaagcaagtaatatattttacctacagatacttatgaagacattctttcgctatcgtgagtaaaagtatataaagctgtttctaactgaaaatgcttgaaataagcctgtaatagaaatattttttcattttttaaaaaagggcggaattccactgtcttcgccttcttgcacttcgcgggagaagttgttggcgcgaatggatcctgagcctcgataacagattcctcaaccggcccacccgccagccagccagcgccttcatcctggggctgcgatggtgaagtctcgctctgtcaccaggctggagtgcagtggcatgatctcggctcactgcagcctccacctcccgggttcaagcggttttcctgcctcagcttcccaagtagctgggactacaggacattcggaaattctttggagtaataccaagtggaaagaaacttgtaagtgaaacagtaaagaagaatgagaaaacaaagtctgatgaagaaactttaaaagcaaagaaaggaataaaggaaatcaaggtaaatagctcccgtaaagaggatgacttcaaacaaaagcaaccaagcaagaaaaagaggatcatctatgattcagattcagagtcagaggagacgttgcaggtaaaaaatgccaaaaagccaccagaaaaactgccagtatcttctaaacctggtaaaatttcacggcaggatcctgttacatacatttcagaaacagatgaagaagatgactttatgtgtaagaaggcggcctctaaatcaaaagagaatggaagatctacaaatagtcatcttggaacatcaaacatgaaaaagaatgaagaaaacactaagaccaagaataagcctttatcaccaataaaacttacacccacatcagtacttgattattttggaactggaagtgtccaaagatctaataagaagatggtggcaagcaaaagaaaagagctttcacaaaatacagatgagtctggattaaatgatgaagccatcgccaagcaattacagcttgatgaagatgcggagctggagaggcagttgcatgaagatgaagagtttgccagaacattagccatgttggatgaagaacccaagaccaaaaaggctcgaaaggacacagaagcgggagaaacgttttcatctgtccaagccaatttaagtaaagcagaaaaacataaatatcctcataaagtaaaaacagcacaagtttcagatgaaagaaagagctacagtcctaggaagcaaagtaaatatgaaagttcaaaagaatctcagcaacattccaagtcatcagctgacaaaataggagaagtctcttctcccaaggccagttctaagctggcaattatgaaaagaaaagaagagagctcttataaagaaatagagcctgtggcctca

SEQ ID NO: 306069 - DNA, 168 bp, Homo sapiens
gtaggtgggattactctgtttcgggtattttatcgatttggtgtatttggcctttatccagtaatgatcatgtgagtcaaaagatttgtgttttagtttttattttattggtaactagatgaatgatcctggataagttccttatattttatgggcctgagttttatc

SEQ ID NO: 306070 - DNA, 397 bp, Homo sapiens
gtaagtgttctacatataagcaagtatgctcaggatttatacccattcactaatattaacaggagaaactaggatgtagtaaataggcaacatgttttaataattaaaataattttcctatgattatggataaaatgtattgccctcattttaaaggatgaggaagttggaatgttacatatttaattttttaattcttgaaagcgggaaaagatcatttaagccataagaaaaaatgataattattcgaatttaaattgagttctcagaatggaaactcattttactattgacctcaaccagtcaatattagcgataaatttgtttccaaatgagataataaatagattccttataaatagagcatacctatgctacacttgtgaccttctctact

SEQ ID NO: 306071 - DNA, 436 bp, Homo sapiens
ttgtttccatcttttagctataatgtggttatgaacatttgtgtacaagtttttgtcgaggcattaacttttaattaggaaactttgaaacaaaaatctcaacactgtaccttgtttttttcaaactaaaattggagtacttattacttttaaaaatcaacgtgttgtcacttttagaaattgcatttggtggtttctggtgtgtttgttaatttttatagtttagaaggtggtgatttccacaaacaggaaagtctgttgtgaaaagaccagcccaggttgagtagcccacttggatatctctgattgctctctgtagtacgtttagcaggatagaaattctgtatgtttcatcaggtttcttttttcctcatttttccacttcttaagatgaagaaagagtccaaactggagagaacaccccaaaaaaatgtcc

SEQ ID NO: 306072 - DNA, 706 bp, Homo sapiens
cccgttaaacatggatatatggatatatcatgaaatataatttaaaattcaggtgaattcctaaagtaaaacactttttgcatttctttgcttggagctggcaacttggcttattcccataatctgccctgaggtgtgtggctttagagagtggaaagttttgagaagcgctgatgcagggatgttcgtaagtcagttgtctgtaagttaggaagtacttgtgtagctaaaactgttaatttcacagccagacacagaagtgacacaataaaaataatgtttatttctagatatgtattttaaattttgcatgaattctgtatgactttgttcattttcctttccctgttcccaaagtctgtaagtcctgaagattctgaaaagaaacgcactaattatcaagcttatcgaagctacttaaatcgagaaggtcccaaggctctgggctccaaagaaataccaaaggtaagagtactgagagggcatgccattctgtgagggcctctgccgtatgggtccatgtatgtattcacgatgattatagcagcagaggattaataattaaaaatgagcaacagaaaagcttcagttactgtcttcaagaattagggatgtttattcatgttatgaatcactgcttgatacttagaaaaatttccctttaaataacaagtagccctagaaaggctgagctttgagactatac

SEQ ID NO: 306073 - DNA, 511 bp, Homo sapiens
gtagtctcagagttgactcatagttggccaggtcatcttcagctctcttgcttattgcctgtaggttttattcttcagtggttctgatagcaaatcatctgctagtctagatgatcttagtcctataagtaaatgtatttatagatttactataaacagatggtcttgacactttaggactttgggccttcagggtatattctgtgctaagattactcagttgaaaaatgaaagaaaagttgatatagattatcattttccaaaaacaacaaccataatcttttctttcttcctagtaaaaacagcacaagtttcagatgaaagaaagagctacagtcctaggaagcaaagtaaatatgaaagttcaaaagaatctcagcaacattccaagtcatcagctgacaaaataggagaagtctcttctcccaaggccagttctaagctggcaattatgaaaagaaaagaagagagctcttataaagaaatagagcctgtggcctcaaaaagaaaa

SEQ ID NO: 306074 - DNA, 2416 bp, Homo sapiens
cgatttcattcctcgctccccacaggtccctctccccaaaatattcccatcttgtcctagcccatcccccagactatctcaaggaccagctgtccccacgcccccgacctccactaggcctgtgccacccgctgcctgcaggaagacgcccggtcccgggccgggttagccccatgggaacgcagcgcctgtgtggccgcgggactcaaggctggcctggctcaagtgaacagcacgtccaggaggcgacctcgtccgcgggtttgcattctggggtggacgagctgggggttcggtccgagcccggtgggaggctcccggagcgcagcctgggcccagcccaccccgcgccggcggccatggcaggcaccctggacctggacaagggctgcacggtggaggagctgctccgcgggtgcatcgaagccttcgatgactccgggaaggtgcgggacccgcagctggtgcgcatgttcctcatgatgcacccctggtacatcccctcctctcagctggcggccaagctgctccacatctaccaacaatcccggaaggacaactccaattccctgcaggtgaaaacgtgccacctggtcaggtactggatctccgccttcccagcggagtttgacttgaacccggagttggctgagcagatcaaggagctgaaggctctgctagaccaagaagggaaccgacggcacagcagcctaatcgacatagacagcgtccctacctacaagtggaagcggcaggtgactcagcggaaccctgtgggacagaaaaagcgcaagatgtccctgttgtttgaccacctggagcccatggagctggcggagcatctcacctacttggagtatcgctccttctgcaagatcctgtttcaggactatcacagtttcgtgactcatggctgcactgtggacaaccccgtcctggagcggttcatctccctcttcaacagcgtctcacagtgggtgcagctcatgatcctcagcaaacccacagccccgcagcgggccctggtcatcacacactttgtccacgtggcggagaagctgctacagctgcagaacttcaacacgctgatggcagtggtcgggggcctgagccacagctccatctcccgcctcaaggagacccacagccacgttagccctgagaccatcaagctctgggagggtctcacggaactagtgacggcgacaggcaactatggcaactaccggcgtcggctggcagcctgtgtgggcttccgcttcccgatcctgggtgtgcacctcaaggacctggtggccctgcagctggcactgcctgactggctggacccagcccggacccggctcaacggggccaagatgaagcagctctttagcatcctggaggagctggccatggtgaccagcctgcggccaccagtacaggccaaccccgacctgctgagcctgctcacggtgtctctggatcagtatcagacggaggatgagctgtaccagctgtccctgcagcgggagccgcgctccaagtcctcgccaaccagccccacgagttgcaccccaccaccccggcccccggtactggaggagtggacctcggctgccaaacccaagctggatcaggccctcgtggtggagcacatcgagaagatggtggagtctgtgttccggaactttgacgtcgatggggatggccacatctcacaggaagaattccagatcatccgtgggaacttcccttacctcagcgcctttggggacctcgaccagaaccaggatggctgcatcagcagggaggagatggtttcctatttcctgcgctccagctctgtgttgggggggcgcatgggcttcgtacacaacttccaggagagcaactccttgcgccccgtcgcctgccgccactgcaaagccctgatcctgggcatctacaagcagggcctcaaatgccgagcctgtggagtgaactgccacaagcagtgcaaggatcgcctgtcagttgagtgtcggcgcagggcccagagtgtgagcctggaggggtctgcaccctcaccctcacccatgcacagccaccatcaccgcgccttcagcttctctctgccccgccctggcaggcgaggctccaggcctccagagatccgtgaggaggaggtacagacggtggaggatggggtgtttgacatccacttgtaatagatgctgtggttggatcaaggactcattcctgccttggagaaaatacttcaaccagagcagggagcctgggggtgtcggggcaggaggctggggatgggggtgggatatgagggtggcatgcagctgagggcagggccagggctggtgtccctaaggttgtacagactcttgtgaatatttgtattttccagatggaataaaaaggcccgtgtaattaaccttca

SEQ ID NO: 306075 - DNA, 2310 bp, Homo sapiens
cgatttcattcctcgctccccacaggtccctctccccaaaatattcccatcttgtcctagcccatcccccagactatctcaaggaccagctgtccccacgcccccgacctccactaggcctgtgccacccgctgcctgcaggaagacgcccggtcccgggccgggttagccccatgggaacggggttcggtccgagcccggtgggaggctcccggagcgcagcctgggcccagcccaccccgcgccggcggccatggcaggcaccctggacctggacaagggctgcacggtggaggagctgctccgcgggtgcatcgaagccttcgatgactccgggaaggtgcgggacccgcagctggtgcgcatgttcctcatgatgcacccctggtacatcccctcctctcagctggcggccaagctgctccacatctaccaacaatcccggaaggacaactccaattccctgcaggtgaaaacgtgccacctggtcaggtactggatctccgccttcccagcggagtttgacttgaacccggagttggctgagcagatcaaggagctgaaggctctgctagaccaagaagggaaccgacggcacagcagcctaatcgacatagacagcgtccctacctacaagtggaagcggcaggtgactcagcggaaccctgtgggacagaaaaagcgcaagatgtccctgttgtttgaccacctggagcccatggagctggcggagcatctcacctacttggagtatcgctccttctgcaagatcctgtttcaggactatcacagtttcgtgactcatggctgcactgtggacaaccccgtcctggagcggttcatctccctcttcaacagcgtctcacagtgggtgcagctcatgatcctcagcaaacccacagccccgcagcgggccctggtcatcacacactttgtccacgtggcggagaagctgctacagctgcagaacttcaacacgctgatggcagtggtcgggggcctgagccacagctccatctcccgcctcaaggagacccacagccacgttagccctgagaccatcaagctctgggagggtctcacggaactagtgacggcgacaggcaactatggcaactaccggcgtcggctggcagcctgtgtgggcttccgcttcccgatcctgggtgtgcacctcaaggacctggtggccctgcagctggcactgcctgactggctggacccagcccggacccggctcaacggggccaagatgaagcagctctttagcatcctggaggagctggccatggtgaccagcctgcggccaccagtacaggccaaccccgacctgctgagcctgctcacggtgtctctggatcagtatcagacggaggatgagctgtaccagctgtccctgcagcgggagccgcgctccaagtcctcgccaaccagccccacgagttgcaccccaccaccccggcccccggtactggaggagtggacctcggctgccaaacccaagctggatcaggccctcgtggtggagcacatcgagaagatggtggagtctgtgttccggaactttgacgtcgatggggatggccacatctcacaggaagaattccagatcatccgtgggaacttcccttacctcagcgcctttggggacctcgaccagaaccaggatggctgcatcagcagggaggagatggtttcctatttcctgcgctccagctctgtgttgggggggcgcatgggcttcgtacacaacttccaggagagcaactccttgcgccccgtcgcctgccgccactgcaaagccctgatcctgggcatctacaagcagggcctcaaatgccgagcctgtggagtgaactgccacaagcagtgcaaggatcgcctgtcagttgagtgtcggcgcagggcccagagtgtgagcctggaggggtctgcaccctcaccctcacccatgcacagccaccatcaccgcgccttcagcttctctctgccccgccctggcaggcgaggctccaggcctccagagatccgtgaggaggaggtacagacggtggaggatggggtgtttgacatccacttgtaatagatgctgtggttggatcaaggactcattcctgccttggagaaaatacttcaaccagagcagggagcctgggggtgtcggggcaggaggctggggatgggggtgggatatgagggtggcatgcagctgagggcagggccagggctggtgtccctaaggttgtacagactcttgtgaatatttgtattttccagatggaataaaaaggcccgtgtaattaaccttca

SEQ ID NO: 306076 - DNA, 650 bp, Homo sapiens
ggcggggagcggggccgcggcgtggagagcgggcgggagccgcagccgcagcgaggccggcgggcgggagcgcacggaggtggggtcggccaggccggtgcgggctccttgcggcaggtcccaagagggttcggtccgagcccggtgggaggctcccggagcgcagcctgggcccagcccaccccgcgccggcggccatggcaggcaccctggacctggacaagggctgcacggtggaggagctgctccgcgggtgcatcgaagccttcgatgactccgggaaggtgcgggacccgcagctggtgcgcatgttcctcatgatgcacccctggtacatcccctcctctcagctggcggccaagctgctccacatctaccaacaatcccggaaggacaactccaattccctgcaggtgaaaacgtgccacctggtcaggtactggatctccgccttcccagcggagtttgacttgaacccggagttggctgagcagatcaaggagctgaaggctctgctagaccaagaagggaaccgacggcacagcagcctaatcgacatagacagcgtgtgcgtggggggagcacagagggctgggggggcactcagtatcctataccatctgtgcttaataaatgtctgttgaactgaa

SEQ ID NO: 306077 - DNA, 659 bp, Homo sapiens
ggcggaggacctccacggtgcacccagcttttcccagccaccttccagcggggccctcccccgcgtacccccatttggcagatgagaaaattgaggctcccagaggccaagtgattctcaaggtcacacgaggaagcggtagagccaggcggggacggctctgggtggctcttaggaaaagtccgcctgagaactccgtacaggagctcccctgtcctccagcctgggggagtgagtatgtgtagggccggggtacctttccgtggggcaaggctctgccaaaatctgggagtgaggggagtcagggactggtgcgcatgttcctcatgatgcacccctggtacatcccctcctctcagctggcggccaagctgctccacatctaccaacaatcccggaaggacaactccaattccctgcaggtgaaaacgtgccacctggtcaggtactggatctccgccttcccagcggagtttgacttgaacccggagttggctgagcagatcaaggagctgaaggctctgctagaccaagaagggaaccgacggcacagcagcctaatcgacatagacagcgtgtgcgtggggggagcacagagggctgggggggcactcagtatcctataccatctgtgcttaataaatgtctgttgaactgaa

SEQ ID NO: 306078 - DNA, 1030 bp, Homo sapiens
  misc_feature (899)..(899): n is a, c, g, or t
ggcggggagcggggccgcggcgtggagagcgggcgggagccgcagccgcagcgaggccggcgggcgggagcgcacggaggtggggtcggccaggccggtgcgggctccttgcggcaggtcccaagagggttcggtccgagcccggtgggaggctcccggagcgcagcctgggcccagcccaccccgcgccggcggccatggcaggcaccctggacctggacaagggctgcacggtggaggagctgctccgcgggtgcatcgaagccttcgatgactccgggaaggtgcgggacccgcagctggtgcgcatgttcctcatgatgcacccctggtacatcccctcctctcagctggcggccaagctgctccacatctaccaacaatcccggaaggacaactccaattccctgcaggtgaaaacgtgccacctggtcaggtactggatctccgccttcccagcggagtttgacttgaacccggagttggctgagcagatcaaggagctgaaggctctgctagaccaagaagggaaccgacggcacagcagcctaatcgacatagacagcgtccctacctacaagtggaagcggcaggtgactcagcggaaccctgtgggacagaaaaagcgcaagatgtccctgttgtttgaccacctggagcccatggagctggcggagcatctcacctacttggagtatcgctccttctgcaagatcctgtttcaggactatcacagtttcgtgactcatggctgcactgtggacaaccccgtcctggagcggttcatctccctcttcaacagcgtctcacagtgggtgcagctcatgatcctcagcaaacccacagccccgcagcgggccctggtcatcacacactttgtccacgtggcggaggaagcntgctaacagctgcagaacatatccaacacgcgttgatgtgaagaaggggtcaggggggcctgtaaccacagatcacatatacccggacatcaagggagaaaccaacaagacaaggttagccctgagaaccc

SEQ ID NO: 306079 - DNA, 1098 bp, Homo sapiens
ggcggaggacctccacggtgcacccagcttttcccagccaccttccagcggggccctcccccgcgtacccccatttggcagatgagaaaattgaggctcccagaggccaagtgattctcaaggtcacacgaggaagcggtagagccaggcggggacggctctgggtggctcttaggaaaagtccgcctgagaactccgtacaggagctcccctgtcctccagcctgggggagtgagtatgtgtagggccggggtacctttccgtggggcaaggctctgccaaaatctgggagtgaggggagtcagggagctggggccgcagggcgggccctgcaccgcaaatgggaggggggcgacggaatgggcgtgcgcacccatgggggtgtgtgcatgtgtgtgggagtgtacatgcgtggagaggcactgccttgcgtgtgtgcacacgtgtgaggatgtcagcgcctgtgtggccgcgggactcaaggctggcctggctcaagtgaacagcacgtccaggaggcgacctcgtccgcgggtttgcattctggggtggacgagctgggtatgtgtgcctgagggtttcttcgtgcaggtgtgcacagggtgtgggtgccattgtgtgtgagagacggaggatgggaggccggtgcctgtggcccggtgcgtgtaagtgcggacgcctgcacctccacttaggtccccggcctccgacgactaacttgggtgtggagtgtttgcccctgccaggtgcgtatgaccccgccagtgaccggagttgctaatggtgtcatgcacccaccggccacccttggcgcgagcgcccccctctggacaccctgctccgtgcgcgctcacagttcgcctgtgcggggccggggccagggtcaggagccggggatagggaggaagagggcctgtggacaagctgagccgggacccctgggacctttgcggaggtggcctgggagcgctcagttcccaggctgaggcttcccgctgacgcctcctggccgcagcgggctccccccgccccaggaatgttcctctcccatccagtccgcctcccctagggcaggccccctgggggctgccgcagccc

SEQ ID NO: 306080 - DNA, 379 bp, Homo sapiens
accaaagcagacatagagcagctcccgtcgtaccgctttaacccggacagccatcagtcggagcagacgctgtgtgtggtctgcttcagtgacttcgaggcgcggcagctgctccgagtcctcccctccacccattgagttcccccttttaaaaaatgctgtggttggatcaaggactcattcctgccttggagaaaatacttcaaccagagcagggagcctgggggtgtcggggcaggaggctggggatgggggtgggatatgagggtggcatgcagctgagggcagggccagggctggtgtccctaaggttgtacagactcttgtgaatatttgtattttccagatggaataaaaaggcccgtgtaattaaccttca

SEQ ID NO: 306081 - DNA, 2166 bp, Homo sapiens
cgggtctgggagagggggcagcggccacgagagctaaggggttcggtccgagcccggtgggaggctcccggagcgcagcctgggcccagcccaccccgcgccggcggccatggcaggcaccctggacctggacaagggctgcacggtggaggagctgctccgcgggtgcatcgaagccttcgatgactccgggaaggtgcgggacccgcagctggtgcgcatgttcctcatgatgcacccctggtacatcccctcctctcagctggcggccaagctgctccacatctaccaacaatcccggaaggacaactccaattccctgcaggtgaaaacgtgccacctggtcaggtactggatctccgccttcccagcggagtttgacttgaacccggagttggctgagcagatcaaggagctgaaggctctgctagaccaagaagggaaccgacggcacagcagcctaatcgacatagacagcgtccctacctacaagtggaagcggcaggtgactcagcggaaccctgtgggacagaaaaagcgcaagatgtccctgttgtttgaccacctggagcccatggagctggcggagcatctcacctacttggagtatcgctccttctgcaagatcctgtttcaggactatcacagtttcgtgactcatggctgcactgtggacaaccccgtcctggagcggttcatctccctcttcaacagcgtctcacagtgggtgcagctcatgatcctcagcaaacccacagccccgcagcgggccctggtcatcacacactttgtccacgtggcggagaagctgctacagctgcagaacttcaacacgctgatggcagtggtcgggggcctgagccacagctccatctcccgcctcaaggagacccacagccacgttagccctgagaccatcaagctctgggagggtctcacggaactagtgacggcgacaggcaactatggcaactaccggcgtcggctggcagcctgtgtgggcttccgcttcccgatcctgggtgtgcacctcaaggacctggtggccctgcagctggcactgcctgactggctggacccagcccggacccggctcaacggggccaagatgaagcagctctttagcatcctggaggagctggccatggtgaccagcctgcggccaccagtacaggccaaccccgacctgctgagcctgctcacggtgtctctggatcagtatcagacggaggatgagctgtaccagctgtccctgcagcgggagccgcgctccaagtcctcgccaaccagccccacgagttgcaccccaccaccccggcccccggtactggaggagtggacctcggctgccaaacccaagctggatcaggccctcgtggtggagcacatcgagaagatggtggagtctgtgttccggaactttgacgtcgatggggatggccacatctcacaggaagaattccagatcatccgtgggaacttcccttacctcagcgcctttggggacctcgaccagaaccaggatggctgcatcagcagggaggagatggtttcctatttcctgcgctccagctctgtgttgggggggcgcatgggcttcgtacacaacttccaggagagcaactccttgcgccccgtcgcctgccgccactgcaaagccctgatcctgggcatctacaagcagggcctcaaatgccgagcctgtggagtgaactgccacaagcagtgcaaggatcgcctgtcagttgagtgtcggcgcagggcccagagtgtgagcctggaggggtctgcaccctcaccctcacccatgcacagccaccatcaccgcgccttcagcttctctctgccccgccctggcaggcgaggctccaggcctccagagatccgtgaggaggaggtacagacggtggaggatggggtgtttgacatccacttgtaatagatgctgtggttggatcaaggactcattcctgccttggagaaaatacttcaaccagagcagggagcctgggggtgtcggggcaggaggctggggatgggggtgggatatgagggtggcatgcagctgagggcagggccagggctggtgtccctaaggttgtacagactcttgtgaatatttgtattttccagatggaataaaaaggcccgtgtaattaaccttca

SEQ ID NO: 306082 - DNA, 2151 bp, Homo sapiens
ccgctctgcctctcccgggacaggggttcggtccgagcccggtgggaggctcccggagcgcagcctgggcccagcccaccccgcgccggcggccatggcaggcaccctggacctggacaagggctgcacggtggaggagctgctccgcgggtgcatcgaagccttcgatgactccgggaaggtgcgggacccgcagctggtgcgcatgttcctcatgatgcacccctggtacatcccctcctctcagctggcggccaagctgctccacatctaccaacaatcccggaaggacaactccaattccctgcaggtgaaaacgtgccacctggtcaggtactggatctccgccttcccagcggagtttgacttgaacccggagttggctgagcagatcaaggagctgaaggctctgctagaccaagaagggaaccgacggcacagcagcctaatcgacatagacagcgtccctacctacaagtggaagcggcaggtgactcagcggaaccctgtgggacagaaaaagcgcaagatgtccctgttgtttgaccacctggagcccatggagctggcggagcatctcacctacttggagtatcgctccttctgcaagatcctgtttcaggactatcacagtttcgtgactcatggctgcactgtggacaaccccgtcctggagcggttcatctccctcttcaacagcgtctcacagtgggtgcagctcatgatcctcagcaaacccacagccccgcagcgggccctggtcatcacacactttgtccacgtggcggagaagctgctacagctgcagaacttcaacacgctgatggcagtggtcgggggcctgagccacagctccatctcccgcctcaaggagacccacagccacgttagccctgagaccatcaagctctgggagggtctcacggaactagtgacggcgacaggcaactatggcaactaccggcgtcggctggcagcctgtgtgggcttccgcttcccgatcctgggtgtgcacctcaaggacctggtggccctgcagctggcactgcctgactggctggacccagcccggacccggctcaacggggccaagatgaagcagctctttagcatcctggaggagctggccatggtgaccagcctgcggccaccagtacaggccaaccccgacctgctgagcctgctcacggtgtctctggatcagtatcagacggaggatgagctgtaccagctgtccctgcagcgggagccgcgctccaagtcctcgccaaccagccccacgagttgcaccccaccaccccggcccccggtactggaggagtggacctcggctgccaaacccaagctggatcaggccctcgtggtggagcacatcgagaagatggtggagtctgtgttccggaactttgacgtcgatggggatggccacatctcacaggaagaattccagatcatccgtgggaacttcccttacctcagcgcctttggggacctcgaccagaaccaggatggctgcatcagcagggaggagatggtttcctatttcctgcgctccagctctgtgttgggggggcgcatgggcttcgtacacaacttccaggagagcaactccttgcgccccgtcgcctgccgccactgcaaagccctgatcctgggcatctacaagcagggcctcaaatgccgagcctgtggagtgaactgccacaagcagtgcaaggatcgcctgtcagttgagtgtcggcgcagggcccagagtgtgagcctggaggggtctgcaccctcaccctcacccatgcacagccaccatcaccgcgccttcagcttctctctgccccgccctggcaggcgaggctccaggcctccagagatccgtgaggaggaggtacagacggtggaggatggggtgtttgacatccacttgtaatagatgctgtggttggatcaaggactcattcctgccttggagaaaatacttcaaccagagcagggagcctgggggtgtcggggcaggaggctggggatgggggtgggatatgagggtggcatgcagctgagggcagggccagggctggtgtccctaaggttgtacagactcttgtgaatatttgtattttccagatggaataaaaaggcccgtgtaattaaccttca

SEQ ID NO: 306083 - DNA, 2254 bp, Homo sapiens
ggcggggagcggggccgcggcgtggagagcgggcgggagccgcagccgcagcgaggccggcgggcgggagcgcacggaggtggggtcggccaggccggtgcgggctccttgcggcaggtcccaagagggttcggtccgagcccggtgggaggctcccggagcgcagcctgggcccagcccaccccgcgccggcggccatggcaggcaccctggacctggacaagggctgcacggtggaggagctgctccgcgggtgcatcgaagccttcgatgactccgggaaggtgcgggacccgcagctggtgcgcatgttcctcatgatgcacccctggtacatcccctcctctcagctggcggccaagctgctccacatctaccaacaatcccggaaggacaactccaattccctgcaggtgaaaacgtgccacctggtcaggtactggatctccgccttcccagcggagtttgacttgaacccggagttggctgagcagatcaaggagctgaaggctctgctagaccaagaagggaaccgacggcacagcagcctaatcgacatagacagcgtccctacctacaagtggaagcggcaggtgactcagcggaaccctgtgggacagaaaaagcgcaagatgtccctgttgtttgaccacctggagcccatggagctggcggagcatctcacctacttggagtatcgctccttctgcaagatcctgtttcaggactatcacagtttcgtgactcatggctgcactgtggacaaccccgtcctggagcggttcatctccctcttcaacagcgtctcacagtgggtgcagctcatgatcctcagcaaacccacagccccgcagcgggccctggtcatcacacactttgtccacgtggcggagaagctgctacagctgcagaacttcaacacgctgatggcagtggtcgggggcctgagccacagctccatctcccgcctcaaggagacccacagccacgttagccctgagaccatcaagctctgggagggtctcacggaactagtgacggcgacaggcaactatggcaactaccggcgtcggctggcagcctgtgtgggcttccgcttcccgatcctgggtgtgcacctcaaggacctggtggccctgcagctggcactgcctgactggctggacccagcccggacccggctcaacggggccaagatgaagcagctctttagcatcctggaggagctggccatggtgaccagcctgcggccaccagtacaggccaaccccgacctgctgagcctgctcacggtgtctctggatcagtatcagacggaggatgagctgtaccagctgtccctgcagcgggagccgcgctccaagtcctcgccaaccagccccacgagttgcaccccaccaccccggcccccggtactggaggagtggacctcggctgccaaacccaagctggatcaggccctcgtggtggagcacatcgagaagatggtggagtctgtgttccggaactttgacgtcgatggggatggccacatctcacaggaagaattccagatcatccgtgggaacttcccttacctcagcgcctttggggacctcgaccagaaccaggatggctgcatcagcagggaggagatggtttcctatttcctgcgctccagctctgtgttgggggggcgcatgggcttcgtacacaacttccaggagagcaactccttgcgccccgtcgcctgccgccactgcaaagccctgatcctgggcatctacaagcagggcctcaaatgccgagcctgtggagtgaactgccacaagcagtgcaaggatcgcctgtcagttgagtgtcggcgcagggcccagagtgtgagcctggaggggtctgcaccctcaccctcacccatgcacagccaccatcaccgcgccttcagcttctctctgccccgccctggcaggcgaggctccaggcctccagagatccgtgaggaggaggtacagacggtggaggatggggtgtttgacatccacttgtaatagatgctgtggttggatcaaggactcattcctgccttggagaaaatacttcaaccagagcagggagcctgggggtgtcggggcaggaggctggggatgggggtgggatatgagggtggcatgcagctgagggcagggccagggctggtgtccctaaggttgtacagactcttgtgaatatttgtattttccagatggaataaaaaggcccgtgtaattaaccttca

SEQ ID NO: 306084 - DNA, 2196 bp, Homo sapiens
taagctgccgcagggaccgccgcgtgcggggcgagagggagcccccggtgggggtggcgcagccggcggggttcggtccgagcccggtgggaggctcccggagcgcagcctgggcccagcccaccccgcgccggcggccatggcaggcaccctggacctggacaagggctgcacggtggaggagctgctccgcgggtgcatcgaagccttcgatgactccgggaaggtgcgggacccgcagctggtgcgcatgttcctcatgatgcacccctggtacatcccctcctctcagctggcggccaagctgctccacatctaccaacaatcccggaaggacaactccaattccctgcaggtgaaaacgtgccacctggtcaggtactggatctccgccttcccagcggagtttgacttgaacccggagttggctgagcagatcaaggagctgaaggctctgctagaccaagaagggaaccgacggcacagcagcctaatcgacatagacagcgtccctacctacaagtggaagcggcaggtgactcagcggaaccctgtgggacagaaaaagcgcaagatgtccctgttgtttgaccacctggagcccatggagctggcggagcatctcacctacttggagtatcgctccttctgcaagatcctgtttcaggactatcacagtttcgtgactcatggctgcactgtggacaaccccgtcctggagcggttcatctccctcttcaacagcgtctcacagtgggtgcagctcatgatcctcagcaaacccacagccccgcagcgggccctggtcatcacacactttgtccacgtggcggagaagctgctacagctgcagaacttcaacacgctgatggcagtggtcgggggcctgagccacagctccatctcccgcctcaaggagacccacagccacgttagccctgagaccatcaagctctgggagggtctcacggaactagtgacggcgacaggcaactatggcaactaccggcgtcggctggcagcctgtgtgggcttccgcttcccgatcctgggtgtgcacctcaaggacctggtggccctgcagctggcactgcctgactggctggacccagcccggacccggctcaacggggccaagatgaagcagctctttagcatcctggaggagctggccatggtgaccagcctgcggccaccagtacaggccaaccccgacctgctgagcctgctcacggtgtctctggatcagtatcagacggaggatgagctgtaccagctgtccctgcagcgggagccgcgctccaagtcctcgccaaccagccccacgagttgcaccccaccaccccggcccccggtactggaggagtggacctcggctgccaaacccaagctggatcaggccctcgtggtggagcacatcgagaagatggtggagtctgtgttccggaactttgacgtcgatggggatggccacatctcacaggaagaattccagatcatccgtgggaacttcccttacctcagcgcctttggggacctcgaccagaaccaggatggctgcatcagcagggaggagatggtttcctatttcctgcgctccagctctgtgttgggggggcgcatgggcttcgtacacaacttccaggagagcaactccttgcgccccgtcgcctgccgccactgcaaagccctgatcctgggcatctacaagcagggcctcaaatgccgagcctgtggagtgaactgccacaagcagtgcaaggatcgcctgtcagttgagtgtcggcgcagggcccagagtgtgagcctggaggggtctgcaccctcaccctcacccatgcacagccaccatcaccgcgccttcagcttctctctgccccgccctggcaggcgaggctccaggcctccagagatccgtgaggaggaggtacagacggtggaggatggggtgtttgacatccacttgtaatagatgctgtggttggatcaaggactcattcctgccttggagaaaatacttcaaccagagcagggagcctgggggtgtcggggcaggaggctggggatgggggtgggatatgagggtggcatgcagctgagggcagggccagggctggtgtccctaaggttgtacagactcttgtgaatatttgtattttccagatggaataaaaaggcccgtgtaattaaccttca

SEQ ID NO: 306085 - DNA, 2662 bp, Homo sapiens
ggcggaggacctccacggtgcacccagcttttcccagccaccttccagcggggccctcccccgcgtacccccatttggcagatgagaaaattgaggctcccagaggccaagtgattctcaaggtcacacgaggaagcggtagagccaggcggggacggctctgggtggctcttaggaaaagtccgcctgagaactccgtacaggagctcccctgtcctccagcctgggggagtgagtatgtgtagggccggggtacctttccgtggggcaaggctctgccaaaatctgggagtgaggggagtcagggagctggggccgcagggcgggccctgcaccgcaaatgggaggggggcgacggaatgggcgtgcgcacccatgggggtgtgtgcatgtgtgtgggagtgtacatgcgtggagaggcactgccttgcgtgtgtgcacacgtgtgaggatgtcagcgcctgtgtggccgcgggactcaaggctggcctggctcaagtgaacagcacgtccaggaggcgacctcgtccgcgggggttcggtccgagcccggtgggaggctcccggagcgcagcctgggcccagcccaccccgcgccggcggccatggcaggcaccctggacctggacaagggctgcacggtggaggagctgctccgcgggtgcatcgaagccttcgatgactccgggaaggtgcgggacccgcagctggtgcgcatgttcctcatgatgcacccctggtacatcccctcctctcagctggcggccaagctgctccacatctaccaacaatcccggaaggacaactccaattccctgcaggtgaaaacgtgccacctggtcaggtactggatctccgccttcccagcggagtttgacttgaacccggagttggctgagcagatcaaggagctgaaggctctgctagaccaagaagggaaccgacggcacagcagcctaatcgacatagacagcgtccctacctacaagtggaagcggcaggtgactcagcggaaccctgtgggacagaaaaagcgcaagatgtccctgttgtttgaccacctggagcccatggagctggcggagcatctcacctacttggagtatcgctccttctgcaagatcctgtttcaggactatcacagtttcgtgactcatggctgcactgtggacaaccccgtcctggagcggttcatctccctcttcaacagcgtctcacagtgggtgcagctcatgatcctcagcaaacccacagccccgcagcgggccctggtcatcacacactttgtccacgtggcggagaagctgctacagctgcagaacttcaacacgctgatggcagtggtcgggggcctgagccacagctccatctcccgcctcaaggagacccacagccacgttagccctgagaccatcaagctctgggagggtctcacggaactagtgacggcgacaggcaactatggcaactaccggcgtcggctggcagcctgtgtgggcttccgcttcccgatcctgggtgtgcacctcaaggacctggtggccctgcagctggcactgcctgactggctggacccagcccggacccggctcaacggggccaagatgaagcagctctttagcatcctggaggagctggccatggtgaccagcctgcggccaccagtacaggccaaccccgacctgctgagcctgctcacggtgtctctggatcagtatcagacggaggatgagctgtaccagctgtccctgcagcgggagccgcgctccaagtcctcgccaaccagccccacgagttgcaccccaccaccccggcccccggtactggaggagtggacctcggctgccaaacccaagctggatcaggccctcgtggtggagcacatcgagaagatggtggagtctgtgttccggaactttgacgtcgatggggatggccacatctcacaggaagaattccagatcatccgtgggaacttcccttacctcagcgcctttggggacctcgaccagaaccaggatggctgcatcagcagggaggagatggtttcctatttcctgcgctccagctctgtgttgggggggcgcatgggcttcgtacacaacttccaggagagcaactccttgcgccccgtcgcctgccgccactgcaaagccctgatcctgggcatctacaagcagggcctcaaatgccgagcctgtggagtgaactgccacaagcagtgcaaggatcgcctgtcagttgagtgtcggcgcagggcccagagtgtgagcctggaggggtctgcaccctcaccctcacccatgcacagccaccatcaccgcgccttcagcttctctctgccccgccctggcaggcgaggctccaggcctccagagatccgtgaggaggaggtacagacggtggaggatggggtgtttgacatccacttgtaatagatgctgtggttggatcaaggactcattcctgccttggagaaaatacttcaaccagagcagggagcctgggggtgtcggggcaggaggctggggatgggggtgggatatgagggtggcatgcagctgagggcagggccagggctggtgtccctaaggttgtacagactcttgtgaatatttgtattttccagatggaataaaaaggcccgtgtaattaaccttca

SEQ ID NO: 306086 - DNA, 1855 bp, Homo sapiens
tgggtggtgggagatgaggaggagttgctgggactgggaacattcgtgcctaggacagtgcctcgcattatgtaggttctcagtaagcgtgaatggtgtgtctgtgtgagtggggggccacgaggcatgcgcatgtccagcaaagggctcactacccctgcccccccagccctacctacaagtggaagcggcaggtgactcagcggaaccctgtgggacagaaaaagcgcaagatgtccctgttgtttgaccacctggagcccatggagctggcggagcatctcacctacttggagtatcgctccttctgcaagatcctgtttcaggactatcacagtttcgtgactcatggctgcactgtggacaaccccgtcctggagcggttcatctccctcttcaacagcgtctcacagtgggtgcagctcatgatcctcagcaaacccacagccccgcagcgggccctggtcatcacacactttgtccacgtggcggagaagctgctacagctgcagaacttcaacacgctgatggcagtggtcgggggcctgagccacagctccatctcccgcctcaaggagacccacagccacgttagccctgagaccatcaagctctgggagggtctcacggaactagtgacggcgacaggcaactatggcaactaccggcgtcggctggcagcctgtgtgggcttccgcttcccgatcctgggtgtgcacctcaaggacctggtggccctgcagctggcactgcctgactggctggacccagcccggacccggctcaacggggccaagatgaagcagctctttagcatcctggaggagctggccatggtgaccagcctgcggccaccagtacaggccaaccccgacctgctgagcctgctcacggtgtctctggatcagtatcagacggaggatgagctgtaccagctgtccctgcagcgggagccgcgctccaagtcctcgccaaccagccccacgagttgcaccccaccaccccggcccccggtactggaggagtggacctcggctgccaaacccaagctggatcaggccctcgtggtggagcacatcgagaagatggtggagtctgtgttccggaactttgacgtcgatggggatggccacatctcacaggaagaattccagatcatccgtgggaacttcccttacctcagcgcctttggggacctcgaccagaaccaggatggctgcatcagcagggaggagatggtttcctatttcctgcgctccagctctgtgttgggggggcgcatgggcttcgtacacaacttccaggagagcaactccttgcgccccgtcgcctgccgccactgcaaagccctgatcctgggcatctacaagcagggcctcaaatgccgagcctgtggagtgaactgccacaagcagtgcaaggatcgcctgtcagttgagtgtcggcgcagggcccagagtgtgagcctggaggggtctgcaccctcaccctcacccatgcacagccaccatcaccgcgccttcagcttctctctgccccgccctggcaggcgaggctccaggcctccagagatccgtgaggaggaggtacagacggtggaggatggggtgtttgacatccacttgtaatagatgctgtggttggatcaaggactcattcctgccttggagaaaatacttcaaccagagcagggagcctgggggtgtcggggcaggaggctggggatgggggtgggatatgagggtggcatgcagctgagggcagggccagggctggtgtccctaaggttgtacagactcttgtgaatatttgtattttccagatggaataaaaaggcccgtgtaattaaccttca

SEQ ID NO: 306087 - DNA, 1736 bp, Homo sapiens
ggtgtgaatcccatgtctccatcaagttgagtcacaacccccattccccaggaggacctgaaacataagcggcaggtgactcagcggaaccctgtgggacagaaaaagcgcaagatgtccctgttgtttgaccacctggagcccatggagctggcggagcatctcacctacttggagtatcgctccttctgcaagatcctgtttcaggactatcacagtttcgtgactcatggctgcactgtggacaaccccgtcctggagcggttcatctccctcttcaacagcgtctcacagtgggtgcagctcatgatcctcagcaaacccacagccccgcagcgggccctggtcatcacacactttgtccacgtggcggagaagctgctacagctgcagaacttcaacacgctgatggcagtggtcgggggcctgagccacagctccatctcccgcctcaaggagacccacagccacgttagccctgagaccatcaagctctgggagggtctcacggaactagtgacggcgacaggcaactatggcaactaccggcgtcggctggcagcctgtgtgggcttccgcttcccgatcctgggtgtgcacctcaaggacctggtggccctgcagctggcactgcctgactggctggacccagcccggacccggctcaacggggccaagatgaagcagctctttagcatcctggaggagctggccatggtgaccagcctgcggccaccagtacaggccaaccccgacctgctgagcctgctcacggtgtctctggatcagtatcagacggaggatgagctgtaccagctgtccctgcagcgggagccgcgctccaagtcctcgccaaccagccccacgagttgcaccccaccaccccggcccccggtactggaggagtggacctcggctgccaaacccaagctggatcaggccctcgtggtggagcacatcgagaagatggtggagtctgtgttccggaactttgacgtcgatggggatggccacatctcacaggaagaattccagatcatccgtgggaacttcccttacctcagcgcctttggggacctcgaccagaaccaggatggctgcatcagcagggaggagatggtttcctatttcctgcgctccagctctgtgttgggggggcgcatgggcttcgtacacaacttccaggagagcaactccttgcgccccgtcgcctgccgccactgcaaagccctgatcctgggcatctacaagcagggcctcaaatgccgagcctgtggagtgaactgccacaagcagtgcaaggatcgcctgtcagttgagtgtcggcgcagggcccagagtgtgagcctggaggggtctgcaccctcaccctcacccatgcacagccaccatcaccgcgccttcagcttctctctgccccgccctggcaggcgaggctccaggcctccagagatccgtgaggaggaggtacagacggtggaggatggggtgtttgacatccacttgtaatagatgctgtggttggatcaaggactcattcctgccttggagaaaatacttcaaccagagcagggagcctgggggtgtcggggcaggaggctggggatgggggtgggatatgagggtggcatgcagctgagggcagggccagggctggtgtccctaaggttgtacagactcttgtgaatatttgtattttccagatggaataaaaaggcccgtgtaattaaccttca

SEQ ID NO: 306088 - DNA, 1278 bp, Homo sapiens
gtgggggtatgactcctctgtcctttgtccccagctctgggagggtctcacggaactagtgacggcgacaggcaactatggcaactaccggcgtcggctggcagcctgtgtgggcttccgcttcccgatcctgggtgtgcacctcaaggacctggtggccctgcagctggcactgcctgactggctggacccagcccggacccggctcaacggggccaagatgaagcagctctttagcatcctggaggagctggccatggtgaccagcctgcggccaccagtacaggccaaccccgacctgctgagcctgctcacggtgtctctggatcagtatcagacggaggatgagctgtaccagctgtccctgcagcgggagccgcgctccaagtcctcgccaaccagccccacgagttgcaccccaccaccccggcccccggtactggaggagtggacctcggctgccaaacccaagctggatcaggccctcgtggtggagcacatcgagaagatggtggagtctgtgttccggaactttgacgtcgatggggatggccacatctcacaggaagaattccagatcatccgtgggaacttcccttacctcagcgcctttggggacctcgaccagaaccaggatggctgcatcagcagggaggagatggtttcctatttcctgcgctccagctctgtgttgggggggcgcatgggcttcgtacacaacttccaggagagcaactccttgcgccccgtcgcctgccgccactgcaaagccctgatcctgggcatctacaagcagggcctcaaatgccgagcctgtggagtgaactgccacaagcagtgcaaggatcgcctgtcagttgagtgtcggcgcagggcccagagtgtgagcctggaggggtctgcaccctcaccctcacccatgcacagccaccatcaccgcgccttcagcttctctctgccccgccctggcaggcgaggctccaggcctccagagatccgtgaggaggaggtacagacggtggaggatggggtgtttgacatccacttgtaatagatgctgtggttggatcaaggactcattcctgccttggagaaaatacttcaaccagagcagggagcctgggggtgtcggggcaggaggctggggatgggggtgggatatgagggtggcatgcagctgagggcagggccagggctggtgtccctaaggttgtacagactcttgtgaatatttgtattttccagatggaataaaaaggcccgtgtaattaaccttca

SEQ ID NO: 306089 - DNA, 1887 bp, Homo sapiens
cgatttcattcctcgctccccacaggtccctctccccaaaatattcccatcttgtcctagcccatcccccagactatctcaaggaccagctgtccccacgcccccgacctccactaggcctgtgccacccgctgcctgcaggaagacgcccggtcccgggccgggttagccccatgggaacgcagcgcctgtgtggccgcgggactcaaggctggcctggctcaagtgaacagcacgtccaggaggcgacctcgtccgcgggtttgcattctggggtggacgagctgggggttcggtccgagcccggtgggaggctcccggagcgcagcctgggcccagcccaccccgcgccggcggccatggcaggcaccctggacctggacaagggctgcacggtggaggagctgctccgcgggtgcatcgaagccttcgatgactccgggaaggtgcgggacccgcagctggtgcgcatgttcctcatgatgcacccctggtacatcccctcctctcagctggcggccaagctgctccacatctaccaacaatcccggaaggacaactccaattccctgcaggtgaaaacgtgccacctggtcaggtactggatctccgccttcccagcggagtttgacttgaacccggagttggctgagcagatcaaggagctgaaggctctgctagaccaagaagggaaccgacggcacagcagcctaatcgacatagacagcgtccctacctacaagtggaagcggcaggtgactcagcggaaccctgtgggacagaaaaagcgcaagatgtccctgttgtttgaccacctggagcccatggagctggcggagcatctcacctacttggagtatcgctccttctgcaagatcctgtttcaggactatcacagtttcgtgactcatggctgcactgtggacaaccccgtcctggagcggttcatctccctcttcaacagcgtctcacagtgggtgcagctcatgatcctcagcaaacccacagccccgcagcgggccctggtcatcacacactttgtccacgtggcggagaagctgctacagctgcagaacttcaacacgctgatggcagtggtcgggggcctgagccacagctccatctcccgcctcaaggagacccacagccacgttagccctgagaccatcaagctctgggagggtctcacggaactagtgacggcgacaggcaactatggcaactaccggcgtcggctggcagcctgtgtgggcttccgcttcccgatcctgggtgtgcacctcaaggacctggtggccctgcagctggcactgcctgactggctggacccagcccggacccggctcaacggggccaagatgaagcagctctttagcatcctggaggagctggccatggtgaccagcctgcggccaccagtacaggccaaccccgacctgctgagcctgctcacggtgtctctggatcagtatcagacggaggatgagctgtaccagctgtccctgcagcgggagccgcgctccaagtcctcgccaacagcccacgaggttgaccccaacaccccgggcccgggtactgacggagtggactcggtgcaaaccaagtggatcaggcctcgggggagcaatcgagaagaaggggagctcggaccgaattgcgtgatgggcaggcacatctctcatgaaatccgacctccgggaatgctactacgccttggacccacaccaacagaggttgcacacgaggaagagtcaaaccgcccaaccgtatgggcaggcacacaagatacacgccacaccaacaaacgagagaaaaggcacagcaggaaacgaacgaagcggaggagagacacaacaaacacacagaaactggatggagagtgatgac

SEQ ID NO: 306090 - DNA, 1058 bp, Homo sapiens
ggcggaggacctccacggtgcacccagcttttcccagccaccttccagcggggccctcccccgcgtacccccatttggcagatgagaaaattgaggctcccagaggccaagtgattctcaaggtcacacgaggaagcggtagagccaggcggggacggctctgggtggctcttaggaaaagtccgcctgagaactccgtacaggagctcccctgtcctccagcctgggggagtgagtatgtgtagggccggggtacctttccgtggggcaaggctctgccaaaatctgggagtgaggggagtcagggagctggggccgcagggcgggccctgcaccgcaaatgggaggggggcgacggaatgggcgtgcgcacccatgggggtgtgtgcatgtgtgtgggagtgtacatgcgtggagaggcactgccttgcgtgtgtgcacacgtgtgaggatgtcagcgcctgtgtggccgcgggactcaaggctggcctggctcaagtgaacagcacgtccaggaggcgacctcgtccgcgggggttcggtccgagcccggtgggaggctcccggagcgcagcctgggcccagcccaccccgcgccggcggccatggcaggcaccctggacctggacaagggctgcacggtggaggagctgctccgcgggtgcatcgaagccttcgatgactccgggaaggtgcgggacccgcagctggtgcgcatgttcctcatgatgcacccctggtacatcccctcctctcagctggcggccaagctgctccacatctaccaacaatcccggaaggacaactccaattccctgcaggtgaaaacgtgccacctggtcaggtactggatctccgccttcccagcggagtttgacttgaacccggagttggctgagcagatcaaggagctgaaggctctgctagaccaagaagggaaccgacggcacagcagcctaatcgacatagacagcgtgtgcgtggggggagcacagagggctgggggggcactcagtatcctataccatctgtgcttaataaatgtctgttgaactgaa

SEQ ID NO: 306091 - DNA, 981 bp, Homo sapiens
ggcggaggacctccacggtgcacccagcttttcccagccaccttccagcggggccctcccccgcgtacccccatttggcagatgagaaaattgaggctcccagaggccaagtgattctcaaggtcacacgaggaagcggtagagccaggcggggacggctctgggtggctcttaggaaaagtccgcctgagaactccgtacaggagctcccctgtcctccagcctgggggagtgagtatgtgtagggccggggtacctttccgtggggcaaggctctgccaaaatctgggagtgaggggagtcagggagctggggccgcagggcgggccctgcaccgcaaatgggaggggggcgacggaatgggcgtgcgcacccatgggggtgtgtgcatgtgtgtgggagtgtacatgcgtggagaggcactgccttgcgtgtgtgcacacgtgtgaggatgtcagcgcctgtgtggccgcgggactcaaggctggcctggctcaagtgaacagcacgtccaggaggcgacctcgtccgcgggggttcggtccgagcccggtgggaggctcccggagcgcagcctgggcccagcccaccccgcgccggcggccatggcaggcaccctggacctggacaagggctgcacggtggaggagctgctccgcgggtgcatcgaagccttcgctggcggccttaaccctctccttcacctaccaacaatcccggaaggacaactccaattccctgcaggtgaaaacgtgccacctggtcaggtactggatctccgccttcccagcggagtttgacttgaacccggagttggctgagcagatcaaggagctgaaggctctgctagaccaagaagggaaccgacggcacagcagcctaatcgacatagacagcgtgtgcgtggggggagcacagagggctgggggggcactcagtatcctataccatctgtgcttaataaatgtctgttgaactgaa

SEQ ID NO: 306092 - DNA, 1329 bp, Homo sapiens
ggcggaggacctccacggtgcacccagcttttcccagccaccttccagcggggccctcccccgcgtacccccatttggcagatgagaaaattgaggctcccagaggccaagtgattctcaaggtcacacgaggaagcggtagagccaggcggggacggctctgggtggctcttaggaaaagtccgcctgagaactccgtacaggagctcccctgtcctccagcctgggggagtgagtatgtgtagggccggggtacctttccgtggggcaaggctctgccaaaatctgggagtgaggggagtcagggagctggggccgcagggcgggccctgcaccgcaaatgggaggggggcgacggaatgggcgtgcgcacccatgggggtgtgtgcatgtgtgtgggagtgtacatgcgtggagaggcactgccttgcgtgtgtgcacacgtgtgaggatgtcagcgcctgtgtggccgcgggactcaaggctggcctggctcaagtgaacagcacgtccaggaggcgacctcgtccgcgggggttcggtccgagcccggtgggaggctcccggagcgcagcctgggcccagcccaccccgcgccggcggccatggcaggcaccctggacctggacaagggctgcacggtggaggagctgctccgcgggtgcatcgaagccttcgatgactccgggaaggtgcgggacccgcagctggtgcgcatgttcctcatgatgcacccctggtacatcccctcctctcagctggcggccaagctgctccacatctaccaacaatcccggaaggacaactccaattccctgcaggtgaaaacgtgccacctggtcaggtactggatctccgccttcccagcggagtttgacttgaacccggagttggctgagcagatcaaggagctgaaggctctgctagaccaagaagggaaccgacggcacagcagcctaatcgacatagacagcgtgtgcgtggggggagcacagagggctgggggggcactcagtatcctataccatctgtgcttaataaatgtctgttgaactgaaaaaaaaatataatgaaagttaaagcagtgttctagcacttggagcgacggatcggcccgtacagagccgagcgcgtacgggttggtctcgatagccgtcgatctcagggggcggcgtccccaatgacgtacgccctcggtttacgttgctttaacgagggggcctgtagctgtccgcggggctatcgcgaattcgtaccctttttccggcgggggtccagcgggatttccgcgtattagatggtccgctaggtggccgcttatctgaccct

SEQ ID NO: 306093 - DNA, 1188 bp, Homo sapiens
gtggctgtcttcgtggaagcaattcagtagcagagcttcccaaatcattcctcctgttcaggtgttccattgcctaaagaggagaacatttctgctcccttgatctccagctccccagtgaaggcagcccgggagtatgaagatccccctagtgaagaggaagataaaataaaagaagaacctttaaccatctctgaactagtgtacaacccaagtgccagcctgctccccacccctgtggatgacgatgagattgacatgctctttgactgtccttctaggcttgagttggaaagagaagacacagattcatttgaggatctggaagcagatgaaaacgcctttttgattgctgaagaagaggagctgaaggaggctcgccgtgctttgtcgtggagctatgacattctgactggccatattcgggtgaacccactggtcaagagtttttccaggctccttgtggtgggcctgggactgctgctctttgtatttcccctgctcctcctccttttggagtcaggtattgatctctccttcttatgcgaaatccgccagacaccagagtttgagcagtttcactatgaatactactgtcccctcaaggagtgggtggctgggaaagtccacctcatcctctacatgctgggttgctcatgaagttaatctctcacgtgactaagggctatattcaatgctagtgatttctttttttcagcaaatgcctggttctgaagggtcacggggctgtcaacaggtgttccttactcataattgattattcaaacctttaagttagctttccataattcactgcacttaaataagtttaaatcaaatacagttattttagttacaggttaggaagatggtctttaaataaccaaaaatatgtttattttttattatagtgtagacatacccttcatctattatatcataatacatgttacattggactgaattagattttcccatttctaatagttggcaccattataagctataaggttcagaatcagaattttagtaacaactcaagagaaagttgttgaatataatccttagtgaaaacagtgtcctctaaccaatgcctatacaactaaatttatgctgggtttttggttttgtttttttaaaaatatttttatgtgttcaaactattttggtaaatttttagcaaaaaaa

SEQ ID NO: 306094 - DNA, 1156 bp, Homo sapiens
ggctagagtagggatgatgcataatctttcattgtttgttagaggggtgagtggagagtttaaaaatagcgtcccctccctcctcccctcccaatgctgatccctcatgagttatttctgttggccgcattaggaacctgacatttgattcattcagtgggtcctgcctaggtcctttaaaacagaatggactgttagggaaaggctgccctgggccatgcaggccgaggagaccaaggggattggaataaccagtatggcaaaatgcttggtcaagatccagactcgacgaagcctccaattgcacatggtgaaccactgcaacagtaatgtgtttgttcgtctgctgagactcggctccaaggtcacagctcgtaacactggtgttccattgcctaaagaggagaacatttctgctcccttgatctccagctccccagtgaaggcagcccgggagtatgaagatccccctagtgaagaggaagataaaataaaagaagaacctttaaccatctctgaactagtgtacaacccaagtgccagcctgctccccacccctgtggatgacgatgagattgacatgctctttgactgtccttctaggcttgagttggaaagagaagacacagattcatttgaggatctggaagcagatgaaaacgcctttttgattgctgaagaagaggagctgaaggaggctcgccgtgctttgtcgtggagctatgacattctgactggccatattcgggtgaacccactggtcaagagtttttccaggctccttgtggtgggcctgggactgctgctctttgtatttcccctgctcctcctccttttggagtcagtctccatgcagtaaacagacccagcagaacctgcccgtggtgagctcagccaagacttggctctccatgttccagcctccgtctgtgactgggtgggtaagttcggtgggccccacccagtgggctcggcagccgtcacttcacagaagaagaaaggaaccttgcttaggcctcagatcccagctgtgctctccaatccattaataaagctgcttttaaccctctcctggccattgtatctattatctactgggaactggggtggcggcagggatggtggtgaatattttggatctcggcaacctccaatg

SEQ ID NO: 306095 - DNA, 438 bp, Homo sapiens
ttgagtccctctgggccactctctacagggtggagacaatgtgctgaaggtcgctgcttacttgtcctcctgcttcttttctctctccctctctccttttctcttggacctgcatctgggcttccagtctccatgcagtaaacagacccagcagaacctgcccgtggtgagctcagccaagacttggctctccatgttccagcctccgtctgtgactgggtgggtaagttcggtgggccccacccagtgggctcggcagccgtcacttcacagaagaagaaaggaaccttgcttaggcctcagatcccagctgtgctctccaatccattaataaagctgcttttaaccctctcctggccattgtatctattatctactgggaactggggtggcggcagggatggtggtgaatattttggatctcggcaacctccaatg

SEQ ID NO: 306096 - DNA, 2536 bp, Homo sapiens
agggggcgaggcggaggcgagcgaacagagggagggacccgcccgccgcgccccggccgctgggcatgtgtgtccgcaggcgcccgacgctgccgatgtcccggggctgagccgcgcccaggtgtcccggacagtgcgtgcgagcgtgtgtgtccgcgcaggcgagcaccgcgccggccctgagcctcccgctcgctccccacggccgcggtgcatgttcgcctcctgccactgtgtgccgagaggcaggaggaccatgaaaatgatccactttcggagctccagcgtcaaatcgctcagccaggagatgagatgcaccatccggctgctggacgactcggagatctcctgccacatccagagggaaaccaaagggcagtttctcattgaccacatctgcaactactacagcctgctggagaaggactactttggcattcgctatgtggacccagagaagcaaaggcactggcttgaacctaacaagtccatcttcaagcaaatgaaaactcatccaccatacaccatgtgctttagagtgaaattctacccacatgaacccttgaagattaaagaagagctcacaagataccttttataccttcagattaaaagggacatttttcatggccgcctgctgtgctccttttctgatgctgcctacctgggtgcctgtattgttcaagctgagcttggtgattacgatcctgatgagcatcctgagaattacatcagtgagtttgagattttccccaagcagtcacagaagctggaaagaaaaatagtggaaattcataacaatgaactcagggggcagagcccaccagttgctgaatttaacttgctcctgaaagctcacactttggaaacctacggggtggatcctcacccatgcaaggattcaacaggcacaacaacatttttaggattcacagctgcaggctttgtggtctttcagggaaataagagaatccatttgataaaatggccagatgtctgcaaattgaagtttgaagggaagacattttatgtgattggcacccagaaggagaaaaaagccatgttggcattccatacttcaacaccagctgcctgcaaacatctttggaagtgtggagtggaaaaccaggccttttataagtatgcaaaatccagtcagatcaagactgtatcaagcagcaagatattttttaaaggaagtagatttcgatatagtgggaaagttgccaaagaggtggtggaggccagttccaagatccagagggagcctcctgaggtgcacagagccaacattactcagagccgcagttcccactccttgaacaaacagctcatcattaacatggaacccctgcagcccctgcttccttcccccagcgagcaagaagaagaacttcctctgggtgagggtgttccattgcctaaagaggagaacatttctgctcccttgatctccagctccccagtgaaggcagcccgggagtatgaagatccccctagtgaagaggaagataaaataaaagaagaacctttaaccatctctgaactagtgtacaacccaagtgccagcctgctccccacccctgtggatgacgatgagattgacatgctctttgactgtccttctaggcttgagttggaaagagaagacacagattcatttgaggatctggaagcagatgaaaacgcctttttgattgctgaagaagaggagctgaaggaggctcgccgtgctttgtcgtggagctatgacattctgactggccatattcgggtgaacccactggtcaagagtttttccaggctccttgtggtgggcctgggactgctgctctttgtatttcccctgctcctcctccttttggagtcaggtattgatctctccttcttatgcgaaatccgccagacaccagagtttgagcagtttcactatgaatactactgtcccctcaaggagtgggtggctgggaaagtccacctcatcctctacatgctgggttgctcatgaagttaatctctcacgtgactaagggctatattcaatgctagtgatttctttttttcagcaaatgcctggttctgaagggtcacggggctgtcaacaggtgttccttactcataattgattattcaaacctttaagttagctttccataattcactgcacttaaataagtttaaatcaaatacagttattttagttacaggttaggaagatggtctttaaataaccaaaaatatgtttattttttattatagtgtagacatacccttcatctattatatcataatacatgttacattggactgaattagattttcccatttctaatagttggcaccattataagctataaggttcagaatcagaattttagtaacaactcaagagaaagttgttgaatataatccttagtgaaaacagtgtcctctaaccaatgcctatacaactaaatttatgctgggtttttggttttgtttttttaaaaatatttttatgtgttcaaactattttggtaaatttttagcaaaaaaa

SEQ ID NO: 306097 - DNA, 1510 bp, Homo sapiens
ggctagagtagggatgatgcataatctttcattgtttgttagaggggtgagtggagagtttaaaaatagcgtcccctccctcctcccctcccaatgctgatccctcatgagttatttctgttggccgcattaggaacctgacatttgattcattcagtgggtcctgcctaggtcctttaaaacagaatggactgttagggaaaggctgccctgggccatgcaggccgaggagaccaaggggattggaataaccagtatggcaaaatgcttggtcaagatccagactcgacgaagcctccaattgcacatggtgaaccactgcaacagtaatgtgtttgttcgtctgctgagactcggctccaaggtcacagctcgtaacactggtgttccattgcctaaagaggagaacatttctgctcccttgatctccagctccccagtgaaggcagcccgggagtatgaagatccccctagtgaagaggaagataaaataaaagaagaacctttaaccatctctgaactagtgtacaacccaagtgccagcctgctccccacccctgtggatgacgatgagattgacatgctctttgactgtccttctaggcttgagttggaaagagaagacacagattcatttgaggatctggaagcagatgaaaacgcctttttgattgctgaagaagaggagctgaaggaggctcgccgtgctttgtcgtggagctatgacattctgactggccatattcgggtgaacccactggtcaagagtttttccaggctccttgtggtgggcctgggactgctgctctttgtatttcccctgctcctcctccttttggagtcaggtattgatctctccttcttatgcgaaatccgccagacaccagagtttgagcagtttcactatgaatactactgtcccctcaaggagtgggtggctgggaaagtccacctcatcctctacatgctgggttgctcatgaagttaatctctcacgtgactaagggctatattcaatgctagtgatttctttttttcagcaaatgcctggttctgaagggtcacggggctgtcaacaggtgttccttactcataattgattattcaaacctttaagttagctttccataattcactgcacttaaataagtttaaatcaaatacagttattttagttacaggttaggaagatggtctttaaataaccaaaaatatgtttattttttattatagtgtagacatacccttcatctattatatcataatacatgttacattggactgaattagattttcccatttctaatagttggcaccattataagctataaggttcagaatcagaattttagtaacaactcaagagaaagttgttgaatataatccttagtgaaaacagtgtcctctaaccaatgcctatacaactaaatttatgctgggtttttggttttgtttttttaaaaatatttttatgtgttcaaactattttggtaaatttttagcaaaaaaa

SEQ ID NO: 306098 - DNA, 1836 bp, Homo sapiens
gcttcatttcggaagtgattcatagcacttctgcttacaactctctgatcaggactcatcccaagatcttacccaggatcaaggaaatgcaattctatggtgttcagaagggggcagagcccaccagttgctgaatttaacttgctcctgaaagctcacactttggaaacctacggggtggatcctcacccatgcaaggattcaacaggcacaacaacatttttaggattcacagctgcaggctttgtggtctttcagggaaataagagaatccatttgataaaatggccagatgtctgcaaattgaagtttgaagggaagacattttatgtgattggcacccagaaggagaaaaaagccatgttggcattccatacttcaacaccagctgcctgcaaacatctttggaagtgtggagtggaaaaccaggccttttataagtatgcaaaatccagtcagatcaagactgtatcaagcagcaagatattttttaaaggaagtagatttcgatatagtgggaaagttgccaaagaggtggtggaggccagttccaagatccagagggagcctcctgaggtgcacagagccaacattactcagagccgcagttcccactccttgaacaaacagctcatcattaacatggaacccctgcagcccctgcttccttcccccagcgagcaagaagaagaacttcctctgggtgagggtgttccattgcctaaagaggagaacatttctgctcccttgatctccagctccccagtgaaggcagcccgggagtatgaagatccccctagtgaagaggaagataaaataaaagaagaacctttaaccatctctgaactagtgtacaacccaagtgccagcctgctccccacccctgtggatgacgatgagattgacatgctctttgactgtccttctaggcttgagttggaaagagaagacacagattcatttgaggatctggaagcagatgaaaacgcctttttgattgctgaagaagaggagctgaaggaggctcgccgtgctttgtcgtggagctatgacattctgactggccatattcgggtgaacccactggtcaagagtttttccaggctccttgtggtgggcctgggactgctgctctttgtatttcccctgctcctcctccttttggagtcaggtattgatctctccttcttatgcgaaatccgccagacaccagagtttgagcagtttcactatgaatactactgtcccctcaaggagtgggtggctgggaaagtccacctcatcctctacatgctgggttgctcatgaagttaatctctcacgtgactaagggctatattcaatgctagtgatttctttttttcagcaaatgcctggttctgaagggtcacggggctgtcaacaggtgttccttactcataattgattattcaaacctttaagttagctttccataattcactgcacttaaataagtttaaatcaaatacagttattttagttacaggttaggaagatggtctttaaataaccaaaaatatgtttattttttattatagtgtagacatacccttcatctattatatcataatacatgttacattggactgaattagattttcccatttctaatagttggcaccattataagctataaggttcagaatcagaattttagtaacaactcaagagaaagttgttgaatataatccttagtgaaaacagtgtcctctaaccaatgcctatacaactaaatttatgctgggtttttggttttgtttttttaaaaatatttttatgtgttcaaactattttggtaaatttttagcaaaaaaa

SEQ ID NO: 306099 - DNA, 2182 bp, Homo sapiens
agggggcgaggcggaggcgagcgaacagagggagggacccgcccgccgcgccccggccgctgggcatgtgtgtccgcaggcgcccgacgctgccgatgtcccggggctgagccgcgcccaggtgtcccggacagtgcgtgcgagcgtgtgtgtccgcgcaggcgagcaccgcgccggccctgagcctcccgctcgctccccacggccgcggtgcatgttcgcctcctgccactgtgtgccgagaggcaggaggaccatgaaaatgatccactttcggagctccagcgtcaaatcgctcagccaggagatgagatgcaccatccggctgctggacgactcggagatctcctgccacatccagagggaaaccaaagggcagtttctcattgaccacatctgcaactactacagcctgctggagaaggactactttggcattcgctatgtggacccagagaagcaaaggcactggcttgaacctaacaagtccatcttcaagcaaatgaaaactcatccaccatacaccatgtgctttagagtgaaattctacccacatgaacccttgaagattaaagaagagctcacaagataccttttataccttcagattaaaagggacatttttcatggccgcctgctgtgctccttttctgatgctgcctacctgggtgcctgtattgttcaagctgagcttggtgattacgatcctgatgagcatcctgagaattacatcagtgagtttgagattttccccaagcagtcacagaagctggaaagaaaaatagtggaaattcataacaatgaactcagggggcagagcccaccagttgctgaatttaacttgctcctgaaagctcacactttggaaacctacggggtggatcctcacccatgcaaggattcaacaggcacaacaacatttttaggattcacagctgcaggctttgtggtctttcagggaaataagagaatccatttgataaaatggccagatgtctgcaaattgaagtttgaagggaagacattttatgtgattggcacccagaaggagaaaaaagccatgttggcattccatacttcaacaccagctgcctgcaaacatctttggaagtgtggagtggaaaaccaggccttttataagtatgcaaaatccagtcagatcaagactgtatcaagcagcaagatattttttaaaggaagtagatttcgatatagtgggaaagttgccaaagaggtggtggaggccagttccaagatccagagggagcctcctgaggtgcacagagccaacattactcagagccgcagttcccactccttgaacaaacagctcatcattaacatggaacccctgcagcccctgcttccttcccccagcgagcaagaagaagaacttcctctgggtgagggtgttccattgcctaaagaggagaacatttctgctcccttgatctccagctccccagtgaaggcagcccgggagtatgaagatccccctagtgaagaggaagataaaataaaagaagaacctttaaccatctctgaactagtgtacaacccaagtgccagcctgctccccacccctgtggatgacgatgagattgacatgctctttgactgtccttctaggcttgagttggaaagagaagacacagattcatttgaggatctggaagcagatgaaaacgcctttttgattgctgaagaagaggagctgaaggaggctcgccgtgctttgtcgtggagctatgacattctgactggccatattcgggtgaacccactggtcaagagtttttccaggctccttgtggtgggcctgggactgctgctctttgtatttcccctgctcctcctccttttggagtcagtctccatgcagtaaacagacccagcagaacctgcccgtggtgagctcagccaagacttggctctccatgttccagcctccgtctgtgactgggtgggtaagttcggtgggccccacccagtgggctcggcagccgtcacttcacagaagaagaaaggaaccttgcttaggcctcagatcccagctgtgctctccaatccattaataaagctgcttttaaccctctcctggccattgtatctattatctactgggaactggggtggcggcagggatggtggtgaatattttggatctcggcaacctccaatg

SEQ ID NO: 306100 - DNA, 1569 bp, Homo sapiens
agggggcgaggcggaggcgagcgaacagagggagggacccgcccgccgcgccccggccgctgggcatgtgtgtccgcaggcgcccgacgctgccgatgtcccggggctgagccgcgcccaggtgtcccggacagtgcgtgcgagcgtgtgtgtccgcgcaggcgagcaccgcgccggccctgagcctcccgctcgctccccacggccgcggtgcatgttcgcctcctgccactgtgtgccgagaggcaggaggaccatgaaaatgatccactttcggagctccagcgtcaaatcgctcagccaggagatgagatgcaccatccggctgctggacgactcggagatctcctgccacatccagagggaaaccaaagggcagtttctcattgaccacatctgcaactactacagcctgctggagaaggactactttggcattcgctatgtggacccagagaagcaaaggcactggcttgaacctaacaagtccatcttcaagcaaatgaaaactcatccaccatacaccatgtgctttagagtgaaattctacccacatgaacccttgaagattaaagaagagctcacaagataccttttataccttcagattaaaagggacatttttcatggccgcctgctgtgctccttttctgatgctgcctacctgggtgcctgtattgttcaagctgagcttggtgattacgatcctgatgagcatcctgagaattacatcagtgagtttgagattttccccaagcagtcacagaagctggaaagaaaaatagtggaaattcataacaatgaactcagggggcagagcccaccagttgctgaatttaacttgctcctgaaagctcacactttggaaacctacggggtggatcctcacccatgcaaggattcaacaggcacaacaacatttttaggattcacagctgcaggctttgtggtctttcagggaaataagagaatccatttgataaaatggccagatgtctgcaaattgaagtttgaagggaagacattttatgtgattggcacccagaaggagaaaaaagccatgttggcattccatacttcaacaccagctgcctgcaaacatctttggaagtgtggagtggaaaaccaggccttttataagtatgcaaaatccagtcagatcaagactgtatcaagcagcaagatattttttaaaggaagtagatttcgatatagtgggaaagttgccaaagaggtggtggaggccagttccaagatccagagggagcctcctgaggtgcacagatgtgtacagaagaaaatttgttcctgctttggggtgacttggtgaggagctgtaatgtgaaagtctgcaaaaccaggctatcacactgtaagaagcagaagactacaggatgagagaagctggagaatcttggctccaggcatgttggtgcagatcctgaaagtgcagcctgcccaccaatgagaaaagtctttatggttccctcctcttccccaaattgtacttattcaatgcagcagaaatgaagaggaaatgataaaacatatcattcatctgtttcagaa

SEQ ID NO: 306101 - DNA, 454 bp, Homo sapiens
  misc_feature (40)..(40): n is a, c, g, or t
attccagctcggtttcccttttggggtctttgctgccggncgcggtggcgcgtgcctgtagtcccagctactcgggaggctgaggtgggaggatcgcttgagcccaggagttctgggctgtagtgcgctatgccgatcgggtgtccgcactaagttcggcatcaatatggtgacctcccgggagcgggggaccaccaggttgcctaaggaggggtgaaccggcccaggtcggaaacggagcaggtcaaaactcccgtgctgatcagtagtgggatcgcgcctgtgaatagccactgcactccagcctgagcaacatagcgagaccccgtctcttaagtccctttattgcattcagagaatatataggtatttaaactgtgacaataattttaccttgatacatccaagtttgacttgctttataatatattatagatataaacttagcctcttt

SEQ ID NO: 306102 - DNA, 378 bp, Homo sapiens
  misc_feature (339)..(339): n is a, c, g, or t
gataacatcttatcaggagacttgggccgggcacagtggcgcgtgctggcgcgtgcctgtagtcccagctactcgggaggctgaggtgggaggatcgcttgagcccaggagttctgggctgtagtgcgctatgccgatcgggtgtccgcactaagttcggcatcaatatggtgacctcccgggagcgggggaccaccaggttgcctaaggaggggtgaaccggcccaggtcggaaacggagcaggtcaaaactcccgtgctgatcagtagtgggatcgcgcctgtgaatagccactgcactccagcctgagcaacatagtgaaaccccatctctactanaaatactaaattagccaggtacaatggcagccctgattt

SEQ ID NO: 306103 - DNA, 564 bp, Homo sapiens
caccactcctatagatcagtcacacccaaacattagtaaaagatgaatcacagacataaatttgcaagctcaaacaataaagcatctaaaagaaaatatagaagaatatcatcatgacttctgagcaggcaaaggtttcttagacataaaggtactaatcataaaaacatatatttatgtctctatgtatccaataaagaacactacaaaataatcataataaaacgacaaacaacccagttgttaaatgaacaacagctgggcatggtagtgcactctggcgcgtgcctgtagtcccagctactcgggaggctgaggtgggaggatcgcttgagcccaggagttctgggctgtagtgcgctatgccgatcgggtgtccgcactaagttcggcatcaatatggtgacctcccgggagcgggggaccaccaggttgcctaaggaggggtgaaccggcccaggtcggaaacggagcaggtcaaaactcccgtgctgatcagtagtgggatcgcgcccacaacccacgcgcccacaacccacgcgcccacaacccacgcgcacaacc

SEQ ID NO: 306104 - DNA, 249 bp, Homo sapiens
  misc_feature (248)..(248): n is a, c, g, or t
gataacatcttatcaggagacttgggccgggcacagtggcgcgtgctggcgcgtgcctgtagtcccagctactcgggaggctgaggtgggaggatcgcttgagcccaggagttctgggctgtagtgcgctatgccgatcgggtgtccgcactaagttcggcatcaatatggtgacctcccgggagcgggggaccaccaggttgcctaaggaggggtgaattcagagccaggcctaagttcagagccang

SEQ ID NO: 306105 - DNA, 170 bp, Homo sapiens
  misc_feature (7)..(8): n is a, c, g, or t
  misc_feature (12)..(12): n is a, c, g, or t
tgagatnncccncaaaccccctctcacccacaaaccccttcacccacaaaccccccgatcgggtgtccgcactaagttcggcatcaatatggtgacctcccgggagcgggggaccaccaggttgcctaaggaggggtgaagtttgtgggtgaaaggggggggtaccgagc

SEQ ID NO: 306106 - DNA, 691 bp, Homo sapiens
  misc_feature (184)..(184): n is a, c, g, or t
  misc_feature (188)..(189): n is a, c, g, or t
ctgcgctctcttgcgattatatgaatctttgtcatttcgtatgctcatgcattagtaaaaaaaaaaaatacaatgaagagattacttcattcacaaataagtatcgaattttagtgcttaaaaattaacaaggtgggccgggtgtggtggctcacgcctgtaatcccagcactttgggaggccnaggnnggaggatcacttgaggccaggagttcgagaccagcctggccaacatggtgaaaccccgtctctactaaaaatacaaaaattagccgggcgtggtggcgcgtgcctgtagtcccagctactcgggaggctgaggtgggaggatcgcttgagcccaggagttctgggctgtagtgcgctatgccgatcgggtgtccgcactaagttcggcatcaatatggtgacctcccgggagcgggggaccaccaggttgcctaaggaggggtgaaccggcccaggtcggaaacggagcaggtcaaaactcccgtgctgatcagtagtgggatcgcgcctgtgaatagccactgcactccagcctgagcaacatagcgagaccccgtctcttaagtccctttattgcattcagagaatatataggtatttaaactgtgacaataattttaccttgatacatccaagtttgacttgctttataatatattatagatataaacttagcctcttt

SEQ ID NO: 306107 - DNA, 665 bp, Homo sapiens
  misc_feature (158)..(158): n is a, c, g, or t
  misc_feature (162)..(163): n is a, c, g, or t
aaaaaaaaagccgggcttggtgactcatgcctgtaatcccaaggtgctgagattataggcgtgagccaccacacccggctagttatatgagacttttaaaacataaatgaaccgggcatggtggctcacgcctgtaatcccagcactttgggaggccnaggnnggaggatcacttgaggccaggagttcgagaccagcctggccaacatggtgaaaccccgtctctactaaaaatacaaaaattagccgggcgtggtggcgcgtgcctgtagtcccagctactcgggaggctgaggtgggaggatcgcttgagcccaggagttctgggctgtagtgcgctatgccgatcgggtgtccgcactaagttcggcatcaatatggtgacctcccgggagcgggggaccaccaggttgcctaaggaggggtgaaccggcccaggtcggaaacggagcaggtcaaaactcccgtgctgatcagtagtgggatcgcgcctgtgaatagccactgcactccagcctgagcaacatagcgagaccccgtctcttaagtccctttattgcattcagagaatatataggtatttaaactgtgacaataattttaccttgatacatccaagtttgacttgctttataatatattatagatataaacttagcctcttt

SEQ ID NO: 306108 - DNA, 686 bp, Homo sapiens
  misc_feature (179)..(179): n is a, c, g, or t
  misc_feature (183)..(184): n is a, c, g, or t
gatcattttattcctctgggggtactccccggggggtaccaccagagcaaaggatcgcttgagcctaggcattggagaccagcctgggcaacatactgagaccttatttcttcaaaaaatcccaaacacaggccaggtgtggtggctcacgcctgtaatcccagcactttgggaggccnaggnnggaggatcacttgaggccaggagttcgagaccagcctggccaacatggtgaaaccccgtctctactaaaaatacaaaaattagccgggcgtggtggcgcgtgcctgtagtcccagctactcgggaggctgaggtgggaggatcgcttgagcccaggagttctgggctgtagtgcgctatgccgatcgggtgtccgcactaagttcggcatcaatatggtgacctcccgggagcgggggaccaccaggttgcctaaggaggggtgaaccggcccaggtcggaaacggagcaggtcaaaactcccgtgctgatcagtagtgggatcgcgcctgtgaatagccactgcactccagcctgagcaacatagcgagaccccgtctcttaagtccctttattgcattcagagaatatataggtatttaaactgtgacaataattttaccttgatacatccaagtttgacttgctttataatatattatagatataaacttagcctcttt

SEQ ID NO: 306109 - DNA, 620 bp, Homo sapiens
  misc_feature (113)..(113): n is a, c, g, or t
  misc_feature (117)..(118): n is a, c, g, or t
cctgtactgtgtggcttctcaaatactgctaaggtacagtaagtatttaataagcaaattgtctggtcaggcatggtggctcacgcctgtaatcccagcactttgggaggccnaggnnggaggatcacttgaggccaggagttcgagaccagcctggccaacatggtgaaaccccgtctctactaaaaatacaaaaattagccgggcgtggtggcgcgtgcctgtagtcccagctactcgggaggctgaggtgggaggatcgcttgagcccaggagttctgggctgtagtgcgctatgccgatcgggtgtccgcactaagttcggcatcaatatggtgacctcccgggagcgggggaccaccaggttgcctaaggaggggtgaaccggcccaggtcggaaacggagcaggtcaaaactcccgtgctgatcagtagtgggatcgcgcctgtgaatagccactgcactccagcctgagcaacatagcgagaccccgtctcttaagtccctttattgcattcagagaatatataggtatttaaactgtgacaataattttaccttgatacatccaagtttgacttgctttataatatattatagatataaacttagcctcttt

SEQ ID NO: 306110 - DNA, 614 bp, Homo sapiens
  misc_feature (184)..(184): n is a, c, g, or t
  misc_feature (188)..(189): n is a, c, g, or t
  misc_feature (575)..(575): n is a, c, g, or t
ctgcgctctcttgcgattatatgaatctttgtcatttcgtatgctcatgcattagtaaaaaaaaaaaatacaatgaagagattacttcattcacaaataagtatcgaattttagtgcttaaaaattaacaaggtgggccgggtgtggtggctcacgcctgtaatcccagcactttgggaggccnaggnnggaggatcacttgaggccaggagttcgagaccagcctggccaacatggtgaaaccccgtctctactaaaaatacaaaaattagccgggcgtggtggcgcgtgcctgtagtcccagctactcgggaggctgaggtgggaggatcgcttgagcccaggagttctgggctgtagtgcgctatgccgatcgggtgtccgcactaagttcggcatcaatatggtgacctcccgggagcgggggaccaccaggttgcctaaggaggggtgaaccggcccaggtcggaaacggagcaggtcaaaactcccgtgctgatcagtagtgggatcgcgcctgtgaatagccactgcactccagcctgagcaacatagtgaaaccccatctctactanaaatactaaattagccaggtacaatggcagccctgattt

SEQ ID NO: 306111 - DNA, 741 bp, Homo sapiens
  misc_feature (184)..(184): n is a, c, g, or t
  misc_feature (188)..(189): n is a, c, g, or t
  misc_feature (506)..(506): n is a, c, g, or t
  misc_feature (513)..(513): n is a, c, g, or t
  misc_feature (517)..(517): n is a, c, g, or t
  misc_feature (519)..(519): n is a, c, g, or t
  misc_feature (741)..(741): n is a, c, g, or t
ctgcgctctcttgcgattatatgaatctttgtcatttcgtatgctcatgcattagtaaaaaaaaaaaatacaatgaagagattacttcattcacaaataagtatcgaattttagtgcttaaaaattaacaaggtgggccgggtgtggtggctcacgcctgtaatcccagcactttgggaggccnaggnnggaggatcacttgaggccaggagttcgagaccagcctggccaacatggtgaaaccccgtctctactaaaaatacaaaaattagccgggcgtggtggcgcgtgcctgtagtcccagctactcgggaggctgaggtgggaggatcgcttgagcccaggagttctgggctgtagtgcgctatgccgatcgggtgtccgcactaagttcggcatcaatatggtgacctcccgggagcgggggaccaccaggttgcctaaggaggggtgaaccggcccaggtcggaaacggagcaggtcaaaactcccgtgctgatcagtantgggaancccncntgtaataagcaattgaactccagcctggggccacaaagggagactctgtctcttaagtaaacatagaatattattgattcataaaatcatgattttgaaaattaatgacatgaaaaatatgcacaatatatttcagaaagcaaaatgtataatttcatttaaaaaatgcatagcatggtcccagctttgtgtgtatctggtgccaataaagctcacagcaan

SEQ ID NO: 306112 - DNA, 750 bp, Homo sapiens
  misc_feature (184)..(184): n is a, c, g, or t
  misc_feature (188)..(189): n is a, c, g, or t
  misc_feature (509)..(509): n is a, c, g, or t
ctgcgctctcttgcgattatatgaatctttgtcatttcgtatgctcatgcattagtaaaaaaaaaaaatacaatgaagagattacttcattcacaaataagtatcgaattttagtgcttaaaaattaacaaggtgggccgggtgtggtggctcacgcctgtaatcccagcactttgggaggccnaggnnggaggatcacttgaggccaggagttcgagaccagcctggccaacatggtgaaaccccgtctctactaaaaatacaaaaattagccgggcgtggtggcgcgtgcctgtagtcccagctactcgggaggctgaggtgggaggatcgcttgagcccaggagttctgggctgtagtgcgctatgccgatcgggtgtccgcactaagttcggcatcaatatggtgacctcccgggagcgggggaccaccaggttgcctaaggaggggtgaaccggcccaggtcggaaacggagcaggtcaaaactcccgtgctgatcagtgatgnctcaagaagttttgcaaaggagactagagccttgaagatgaggagtgcagtggccagtcatcggaaattgataatgaccaattgagaacatcaatcgaagctgatcctcttacaactataagagagctgcccaagaactcaatgttgaccattttatggtcgttccggcatttgaagcaaattgaaaaggtgaaaaagctccaataaatggggtgcctcatgaactgagtgaaaaataaaa

SEQ ID NO: 306113 - DNA, 671 bp, Homo sapiens
aaatgtgctcagaacacttacattagcctacagttgggaaaaatcatctaacacaaagcctattttataatgaagtgttgagtattgcatgtaatttactgaacaaatactatactgaagtagtttctactgaatgtgtactgcttttgcaccacaggttgaaaaactgtgtaaatcagaaagtctgcatacaattattagttatttatttcccttgtgttaagaaataaaactggctgggcgctgtggcttacgcctgtaatggcgcgtgcctgtagtcccagctactcgggaggctgaggtgggaggatcgcttgagcccaggagttctgggctgtagtgcgctatgccgatcgggtgtccgcactaagttcggcatcaatatggtgacctcccgggagcgggggaccaccaggttgcctaaggaggggtgaaccggcccaggtcggaaacggagcaggtcaaaactcccgtgctgatcagtagtgggatcgcgcctgtgaatagccactgcactccagcctgagcaacatagcgagaccccgtctcttaagtccctttattgcattcagagaatatataggtatttaaactgtgacaataattttaccttgatacatccaagtttgacttgctttataatatattatagatataaacttagcctcttt

SEQ ID NO: 306114 - DNA, 884 bp, Homo sapiens
acttcttagagaaaaggtgtgtgctggtgtctccaagtctaatgatttcaccagtggattctgcttcatctccatcccaagaggggcccaacatctcagaagacaaggagcacctggaaaagttccctccttcactcagggcccagcctgaccagagggcccttcccctgaggacctggagagctgctgggtgcagaaaaaggaaaagactctcccttttgctgcttagcatgtcttgctgcttatgttttgttttcactgatatatgaatggtagaaatagctgtatataaagtgtcaacgattaaatgtataggagaacagcaaatactggtgactctagggtgtgggagtgaagggggtgggatgctaactttgcattaaatatccttcaattgtttcacttttgcgcttattttgttactttaaaattcttatggaaagaagttcaccaggccgggcatggtagctcactctggcgcgtgcctgtagtcccagctactcgggaggctgaggtgggaggatcgcttgagcccaggagttctgggctgtagtgcgctatgccgatcgggtgtccgcactaagttcggcatcaatatggtgacctcccgggagcgggggaccaccaggttgcctaaggaggggtgaaccggcccaggtcggaaacggagcaggtcaaaactcccgtgctgatcagtagtgggatcgcgcctgtgaatagccactgcactccagcctgagcaacatagcgagaccccgtctcttaagtccctttattgcattcagagaatatataggtatttaaactgtgacaataattttaccttgatacatccaagtttgacttgctttataatatattatagatataaacttagcctcttt

SEQ ID NO: 306115 - DNA, 528 bp, Homo sapiens
tgtgcctcttgcgtggtacatcctcccgggatgcgggggaccaccagattgcctaaggaggtgtgaacggccaggtcggaaacggagcaggtcaaaactcccgtgctgatcagtagtggtggcgcgtgcctgtagtcccagctactcgggaggctgaggtgggaggatcgcttgagcccaggagttctgggctgtagtgcgctatgccgatcgggtgtccgcactaagttcggcatcaatatggtgacctcccgggagcgggggaccaccaggttgcctaaggaggggtgaaccggcccaggtcggaaacggagcaggtcaaaactcccgtgctgatcagtagtgggatcgcgcctgtgaatagccactgcactccagcctgagcaacatagcgagaccccgtctcttaagtccctttattgcattcagagaatatataggtatttaaactgtgacaataattttaccttgatacatccaagtttgacttgctttataatatattatagatataaacttagcctcttt

SEQ ID NO: 306116 - DNA, 687 bp, Homo sapiens
caccactcctatagatcagtcacacccaaacattagtaaaagatgaatcacagacataaatttgcaagctcaaacaataaagcatctaaaagaaaatatagaagaatatcatcatgacttctgagcaggcaaaggtttcttagacataaaggtactaatcataaaaacatatatttatgtctctatgtatccaataaagaacactacaaaataatcataataaaacgacaaacaacccagttgttaaatgaacaacagctgggcatggtagtgcactctggcgcgtgcctgtagtcccagctactcgggaggctgaggtgggaggatcgcttgagcccaggagttctgggctgtagtgcgctatgccgatcgggtgtccgcactaagttcggcatcaatatggtgacctcccgggagcgggggaccaccaggttgcctaaggaggggtgaaccggcccaggtcggaaacggagcaggtcaaaactcccgtgctgatcagtagtgggatcgcgcctgtgaatagccactgcactccagcctgagcaacatagcgagaccccgtctcttaagtccctttattgcattcagagaatatataggtatttaaactgtgacaataattttaccttgatacatccaagtttgacttgctttataatatattatagatataaacttagcctcttt

SEQ ID NO: 306117 - DNA, 532 bp, Homo sapiens
gagtctgaggatccggtgaatcctcctcctcctgccagagaaataaatgccagcagctgtttattctctcaggcccaccaacacatctttttacaaataaatttgcctcacagctggtcatggtggcgcgtgcctgtagtcccagctactcgggaggctgaggtgggaggatcgcttgagcccaggagttctgggctgtagtgcgctatgccgatcgggtgtccgcactaagttcggcatcaatatggtgacctcccgggagcgggggaccaccaggttgcctaaggaggggtgaaccggcccaggtcggaaacggagcaggtcaaaactcccgtgctgatcagtagtgggatcgcgcctgtgaatagccactgcactccagcctgagcaacatagcgagaccccgtctcttaagtccctttattgcattcagagaatatataggtatttaaactgtgacaataattttaccttgatacatccaagtttgacttgctttataatatattatagatataaacttagcctcttt

SEQ ID NO: 306118 - DNA, 485 bp, Homo sapiens
  misc_feature (16)..(16): n is a, c, g, or t
  misc_feature (19)..(20): n is a, c, g, or t
  misc_feature (26)..(26): n is a, c, g, or t
  misc_feature (31)..(31): n is a, c, g, or t
  misc_feature (36)..(36): n is a, c, g, or t
  misc_feature (40)..(40): n is a, c, g, or t
  misc_feature (45)..(45): n is a, c, g, or t
  misc_feature (59)..(59): n is a, c, g, or t
ccgctctccacccacnccnnccaccntgccnggctnattnttgtntttttagtagaganggggtttcaccatgttgtggcgcgtgcctgtagtcccagctactcgggaggctgaggtgggaggatcgcttgagcccaggagttctgggctgtagtgcgctatgccgatcgggtgtccgcactaagttcggcatcaatatggtgacctcccgggagcgggggaccaccaggttgcctaaggaggggtgaaccggcccaggtcggaaacggagcaggtcaaaactcccgtgctgatcagtagtgggatcgcgcctgtgaatagccactgcactccagcctgagcaacatagcgagaccccgtctcttaagtccctttattgcattcagagaatatataggtatttaaactgtgacaataattttaccttgatacatccaagtttgacttgctttataatatattatagatataaacttagcctcttt

SEQ ID NO: 306119 - DNA, 435 bp, Homo sapiens
atgtactcctccctctccttaggcaatggcgcgtgcctgtagtcccagctactcgggaggctgaggtgggaggatcgcttgagcccaggagttctgggctgtagtgcgctatgccgatcgggtgtccgcactaagttcggcatcaatatggtgacctcccgggagcgggggaccaccaggttgcctaaggaggggtgaaccggcccaggtcggaaacggagcaggtcaaaactcccgtgctgatcagtagtgggatcgcgcctgtgaatagccactgcactccagcctgagcaacatagcgagaccccgtctcttaagtccctttattgcattcagagaatatataggtatttaaactgtgacaataattttaccttgatacatccaagtttgacttgctttataatatattatagatataaacttagcctcttt

SEQ ID NO: 306120 - DNA, 640 bp, Homo sapiens
agccatgagttttggtttagaagatggaatttccagtgagaccagatggttataagtctccagcatcacctccctgtgcagggtcctctgagcagggctcaacaacctccactcctcctgggtgaagtacacagccacatccctgaatgccacgaacgcctttaacacaaaacacacctctgctcacccaggagcctgtctttccctcccacactttagaatgagaggtcatggcgcgtgcctgtagtcccagctactcgggaggctgaggtgggaggatcgcttgagcccaggagttctgggctgtagtgcgctatgccgatcgggtgtccgcactaagttcggcatcaatatggtgacctcccgggagcgggggaccaccaggttgcctaaggaggggtgaaccggcccaggtcggaaacggagcaggtcaaaactcccgtgctgatcagtagtgggatcgcgcctgtgaatagccactgcactccagcctgagcaacatagcgagaccccgtctcttaagtccctttattgcattcagagaatatataggtatttaaactgtgacaataattttaccttgatacatccaagtttgacttgctttataatatattatagatataaacttagcctcttt

SEQ ID NO: 306121 - DNA, 500 bp, Homo sapiens
tgtgcctcttgcgtggtacatcctcccgggatgcgggggaccaccagattgcctaaggaggtgtgaacggccaggtcggaaacggagcaggtggcgcgtgcctgtagtcccagctactcgggaggctgaggtgggaggatcgcttgagcccaggagttctgggctgtagtgcgctatgccgatcgggtgtccgcactaagttcggcatcaatatggtgacctcccgggagcgggggaccaccaggttgcctaaggaggggtgaaccggcccaggtcggaaacggagcaggtcaaaactcccgtgctgatcagtagtgggatcgcgcctgtgaatagccactgcactccagcctgagcaacatagcgagaccccgtctcttaagtccctttattgcattcagagaatatataggtatttaaactgtgacaataattttaccttgatacatccaagtttgacttgctttataatatattatagatataaacttagcctcttt

SEQ ID NO: 306122 - DNA, 608 bp, Homo sapiens
atcgctgacctcttcctgttccacatctggaaagtgtgaacaaaacaccttactcatttatatcccaagtaccaagtatatactgggtactaaaaattcataaaattgtggtaaactttttatattgttttacatttcctgtttcctcttgcaaatttcaccttattcttcctacatcttttgaaaaatcacttcctgctggcgcgtgcctgtagtcccagctactcgggaggctgaggtgggaggatcgcttgagcccaggagttctgggctgtagtgcgctatgccgatcgggtgtccgcactaagttcggcatcaatatggtgacctcccgggagcgggggaccaccaggttgcctaaggaggggtgaaccggcccaggtcggaaacggagcaggtcaaaactcccgtgctgatcagtagtgggatcgcgcctgtgaatagccactgcactccagcctgagcaacatagcgagaccccgtctcttaagtccctttattgcattcagagaatatataggtatttaaactgtgacaataattttaccttgatacatccaagtttgacttgctttataatatattatagatataaacttagcctcttt

SEQ ID NO: 306123 - DNA, 455 bp, Homo sapiens
gataacatcttatcaggagacttgggccgggcacagtggcgcgtgctggcgcgtgcctgtagtcccagctactcgggaggctgaggtgggaggatcgcttgagcccaggagttctgggctgtagtgcgctatgccgatcgggtgtccgcactaagttcggcatcaatatggtgacctcccgggagcgggggaccaccaggttgcctaaggaggggtgaaccggcccaggtcggaaacggagcaggtcaaaactcccgtgctgatcagtagtgggatcgcgcctgtgaatagccactgcactccagcctgagcaacatagcgagaccccgtctcttaagtccctttattgcattcagagaatatataggtatttaaactgtgacaataattttaccttgatacatccaagtttgacttgctttataatatattatagatataaacttagcctcttt

SEQ ID NO: 306124 - DNA, 556 bp, Homo sapiens
gcccaggcggagcagcctcctgtccgaagggcatgagatagtgttccacgttaggggccactagacgcgctcgtggcttgtcgctgtcgtcagctgatgaccaccgcggacgcgttgggtagaagcggcggatactggtgatgagagtggcgcgtgcctgtagtcccagctactcgggaggctgaggtgggaggatcgcttgagcccaggagttctgggctgtagtgcgctatgccgatcgggtgtccgcactaagttcggcatcaatatggtgacctcccgggagcgggggaccaccaggttgcctaaggaggggtgaaccggcccaggtcggaaacggagcaggtcaaaactcccgtgctgatcagtagtgggatcgcgcctgtgaatagccactgcactccagcctgagcaacatagcgagaccccgtctcttaagtccctttattgcattcagagaatatataggtatttaaactgtgacaataattttaccttgatacatccaagtttgacttgctttataatatattatagatataaacttagcctcttt

SEQ ID NO: 306125 - DNA, 461 bp, Homo sapiens
cctaagtggaactgctccgaaaaataaattaaaaaaaacaaaacaaacaaactggcgcgtgcctgtagtcccagctactcgggaggctgaggtgggaggatcgcttgagcccaggagttctgggctgtagtgcgctatgccgatcgggtgtccgcactaagttcggcatcaatatggtgacctcccgggagcgggggaccaccaggttgcctaaggaggggtgaaccggcccaggtcggaaacggagcaggtcaaaactcccgtgctgatcagtagtgggatcgcgcctgtgaatagccactgcactccagcctgagcaacatagcgagaccccgtctcttaagtccctttattgcattcagagaatatataggtatttaaactgtgacaataattttaccttgatacatccaagtttgacttgctttataatatattatagatataaacttagcctcttt

SEQ ID NO: 306126 - DNA, 473 bp, Homo sapiens
catcatggcaaatctcatctctacttaaaatttaaaaaaaaaaattagccagtcttggtattggtggcgcgtgcctgtagtcccagctactcgggaggctgaggtgggaggatcgcttgagcccaggagttctgggctgtagtgcgctatgccgatcgggtgtccgcactaagttcggcatcaatatggtgacctcccgggagcgggggaccaccaggttgcctaaggaggggtgaaccggcccaggtcggaaacggagcaggtcaaaactcccgtgctgatcagtagtgggatcgcgcctgtgaatagccactgcactccagcctgagcaacatagcgagaccccgtctcttaagtccctttattgcattcagagaatatataggtatttaaactgtgacaataattttaccttgatacatccaagtttgacttgctttataatatattatagatataaacttagcctcttt

SEQ ID NO: 306127 - DNA, 464 bp, Homo sapiens
tgaaacctctgtgagattttcccggcgtggtggcatggctgcctgtttatcccagtggcgcgtgcctgtagtcccagctactcgggaggctgaggtgggaggatcgcttgagcccaggagttctgggctgtagtgcgctatgccgatcgggtgtccgcactaagttcggcatcaatatggtgacctcccgggagcgggggaccaccaggttgcctaaggaggggtgaaccggcccaggtcggaaacggagcaggtcaaaactcccgtgctgatcagtagtgggatcgcgcctgtgaatagccactgcactccagcctgagcaacatagcgagaccccgtctcttaagtccctttattgcattcagagaatatataggtatttaaactgtgacaataattttaccttgatacatccaagtttgacttgctttataatatattatagatataaacttagcctcttt

SEQ ID NO: 306128 - DNA, 464 bp, Homo sapiens
  misc_feature (7)..(8): n is a, c, g, or t
  misc_feature (12)..(12): n is a, c, g, or t
tgagatnncccncaaaccccctctcacccacaaaccccttcacccacaaaccccctggcgcgtgcctgtagtcccagctactcgggaggctgaggtgggaggatcgcttgagcccaggagttctgggctgtagtgcgctatgccgatcgggtgtccgcactaagttcggcatcaatatggtgacctcccgggagcgggggaccaccaggttgcctaaggaggggtgaaccggcccaggtcggaaacggagcaggtcaaaactcccgtgctgatcagtagtgggatcgcgcctgtgaatagccactgcactccagcctgagcaacatagcgagaccccgtctcttaagtccctttattgcattcagagaatatataggtatttaaactgtgacaataattttaccttgatacatccaagtttgacttgctttataatatattatagatataaacttagcctcttt

SEQ ID NO: 306129 - DNA, 465 bp, Homo sapiens
gcctaagtggaactgctcgtatctactaaaaatacaaaaatgatggctgggcgttgtggcgcgtgcctgtagtcccagctactcgggaggctgaggtgggaggatcgcttgagcccaggagttctgggctgtagtgcgctatgccgatcgggtgtccgcactaagttcggcatcaatatggtgacctcccgggagcgggggaccaccaggttgcctaaggaggggtgaaccggcccaggtcggaaacggagcaggtcaaaactcccgtgctgatcagtagtgggatcgcgcctgtgaatagccactgcactccagcctgagcaacatagcgagaccccgtctcttaagtccctttattgcattcagagaatatataggtatttaaactgtgacaataattttaccttgatacatccaagtttgacttgctttataatatattatagatataaacttagcctcttt

SEQ ID NO: 306130 - DNA, 479 bp, Homo sapiens
cttggtggtacctccaggctggagtgcagtgtcacaatcttggctcactgcaatctctgcctcccaggtctggcgcgtgcctgtagtcccagctactcgggaggctgaggtgggaggatcgcttgagcccaggagttctgggctgtagtgcgctatgccgatcgggtgtccgcactaagttcggcatcaatatggtgacctcccgggagcgggggaccaccaggttgcctaaggaggggtgaaccggcccaggtcggaaacggagcaggtcaaaactcccgtgctgatcagtagtgggatcgcgcctgtgaatagccactgcactccagcctgagcaacatagcgagaccccgtctcttaagtccctttattgcattcagagaatatataggtatttaaactgtgacaataattttaccttgatacatccaagtttgacttgctttataatatattatagatataaacttagcctcttt

SEQ ID NO: 306131 - DNA, 469 bp, Homo sapiens
agccttcccaggctcaggaagcatggaaatgagtctgggaggtgattctcccaactcagctggcgcgtgcctgtagtcccagctactcgggaggctgaggtgggaggatcgcttgagcccaggagttctgggctgtagtgcgctatgccgatcgggtgtccgcactaagttcggcatcaatatggtgacctcccgggagcgggggaccaccaggttgcctaaggaggggtgaaccggcccaggtcggaaacggagcaggtcaaaactcccgtgctgatcagtagtgggatcgcgcctgtgaatagccactgcactccagcctgagcaacatagcgagaccccgtctcttaagtccctttattgcattcagagaatatataggtatttaaactgtgacaataattttaccttgatacatccaagtttgacttgctttataatatattatagatataaacttagcctcttt

SEQ ID NO: 306132 - DNA, 461 bp, Homo sapiens
atcctcctcctccttactaagaagtaaattagctgggtgtggtgatgggcactggcgcgtgcctgtagtcccagctactcgggaggctgaggtgggaggatcgcttgagcccaggagttctgggctgtagtgcgctatgccgatcgggtgtccgcactaagttcggcatcaatatggtgacctcccgggagcgggggaccaccaggttgcctaaggaggggtgaaccggcccaggtcggaaacggagcaggtcaaaactcccgtgctgatcagtagtgggatcgcgcctgtgaatagccactgcactccagcctgagcaacatagcgagaccccgtctcttaagtccctttattgcattcagagaatatataggtatttaaactgtgacaataattttaccttgatacatccaagtttgacttgctttataatatattatagatataaacttagcctcttt

SEQ ID NO: 306133 - DNA, 541 bp, Homo sapiens
  misc_feature (184)..(184): n is a, c, g, or t
  misc_feature (188)..(189): n is a, c, g, or t
ctgcgctctcttgcgattatatgaatctttgtcatttcgtatgctcatgcattagtaaaaaaaaaaaatacaatgaagagattacttcattcacaaataagtatcgaattttagtgcttaaaaattaacaaggtgggccgggtgtggtggctcacgcctgtaatcccagcactttgggaggccnaggnnggaggatcacttgaggccaggagttcgagaccagcctggccaacatggtgaaaccccgtctctactaaaaatacaaaaattagccgggcgtggtggcgcgtgcctgtagtcccagctactcgggaggctgaggtgggaggatcgcttgagcccaggagttctgggctgtagtgcgctatgccgatcgggtgtccgcactaagttcggcatcaatatggtgacctcccgggagcgggggaccaccaggttgcctaaggaggggtgaaagagagggggtctcgctatgttgcccaggctggagtgcagtggctattcacaggcgcgatcccactactgatcagcacgggagttt

SEQ ID NO: 306134 - DNA, 485 bp, Homo sapiens
  misc_feature (184)..(184): n is a, c, g, or t
  misc_feature (188)..(189): n is a, c, g, or t
  misc_feature (484)..(484): n is a, c, g, or t
ctgcgctctcttgcgattatatgaatctttgtcatttcgtatgctcatgcattagtaaaaaaaaaaaatacaatgaagagattacttcattcacaaataagtatcgaattttagtgcttaaaaattaacaaggtgggccgggtgtggtggctcacgcctgtaatcccagcactttgggaggccnaggnnggaggatcacttgaggccaggagttcgagaccagcctggccaacatggtgaaaccccgtctctactaaaaatacaaaaattagccgggcgtggtggcgcgtgcctgtagtcccagctactcgggaggctgaggtgggaggatcgcttgagcccaggagttctgggctgtagtgcgctatgccgatcgggtgtccgcactaagttcggcatcaatatggtgacctcccgggagcgggggaccaccaggttgcctaaggaggggtgaattcagagccaggcctaagttcagagccang

SEQ ID NO: 306135 - DNA, 488 bp, Homo sapiens
  misc_feature (184)..(184): n is a, c, g, or t
  misc_feature (188)..(189): n is a, c, g, or t
ctgcgctctcttgcgattatatgaatctttgtcatttcgtatgctcatgcattagtaaaaaaaaaaaatacaatgaagagattacttcattcacaaataagtatcgaattttagtgcttaaaaattaacaaggtgggccgggtgtggtggctcacgcctgtaatcccagcactttgggaggccnaggnnggaggatcacttgaggccaggagttcgagaccagcctggccaacatggtgaaaccccgtctctactaaaaatacaaaaattagccgggcgtggtggcgcgtgcctgtagtcccagctactcgggaggctgaggtgggaggatcgcttgagcccaggagttctgggctgtagtgcgctatgccgatcgggtgtccgcactaagttcggcatcaatatggtgacctcccgggagcgggggaccaccaggttgcctaaggaggggtgaaggtgcgttggcccaacacggtgcgttggcccgg

SEQ ID NO: 306136 - DNA, 485 bp, Homo sapiens
  misc_feature (184)..(184): n is a, c, g, or t
  misc_feature (188)..(189): n is a, c, g, or t
ctgcgctctcttgcgattatatgaatctttgtcatttcgtatgctcatgcattagtaaaaaaaaaaaatacaatgaagagattacttcattcacaaataagtatcgaattttagtgcttaaaaattaacaaggtgggccgggtgtggtggctcacgcctgtaatcccagcactttgggaggccnaggnnggaggatcacttgaggccaggagttcgagaccagcctggccaacatggtgaaaccccgtctctactaaaaatacaaaaattagccgggcgtggtggcgcgtgcctgtagtcccagctactcgggaggctgaggtgggaggatcgcttgagcccaggagttctgggctgtagtgcgctatgccgatcgggtgtccgcactaagttcggcatcaatatggtgacctcccgggagcgggggaccaccaggttgcctaaggaggggtgaagactggagacgggatactctagagactgac

SEQ ID NO: 306137 - DNA, 620 bp, Homo sapiens
  misc_feature (184)..(184): n is a, c, g, or t
  misc_feature (188)..(189): n is a, c, g, or t
  misc_feature (471)..(471): n is a, c, g, or t
  misc_feature (545)..(545): n is a, c, g, or t
  misc_feature (616)..(616): n is a, c, g, or t
ctgcgctctcttgcgattatatgaatctttgtcatttcgtatgctcatgcattagtaaaaaaaaaaaatacaatgaagagattacttcattcacaaataagtatcgaattttagtgcttaaaaattaacaaggtgggccgggtgtggtggctcacgcctgtaatcccagcactttgggaggccnaggnnggaggatcacttgaggccaggagttcgagaccagcctggccaacatggtgaaaccccgtctctactaaaaatacaaaaattagccgggcgtggtggcgcgtgcctgtagtcccagctactcgggaggctgaggtgggaggatcgcttgagcccaggagttctgggctgtagtgcgctatgccgatcgggtgtccgcactaagttcggcatcaatatggtgacctcccgggagcgggggaccaccaggttgcctaaggaggggtgaatctggggttcagcctngagctagtgtcacctgcacagggccctctgaggctcagcctgagctggcgtcacctgtgcagggccctctgggntcagcccttgagctggcctcacctgggttccccaccccgggctctcctgccctgccctcctgcacgccctncctc

SEQ ID NO: 306138 - DNA, 507 bp, Homo sapiens
  misc_feature (184)..(184): n is a, c, g, or t
  misc_feature (188)..(189): n is a, c, g, or t
ctgcgctctcttgcgattatatgaatctttgtcatttcgtatgctcatgcattagtaaaaaaaaaaaatacaatgaagagattacttcattcacaaataagtatcgaattttagtgcttaaaaattaacaaggtgggccgggtgtggtggctcacgcctgtaatcccagcactttgggaggccnaggnnggaggatcacttgaggccaggagttcgagaccagcctggccaacatggtgaaaccccgtctctactaaaaatacaaaaattagccgggcgtggtggcgcgtgcctgtagtcccagctactcgggaggctgaggtgggaggatcgcttgagcccaggagttctgggctgtagtgcgctatgccgatcgggtgtccgcactaagttcggcatcaatatggtgacctcccgggagcgggggaccaccaggttgcctaaggaggggtgaatcgtcccgtcgcatgtgatcgacagtgttccgggcctcacgctcacaggttt

SEQ ID NO: 306139 - DNA, 485 bp, Homo sapiens
  misc_feature (184)..(184): n is a, c, g, or t
  misc_feature (188)..(189): n is a, c, g, or t
ctgcgctctcttgcgattatatgaatctttgtcatttcgtatgctcatgcattagtaaaaaaaaaaaatacaatgaagagattacttcattcacaaataagtatcgaattttagtgcttaaaaattaacaaggtgggccgggtgtggtggctcacgcctgtaatcccagcactttgggaggccnaggnnggaggatcacttgaggccaggagttcgagaccagcctggccaacatggtgaaaccccgtctctactaaaaatacaaaaattagccgggcgtggtggcgcgtgcctgtagtcccagctactcgggaggctgaggtgggaggatcgcttgagcccaggagttctgggctgtagtgcgctatgccgatcgggtgtccgcactaagttcggcatcaatatggtgacctcccgggagcgggggaccaccaggttgcctaaggaggggtgaagtttgtgggtgaaaggggggggtaccgagc

SEQ ID NO: 306140 - DNA, 658 bp, Homo sapiens
acttcttagagaaaaggtgtgtgctggtgtctccaagtctaatgatttcaccagtggattctgcttcatctccatcccaagaggggcccaacatctcagaagacaaggagcacctggaaaagttccctccttcactcagggcccagcctgaccagagggcccttcccctgaggacctggagagctgctgggtgcagaaaaaggaaaagactctcccttttgctgcttagcatgtcttgctgcttatgttttgttttcactgatatatgaatggtagaaatagctgtatataaagtgtcaacgattaaatgtataggagaacagcaaatactggtgactctagggtgtgggagtgaagggggtgggatgctaactttgcattaaatatccttcaattgtttcacttttgcgcttattttgttactttaaaattcttatggaaagaagttcaccaggccgggcatggtagctcactctggcgcgtgcctgtagtcccagctactcgggaggctgaggtgggaggatcgcttgagcccaggagttctgggctgtagtgcgctatgccgatcgggtgtccgcactaagttcggcatcaatatggtgacctcttccacactctgtgctgtcctcctctgccctccttatgctgggccaggcta

SEQ ID NO: 306141 - DNA, 1570 bp, Homo sapiens
gtctaatgaaaaggcactcgggagctatttctgaacggacctgggcttgtcggaccagtgagcggcggcggctgcgcggcggcagcggcagaaagcgtagctgctttgctgtagtccacgcccccttgccgctccggtgacagtctctgcggaaagtcacgtttgtgatttcgggagagcacagaacgggacgacggcgctcttgctgggtcatctgggccaggtgacgaagaaacagtttcctggtgaagcagtccctcacccctagtcagcccacacccctagggcctaaagatgctgaggtctgtatggaattttctgaaacgccacaaaaagaaatgcatcttcctgggcacggtccttggaggagtatatattctggggaaatatggacagaagaaaatcagagaaatacaggaaagggaggctgcagaatacattgcccaagcacgacgacaatatcattttgaaagtaaccagaggacttgcaatatgacagtgctgtccatgcttccaacactgagagaggccttaatgcagcaactgaattccgagagcctcacagctctgctaaaaaacaggccttcaaacaagctagaaatatgggaggatctgaagataataagtttcacaagaagtactgtggctgtatacagtacctgtatgctggttgttcttttgcgggtccagttaaacataattggtggatatatttacctggataatgcagcagttggcaaaaatggcactacaattcttgctcccccagatgtccaacagcagtatttatcaagtattcagcacctacttggagatggcctgacagaattgatcactgtcattaaacaagctgtgcagaaggttttaggaagtgtttctcttaaacattctttgtcccttttggacttggagcaaaaactaaaagaaatcagaaatctcgttgagcagcataagtcttcttcttggattaataaagatggatccaaacctttattatgccattatatgatgccagatgaagaaactccattagcagtgcaggcctgtggactttctcctcgagacattaccactattaaacttctcaatgaaactagagacatgttggaaagcccagattttagtacagttttgaatacctgtttaaaccgaggttttagtagacttctagacaatatggctgagttctttcgacctactgaacaggacctgcaacatggtaactctatgaatagtctttccagtgtcagcctgcctttagctaagataattccaatagtaaacggacagatccattcagtttgcagtgaaacacctagtcattttgttcaggatctgttgacaatggagcaagtgaaagactttgctgctaatgtgtatgaagcttttagtacccctcagcaactggagaaatgatttttccttcaagaaaaactacagtgggattcatttactttttaaaatacactgggtaaatcacctatacttagagtaacagtttgttatcaaaatgcctgataaaatatattcttaataaaagtcttcatttcataatgaaatcaatttattt

SEQ ID NO: 306142 - DNA, 1051 bp, Homo sapiens
agaatatctgattgggtataggcaagagaaagaagtgccagggataatgcccatatttgctgcttctagaacctgatagataatggtgtggttcactggagtaggggggaaatactcaacattgttagtaattaagagaaatgcagatttaacctgtaagatactattttcacctatcagatgtgaaagattaaagaaaaggataatgttggatgttgaaagaaggcataatggagcagatacattcataccctttgacccagtgatttcatgtttatacaaaatcttacttagattaagaaaatttaggcaaaaactgaaatgcccaactctagggaactcatgatataaattgtcacagctagaggacagattactgtatagtcattaaaaaacaatcagacaaacactttagaacttttaataagatggaaaatactcataacaataaaaatgcaaaaacagtgtgcttaggaggttagaggtttttggtagacacaaaaaaacaaagatatgtgtaaaaaaacgccaaaagaaattggtcatgatgtcaattagagttgttatttctaagcgatagaattgtggggttttttttcctttttaatagatttccaaaaatattctacaatggctatgtattacttttataattaagatgttaaagtcctgtggggtcatttcagaaaataatcattactgtaatgatttttcagtctttccagtgtcagcctgcctttagctaagataattccaatagtaaacggacagatccattcagtttgcagtgaaacacctagtcattttgttcaggatctgttgacaatggagcaagtgaaagactttgctgctaatgtgtatgaagcttttagtacccctcagcaactggagaaatgatttttccttcaagaaaaactacagtgggattcatttactttttaaaatacactgggtaaatcacctatacttagagtaacagtttgttatcaaaatgcctgataaaatatattcttaataaaagtcttcatttcataatgaaatcaatttattt

SEQ ID NO: 306143 - DNA, 296 bp, Homo sapiens
tccaggatgatacctaaatggctgtatcataaccctgtgctaatgtttgaaaaccttaagtgtgacattttaattctataggcctgtggactttctcctcgagacattaccactattaaacttctcaatgaaactagagacatgttggaaaggtatgtatacttcatgtagcaggaaaaatatgtgtgtatgttgaatgtacttgagactattttttagtttttcttgaacaacatggtcggtataatattatattaaaattaaatttttgactctgttccacagccatttaggta

SEQ ID NO: 306144 - DNA, 310 bp, Homo sapiens
agaatcattcttctgggaatatgacaggaatgcctatctgtcacacctaaaattccgggtttttttttacaaagttttatttcacttccctagttcaaccactttgctgctaatgtgtatgaagcttttagtacccctcagcaactggagaaatgatttttccttcaagaaaaactacagtgggattcatttactttttaaaatacactgggtaaatcacctatacttagagtaacagtttgttatcaaaatgcctgataaaatatattcttaataaaagtcttcatttcataatgaaatcaatttattt

SEQ ID NO: 306145 - DNA, 2195 bp, Homo sapiens
gtctaatgaaaaggcactcgggagctatttctgaacggacctgggcttgtcggaccagtgagcggcggcggctgcgcggcggcagcggcagaaagcgtagctgctttgctgtagtccacgcccccttgccgctccggtgacagtctctgcggaaagtcacgtttgtgatttcgggagagcacagaacgggacgacggcgctcttgctgggtcatctgggccaggtgacgaagaaacagtttcctggtgaagcagtccctcacccctagtcagcccacacccctagggcctaaagatgctgaggtctgtatggaattttctgaaacgccacaaaaagaaatgcatcttcctgggcacggtccttggaggagtatatattctggggaaatatggacagaagaaaatcagagaaatacaggaaagggaggctgcagaatacattgcccaagcacgacgacaatatcattttgaaagtaaccagaggacttgcaatatgacagtgctgtccatgcttccaacactgagagaggccttaatgcagcaactgaattccgagagcctcacagctctgctaaaaaacaggccttcaaacaagctagaaatatgggaggatctgaagataataagtttcacaagaagtactgtggctgtatacagtacctgtatgctggttgttcttttgcgggtccagttaaacataattggtggatatatttacctggataatgcagcagttggcaaaaatggcactacaattcttgctcccccagatgtccaacagcagtatttatcaagtattcagcacctacttggagatggcctgacagaattgatcactgtcattaaacaagctgtgcagaaggttttaggaagtgtttctcttaaacattctttgtcccttttggacttggagcaaaaactaaaagaaatcagaaatctcgttgagcagcataagtcttcttcttggattaataaagatggatccaaacctttattatgccattatatgatgccagatgaagaaactccattagcagtgcaggcctgtggactttctcctcgagacattaccactattaaacttctcaatgaaactagagacatgttggaaagcccagattttagtacagttttgaatacctgtttaaaccgaggttttagtagacttctagacaatatggctgagttctttcgacctactgaacaggacctgcaacatggtaactctatgaatagtctttccagtgtcagcctgcctttagctaagataattccaatagtaaacggacagatccattcagtttgcagtgaaacacctagtcattttgttcaggatctgttgacaatggagcaagtgaaagactttgctgctaatgtgtatgaagcttttagtacccctcagcaactggagaaatgatttttccttcaagaaaaactacagtgggattcatttactttttaaaatacactgggtaaatcacctatacttagagtaacagtttgttatcaaaatgcctgataaaatatattcttaataaaagtcttcatttcataatgaaatcaatttatttggcatcttaatatatttttttagattcatcaacagaccagtttttgtgggcatatatatatacacgtgcaaatatcagaattgttaataatttgttacacatggacatttgttccaaactgactaaaaatcaatatagatattttatatacatatatatatatataaatacaaaattcagtgtactttaccatattaatactgaggaaaaatctgttggagacataggtctaggatgtgtgaagtttggaaaaatatgctatttaattataatgttccctagactgctgtaaacagaagtgaatcagacttttctccagctacctttcaaaataataaattatttgtctcaaatataccttgatggaggacttttttattcttatggaaatagtgaattccaacaactatgatgaactatgttctttgctatttcttcactatattttttaaggttttattaaaaagccttagaaagttacatattggtttagaggctaaaattgtgttgatgctgtttactcacctaattacatagttttaatcatttgtacataattttaaaaacttactttgtattgattttgaatacagtgaaaatcttattgcaataaactattttagta

SEQ ID NO: 306146 - DNA, 4381 bp, Homo sapiens
gtctaatgaaaaggcactcgggagctatttctgaacggacctgggcttgtcggaccagtgagcggcggcggctgcgcggcggcagcggcagaaagcgtagctgctttgctgtagtccacgcccccttgccgctccggtgacagtctctgcggaaagtcacgtttgtgatttcgggagagcacagaacgggacgacggcgctcttgctgggtcatctgggccaggtgacgaagaaacagtttcctggtgaagcagtccctcacccctagtcagcccacacccctagggcctaaagatgctgaggtctgtatggaattttctgaaacgccacaaaaagaaatgcatcttcctgggcacggtccttggaggagtatatattctggggaaatatggacagaagaaaatcagagaaatacaggaaagggaggctgcagaatacattgcccaagcacgacgacaatatcattttgaaagtaaccagaggacttgcaatatgacagtgctgtccatgcttccaacactgagagaggccttaatgcagcaactgaattccgagagcctcacagctctgctaaaaaacaggccttcaaacaagctagaaatatgggaggatctgaagataataagtttcacaagaagtactgtggctgtatacagtacctgtatgctggttgttcttttgcgggtccagttaaacataattggtggatatatttacctggataatgcagcagttggcaaaaatggcactacaattcttgctcccccagatgtccaacagcagtatttatcaagtattcagcacctacttggagatggcctgacagaattgatcactgtcattaaacaagctgtgcagaaggttttaggaagtgtttctcttaaacattctttgtcccttttggacttggagcaaaaactaaaagaaatcagaaatctcgttgagcagcataagtcttcttcttggattaataaagatggatccaaacctttattatgccattatatgatgccagatgaagaaactccattagcagtgcaggcctgtggactttctcctcgagacattaccactattaaacttctcaatgaaactagagacatgttggaaagcccagattttagtacagttttgaatacctgtttaaaccgaggttttagtagacttctagacaatatggctgagttctttcgacctactgaacaggacctgcaacatggtaactctatgaatagtctttccagtgtcagcctgcctttagctaagataattccaatagtaaacggacagatccattcagtttgcagtgaaacacctagtcattttgttcaggatctgttgacaatggagcaagtgaaagactttgctgctaatgtgtatgaagcttttagtacccctcagcaactggagaaatgatttttccttcaagaaaaactacagtgggattcatttactttttaaaatacactgggtaaatcacctatacttagagtaacagtttgttatcaaaatgcctgataaaatatattcttaataaaagtcttcatttcataatgaaatcaatttatttggcatcttaatatatttttttagattcatcaacagaccagtttttgtgggcatatatatatacacgtgcaaatatcagaattgttaataatttgttacacatggacatttgttccaaactgactaaaaatcaatatagatattttatatacatatatatatatataaatacaaaattcagtgtactttaccatattaatactgaggaaaaatctgttggagacataggtctaggatgtgtgaagtttggaaaaatatgctatttaattataatgttccctagactgctgtaaacagaagtgaatcagacttttctccagctacctttcaaaataataaattatttgtctcaaatataccttgatggaggacttttttattcttatggaaatagtgaattccaacaactatgatgaactatgttctttgctatttcttcactatattttttaaggttttattaaaaagccttagaaagttacatattggtttagaggctaaaattgtgttgatgctgtttactcacctaattacatagttttaatcatttgtacataattttaaaaacttactttgtattgattttgaatacagtgaaaatcttattgcaataaactattttagtaaaatattattttgttgagttaatatttttcagctattaatttacttatcccatagcatttttgttattatttcggaagagagagcatgctagtttaagtttcattttaattggtcgtgtacttggtgcttttttgttgttgttaacttgttcatttagtaaaaagcaaatagctttactttctgaaaaagaaataattcattatctctagtaatacatctgtaattcttcatttagaagggtaattagggcaaaagtaaataaatcattatatatcattagtatgttgacatatattttcagtaacattgttttatgttcctccagcgtaacatgtagctgaacagtagaaggtagaaaataaattatgacatctcttctaaggcctggctaggcctgaagctcactgccagggagtttgtgtctagaatgtttttaaaaataggtagtggagccatagccctcaccatagacacctctgagcccactggcattgtctctgagcagaagatggctgtgccactcacatatgctaatcttggcaaatctgccaagcatgtcttcaccaagggatatggatttggcttaataaaacctgatttgaaaacaaaatctgagaatggattggaatttacaagctcaggctcagccaacactgagaccaccaaagtgacaggcagtctggaaaccaagtacagatagaccgaatatggcctgacatttgcaaagaaatggaacactgacaacacactaggcaccgagattactatggaagaccagttagcatgtggactgaagctgaccctccattcatccttctcgcctaacactgggggaaaagtgctaaaatcaagacaggatacaagtgggagcacattaacctgggctgcgacgtggatttggacattgctgagccttcagtccgaggcactcttaagtgctgggttatgaggattggctggccagctaccaggtcaattttgagaccacaaagtcctgagtgacccagagcaactttgcggttggccacaagactgatgaattccagcttcacactaatgtgaatgacgggacagagtttggcagctccaattagcagaaggtgagcaagaagttggagactgctgtcagtctcgctgggacagcaagaaacaggaacactcgcttcagaatagcagccaagtatcagatcgatcctaaagcccacttctccactaaagtgaacaactccagcctgataggtttaggatacacttaaaccctaaagccaggtttcatactgacactgtcagctctcctgggtggcaagaacatctatgctagtggccacaagcttggtctaggactggaatttcaagcataaatgaatgctgtagaattgtttaaattattttgcagcatagataccttcacaatttagtgtatcttttaatgttgtatggctgggatgcaagtattgctaaatgtcatattggacctccaggttaaagatgattcagctttaaggtgttaccctttcaggggtacagaagaaacccagttccaaaaaggtcccttcagtggtagatttggggaacttggtggcccctgtagagatgccaggtttcttttttatctagaaatggctgcaagtggaagctgataatatataggcaccttgtaaattcatattgagtaaatgaatgaaattgtgatttcctgagaattgaaccttggtttcctaaccctaactgatgagaggcttgttgcttgatggtgtgtacaaatttacctgaaagggaccttttaaagacagatcttcatgacttgttcccatcccaggtcttcattacctcttttacacaaaaagatctacagggtgtggtcactgtttcttttgtgctgttttggggtggagagggtggatgtgatgaagccaataattcaggacttaattccttcctgagttgtggtttttttgtccttgcatcagtgtataaaatagcttccaggagctctagctataagcttggaagagtctgtataattgtaatcacagggtgacagcactcagaatctaaactgggcttatgtggtattctcaccactcaatttattttttagcagtttaatgggtacattttagagtcttccattttgtgtggaattagatcctcttcctcaaatgctgtaattaacttaaaaaaa

SEQ ID NO: 306147 - DNA, 4284 bp, Homo sapiens
gtctaatgaaaaggcactcgggagctatttctgaacggacctgggcttgtcggaccagtgagcggcggcggctgcgcggcggcagcggcagaaagcgtagctgctttgctgtagtccacgcccccttgccgctccggtgacagtctctgcggaaagtcacgtttgtgatttcgggagagcacagaacgggacgacggcgctcttgctgggtcatctgggccaggtgacgaagaaacagtttcctggtgaagcagtccctcacccctagtcagcccacacccctagggcctaaagatgctgaggtctgtatggaattttctgaaacgccacaaaaagaaatgcatcttcctgggcacggtccttggaggagtatatattctggggaaatatggacagaagaaaatcagagaaatacaggaaagggaggctgcagaatacattgcccaagcacgacgacaatatcattttgaaagtaaccagaggacttgcaatatgacagtgctgtccatgcttccaacactgagagaggccttaatgcagcaactgaattccgagagcctcacagctctgctaaaaaacaggccttcaaacaagctagaaatatgggaggatctgaagataataagtttcacaagaagtactgtggctgtatacagtacctgtatgctggttgttcttttgcgggtccagttaaacataattggtggatatatttacctggataatgcagcagttggcaaaaatggcactacaattcttgctcccccagatgtccaacagcagtatttatcaagtattcagcacctacttggagatggcctgacagaattgatcactgtcattaaacaagctgtgcagaaggttttaggaagtgtttctcttaaacattctttgtcccttttggacttggagcaaaaactaaaagaaatcagaaatctcgttgagcagcataagtcttcttcttggattaataaagatggatccaaacctttattatgccattatatgatgccagatgaagaaactccattagcagtgcaggcctgtggactttctcctcgagacattaccactattaaacttctcaatgaaactagagacatgttggaaagcccagattttagtacagttttgaatacctgtttaaaccgaggttttagtagacttctagacaatatggctgagttctttcgacctactgaacaggacctgcaacatggtaactctatgaataggatctgttgacaatggagcaagtgaaagactttgctgctaatgtgtatgaagcttttagtacccctcagcaactggagaaatgatttttccttcaagaaaaactacagtgggattcatttactttttaaaatacactgggtaaatcacctatacttagagtaacagtttgttatcaaaatgcctgataaaatatattcttaataaaagtcttcatttcataatgaaatcaatttatttggcatcttaatatatttttttagattcatcaacagaccagtttttgtgggcatatatatatacacgtgcaaatatcagaattgttaataatttgttacacatggacatttgttccaaactgactaaaaatcaatatagatattttatatacatatatatatatataaatacaaaattcagtgtactttaccatattaatactgaggaaaaatctgttggagacataggtctaggatgtgtgaagtttggaaaaatatgctatttaattataatgttccctagactgctgtaaacagaagtgaatcagacttttctccagctacctttcaaaataataaattatttgtctcaaatataccttgatggaggacttttttattcttatggaaatagtgaattccaacaactatgatgaactatgttctttgctatttcttcactatattttttaaggttttattaaaaagccttagaaagttacatattggtttagaggctaaaattgtgttgatgctgtttactcacctaattacatagttttaatcatttgtacataattttaaaaacttactttgtattgattttgaatacagtgaaaatcttattgcaataaactattttagtaaaatattattttgttgagttaatatttttcagctattaatttacttatcccatagcatttttgttattatttcggaagagagagcatgctagtttaagtttcattttaattggtcgtgtacttggtgcttttttgttgttgttaacttgttcatttagtaaaaagcaaatagctttactttctgaaaaagaaataattcattatctctagtaatacatctgtaattcttcatttagaagggtaattagggcaaaagtaaataaatcattatatatcattagtatgttgacatatattttcagtaacattgttttatgttcctccagcgtaacatgtagctgaacagtagaaggtagaaaataaattatgacatctcttctaaggcctggctaggcctgaagctcactgccagggagtttgtgtctagaatgtttttaaaaataggtagtggagccatagccctcaccatagacacctctgagcccactggcattgtctctgagcagaagatggctgtgccactcacatatgctaatcttggcaaatctgccaagcatgtcttcaccaagggatatggatttggcttaataaaacctgatttgaaaacaaaatctgagaatggattggaatttacaagctcaggctcagccaacactgagaccaccaaagtgacaggcagtctggaaaccaagtacagatagaccgaatatggcctgacatttgcaaagaaatggaacactgacaacacactaggcaccgagattactatggaagaccagttagcatgtggactgaagctgaccctccattcatccttctcgcctaacactgggggaaaagtgctaaaatcaagacaggatacaagtgggagcacattaacctgggctgcgacgtggatttggacattgctgagccttcagtccgaggcactcttaagtgctgggttatgaggattggctggccagctaccaggtcaattttgagaccacaaagtcctgagtgacccagagcaactttgcggttggccacaagactgatgaattccagcttcacactaatgtgaatgacgggacagagtttggcagctccaattagcagaaggtgagcaagaagttggagactgctgtcagtctcgctgggacagcaagaaacaggaacactcgcttcagaatagcagccaagtatcagatcgatcctaaagcccacttctccactaaagtgaacaactccagcctgataggtttaggatacacttaaaccctaaagccaggtttcatactgacactgtcagctctcctgggtggcaagaacatctatgctagtggccacaagcttggtctaggactggaatttcaagcataaatgaatgctgtagaattgtttaaattattttgcagcatagataccttcacaatttagtgtatcttttaatgttgtatggctgggatgcaagtattgctaaatgtcatattggacctccaggttaaagatgattcagctttaaggtgttaccctttcaggggtacagaagaaacccagttccaaaaaggtcccttcagtggtagatttggggaacttggtggcccctgtagagatgccaggtttcttttttatctagaaatggctgcaagtggaagctgataatatataggcaccttgtaaattcatattgagtaaatgaatgaaattgtgatttcctgagaattgaaccttggtttcctaaccctaactgatgagaggcttgttgcttgatggtgtgtacaaatttacctgaaagggaccttttaaagacagatcttcatgacttgttcccatcccaggtcttcattacctcttttacacaaaaagatctacagggtgtggtcactgtttcttttgtgctgttttggggtggagagggtggatgtgatgaagccaataattcaggacttaattccttcctgagttgtggtttttttgtccttgcatcagtgtataaaatagcttccaggagctctagctataagcttggaagagtctgtataattgtaatcacagggtgacagcactcagaatctaaactgggcttatgtggtattctcaccactcaatttattttttagcagtttaatgggtacattttagagtcttccattttgtgtggaattagatcctcttcctcaaatgctgtaattaacttaaaaaaa

SEQ ID NO: 306148 - DNA, 2309 bp, Homo sapiens
gtctaatgaaaaggcactcgggagctatttctgaacggacctgggcttgtcggaccagtgagcggcggcggctgcgcggcggcagcggcagaaagcgtagctgctttgctgtagtccacgcccccttgccgctccggtgacagtctctgcggaaagtcacgtttgtgatttcgggagagcacagaacgggacgacggcgctcttgctgggtcatctgggccaggtgacgaagaaacagtttcctggtgaagcagtccctcacccctagtcagcccacacccctagggcctaaagatgctgaggtctgtatggaattttctgaaacgccacaaaaagaaatgcatcttcctgggcacggtccttggaggagtatatattctggggaaatatggacagaagaaaatcagagaaatacaggaaagggaggctgcagaatacattgcccaagcacgacgacaatatcattttgaaagtaaccagaggacttgcaatatgacagtgctgtccatgcttccaacactgagagaggccttaatgcagcaactgaattccgagagcctcacagctctgctaaaaaacaggccttcaaacaagctagaaatatgggaggatctgaagataataagtttcacaagaagtactgtggctgtatacagtacctgtatgctggttgttcttttgcgggtccagttaaacataattggtggatatatttacctggataatgcagcagttggcaaaaatggcactacaattcttgctcccccagatgtccaacagcagtatttatcaagtattcagcacctacttggagatggcctgacagaattgatcactgtcattaaacaagctgtgcagaaggttttaggaagtgtttctcttaaacattctttgtcccttttggacttggagcaaaaactaaaagaaatcagaaatctcgttgagcagcataagtcttcttcttggattaataaagatggatccaaacctttattatgccattatatgatgccagatgaagaaactccattagcagtgcaggcctgtggactttctcctcgagacattaccactattaaacttctcaatgaaactagagacatgttggaaagcccagattttagtacagttttgaatacctgtttaaaccgaggttttagtagacttctagacaatatggctgagttctttcgacctactgaacaggacctgcaacatggtaactctatgaatagtctttccagtgtcagcctgcctttagctaagataattccaatagtaaacggacagatccattcagtttgcagtgaaacacctagtcattttgttcaggatctgttgacaatggagcaagtgaaagactttgctgctaatgtgtatgaagcttttagtacccctcagcaactggagaaatgatttttccttcaagaaaaactacagtgggattcatttactttttaaaatacactgggtaaatcacctatacttagagtaacagtttgttatcaaaatgcctgataaaatatattcttaataaaagtcttcatttcataatgaaatcaatttatttcctgtttaccaaaaacatcacctctagcatcaccagtattagaggcaccgcctgcccagtgacacatgtttaacggccgcggtaccctaaccgtgcaaaggtagcataatcacttgttccttaaatagggacctgtatgaatggctccacgagggttcagctgtctcttacttttaaccagtgaaattgacctgcccgtgaagaggcgggcatgacacagcaagacgagaagaccctatggagctttaatttattaatgcaaacagtacctaacaaacccacaggtcctaaactaccaaacctgcattaaaaatttcggttggggcgacctcggagcagaacccaacctccgagcagtacatgctaagacttcaccagtcaaagcgaactactatactcaattgatccaataacttgaccaacggaacaagttaccctagggataacagcgcaatcctattctagagtccatatcaacaatagggtttacgacctcgatgttggatcaggacatcccgatggtgcagccgctattaaaggttcgtttgttcaacgattaaagtcctacgtgatctgagttcagaccggagtaatccaggccggtttctatctacttcaaattcctccctgtacgaaaggacaagagaaataaggcctacttcacaaagcgccttcccccgtaaatgatatcatctcaacttagtattatacccacacccacccaagaacagggtttgtt

SEQ ID NO: 306149 - DNA, 4326 bp, Homo sapiens
gtctaatgaaaaggcactcgggagctatttctgaacggacctgggcttgtcggaccagtgagcggcggcggctgcgcggcggcagcggcagaaagcgtagctgctttgctgtagtccacgcccccttgccgctccggtgacagtctctgcggaaagtcacgtttgtgatttcgggagagcacagaacgggacgacggcgctcttgctgggtcatctgggccaggtgacgaagaaacagtttcctggtgaagcagtccctcacccctagtcagcccacacccctagggcctaaagatgctgaggtctgtatggaattttctgaaacgccacaaaaagaaatgcatcttcctgggcacggtccttggaggagtatatattctggggaaatatggacagaagaaaatcagagaaatacaggaaagggaggctgcagaatacattgcccaagcacgacgacaatatcattttgaaagtaaccagaggacttgcaatatgacagtgctgtccatgcttccaacactgagagaggccttaatgcagcaactgaattccgagagcctcacagctctgctaaaaaacaggccttcaaacaagctagaaatatgggaggatctgaagataataagtttcacaagaagtactgtggctgtatacagtacctgtatgctggttgttcttttgcgggtccagttaaacataattggtggatatatttacctggataatgcagcagttggcaaaaatggcactacaattcttgctcccccagatgtccaacagcagtatttatcaagtattcagcacctacttggagatggcctgacagaattgatcactgtcattaaacaagctgtgcagaaggttttaggaagtgtttctcttaaacattctttgtcccttttggacttggagcaaaaactaatggatccaaacctttattatgccattatatgatgccagatgaagaaactccattagcagtgcaggcctgtggactttctcctcgagacattaccactattaaacttctcaatgaaactagagacatgttggaaagcccagattttagtacagttttgaatacctgtttaaaccgaggttttagtagacttctagacaatatggctgagttctttcgacctactgaacaggacctgcaacatggtaactctatgaatagtctttccagtgtcagcctgcctttagctaagataattccaatagtaaacggacagatccattcagtttgcagtgaaacacctagtcattttgttcaggatctgttgacaatggagcaagtgaaagactttgctgctaatgtgtatgaagcttttagtacccctcagcaactggagaaatgatttttccttcaagaaaaactacagtgggattcatttactttttaaaatacactgggtaaatcacctatacttagagtaacagtttgttatcaaaatgcctgataaaatatattcttaataaaagtcttcatttcataatgaaatcaatttatttggcatcttaatatatttttttagattcatcaacagaccagtttttgtgggcatatatatatacacgtgcaaatatcagaattgttaataatttgttacacatggacatttgttccaaactgactaaaaatcaatatagatattttatatacatatatatatatataaatacaaaattcagtgtactttaccatattaatactgaggaaaaatctgttggagacataggtctaggatgtgtgaagtttggaaaaatatgctatttaattataatgttccctagactgctgtaaacagaagtgaatcagacttttctccagctacctttcaaaataataaattatttgtctcaaatataccttgatggaggacttttttattcttatggaaatagtgaattccaacaactatgatgaactatgttctttgctatttcttcactatattttttaaggttttattaaaaagccttagaaagttacatattggtttagaggctaaaattgtgttgatgctgtttactcacctaattacatagttttaatcatttgtacataattttaaaaacttactttgtattgattttgaatacagtgaaaatcttattgcaataaactattttagtaaaatattattttgttgagttaatatttttcagctattaatttacttatcccatagcatttttgttattatttcggaagagagagcatgctagtttaagtttcattttaattggtcgtgtacttggtgcttttttgttgttgttaacttgttcatttagtaaaaagcaaatagctttactttctgaaaaagaaataattcattatctctagtaatacatctgtaattcttcatttagaagggtaattagggcaaaagtaaataaatcattatatatcattagtatgttgacatatattttcagtaacattgttttatgttcctccagcgtaacatgtagctgaacagtagaaggtagaaaataaattatgacatctcttctaaggcctggctaggcctgaagctcactgccagggagtttgtgtctagaatgtttttaaaaataggtagtggagccatagccctcaccatagacacctctgagcccactggcattgtctctgagcagaagatggctgtgccactcacatatgctaatcttggcaaatctgccaagcatgtcttcaccaagggatatggatttggcttaataaaacctgatttgaaaacaaaatctgagaatggattggaatttacaagctcaggctcagccaacactgagaccaccaaagtgacaggcagtctggaaaccaagtacagatagaccgaatatggcctgacatttgcaaagaaatggaacactgacaacacactaggcaccgagattactatggaagaccagttagcatgtggactgaagctgaccctccattcatccttctcgcctaacactgggggaaaagtgctaaaatcaagacaggatacaagtgggagcacattaacctgggctgcgacgtggatttggacattgctgagccttcagtccgaggcactcttaagtgctgggttatgaggattggctggccagctaccaggtcaattttgagaccacaaagtcctgagtgacccagagcaactttgcggttggccacaagactgatgaattccagcttcacactaatgtgaatgacgggacagagtttggcagctccaattagcagaaggtgagcaagaagttggagactgctgtcagtctcgctgggacagcaagaaacaggaacactcgcttcagaatagcagccaagtatcagatcgatcctaaagcccacttctccactaaagtgaacaactccagcctgataggtttaggatacacttaaaccctaaagccaggtttcatactgacactgtcagctctcctgggtggcaagaacatctatgctagtggccacaagcttggtctaggactggaatttcaagcataaatgaatgctgtagaattgtttaaattattttgcagcatagataccttcacaatttagtgtatcttttaatgttgtatggctgggatgcaagtattgctaaatgtcatattggacctccaggttaaagatgattcagctttaaggtgttaccctttcaggggtacagaagaaacccagttccaaaaaggtcccttcagtggtagatttggggaacttggtggcccctgtagagatgccaggtttcttttttatctagaaatggctgcaagtggaagctgataatatataggcaccttgtaaattcatattgagtaaatgaatgaaattgtgatttcctgagaattgaaccttggtttcctaaccctaactgatgagaggcttgttgcttgatggtgtgtacaaatttacctgaaagggaccttttaaagacagatcttcatgacttgttcccatcccaggtcttcattacctcttttacacaaaaagatctacagggtgtggtcactgtttcttttgtgctgttttggggtggagagggtggatgtgatgaagccaataattcaggacttaattccttcctgagttgtggtttttttgtccttgcatcagtgtataaaatagcttccaggagctctagctataagcttggaagagtctgtataattgtaatcacagggtgacagcactcagaatctaaactgggcttatgtggtattctcaccactcaatttattttttagcagtttaatgggtacattttagagtcttccattttgtgtggaattagatcctcttcctcaaatgctgtaattaacttaaaaaaa

SEQ ID NO: 306150 - DNA, 4249 bp, Homo sapiens
gtctaatgaaaaggcactcgggagctatttctgaacggacctgggcttgtcggaccagtgagcggcggcggctgcgcggcggcagcggcagaaagcgtagctgctttgctgtagtccacgcccccttgccgctccggtgacagtctctgcggaaagtcacgtttgtgatttcgggagagcacagaacgggacgacggcgctcttgctgggtcatctgggccaggtgacgaagaaacagtttcctggtgaagcagtccctcacccctagtcagcccacacccctagggcctaaagatgctgaggtctgtatggaattttctgaaacgccacaaaaagaaatgcatcttcctgggcacggtccttggagtgctgtccatgcttccaacactgagagaggccttaatgcagcaactgaattccgagagcctcacagctctgctaaaaaacaggccttcaaacaagctagaaatatgggaggatctgaagataataagtttcacaagaagtactgtggctgtatacagtacctgtatgctggttgttcttttgcgggtccagttaaacataattggtggatatatttacctggataatgcagcagttggcaaaaatggcactacaattcttgctcccccagatgtccaacagcagtatttatcaagtattcagcacctacttggagatggcctgacagaattgatcactgtcattaaacaagctgtgcagaaggttttaggaagtgtttctcttaaacattctttgtcccttttggacttggagcaaaaactaaaagaaatcagaaatctcgttgagcagcataagtcttcttcttggattaataaagatggatccaaacctttattatgccattatatgatgccagatgaagaaactccattagcagtgcaggcctgtggactttctcctcgagacattaccactattaaacttctcaatgaaactagagacatgttggaaagcccagattttagtacagttttgaatacctgtttaaaccgaggttttagtagacttctagacaatatggctgagttctttcgacctactgaacaggacctgcaacatggtaactctatgaatagtctttccagtgtcagcctgcctttagctaagataattccaatagtaaacggacagatccattcagtttgcagtgaaacacctagtcattttgttcaggatctgttgacaatggagcaagtgaaagactttgctgctaatgtgtatgaagcttttagtacccctcagcaactggagaaatgatttttccttcaagaaaaactacagtgggattcatttactttttaaaatacactgggtaaatcacctatacttagagtaacagtttgttatcaaaatgcctgataaaatatattcttaataaaagtcttcatttcataatgaaatcaatttatttggcatcttaatatatttttttagattcatcaacagaccagtttttgtgggcatatatatatacacgtgcaaatatcagaattgttaataatttgttacacatggacatttgttccaaactgactaaaaatcaatatagatattttatatacatatatatatatataaatacaaaattcagtgtactttaccatattaatactgaggaaaaatctgttggagacataggtctaggatgtgtgaagtttggaaaaatatgctatttaattataatgttccctagactgctgtaaacagaagtgaatcagacttttctccagctacctttcaaaataataaattatttgtctcaaatataccttgatggaggacttttttattcttatggaaatagtgaattccaacaactatgatgaactatgttctttgctatttcttcactatattttttaaggttttattaaaaagccttagaaagttacatattggtttagaggctaaaattgtgttgatgctgtttactcacctaattacatagttttaatcatttgtacataattttaaaaacttactttgtattgattttgaatacagtgaaaatcttattgcaataaactattttagtaaaatattattttgttgagttaatatttttcagctattaatttacttatcccatagcatttttgttattatttcggaagagagagcatgctagtttaagtttcattttaattggtcgtgtacttggtgcttttttgttgttgttaacttgttcatttagtaaaaagcaaatagctttactttctgaaaaagaaataattcattatctctagtaatacatctgtaattcttcatttagaagggtaattagggcaaaagtaaataaatcattatatatcattagtatgttgacatatattttcagtaacattgttttatgttcctccagcgtaacatgtagctgaacagtagaaggtagaaaataaattatgacatctcttctaaggcctggctaggcctgaagctcactgccagggagtttgtgtctagaatgtttttaaaaataggtagtggagccatagccctcaccatagacacctctgagcccactggcattgtctctgagcagaagatggctgtgccactcacatatgctaatcttggcaaatctgccaagcatgtcttcaccaagggatatggatttggcttaataaaacctgatttgaaaacaaaatctgagaatggattggaatttacaagctcaggctcagccaacactgagaccaccaaagtgacaggcagtctggaaaccaagtacagatagaccgaatatggcctgacatttgcaaagaaatggaacactgacaacacactaggcaccgagattactatggaagaccagttagcatgtggactgaagctgaccctccattcatccttctcgcctaacactgggggaaaagtgctaaaatcaagacaggatacaagtgggagcacattaacctgggctgcgacgtggatttggacattgctgagccttcagtccgaggcactcttaagtgctgggttatgaggattggctggccagctaccaggtcaattttgagaccacaaagtcctgagtgacccagagcaactttgcggttggccacaagactgatgaattccagcttcacactaatgtgaatgacgggacagagtttggcagctccaattagcagaaggtgagcaagaagttggagactgctgtcagtctcgctgggacagcaagaaacaggaacactcgcttcagaatagcagccaagtatcagatcgatcctaaagcccacttctccactaaagtgaacaactccagcctgataggtttaggatacacttaaaccctaaagccaggtttcatactgacactgtcagctctcctgggtggcaagaacatctatgctagtggccacaagcttggtctaggactggaatttcaagcataaatgaatgctgtagaattgtttaaattattttgcagcatagataccttcacaatttagtgtatcttttaatgttgtatggctgggatgcaagtattgctaaatgtcatattggacctccaggttaaagatgattcagctttaaggtgttaccctttcaggggtacagaagaaacccagttccaaaaaggtcccttcagtggtagatttggggaacttggtggcccctgtagagatgccaggtttcttttttatctagaaatggctgcaagtggaagctgataatatataggcaccttgtaaattcatattgagtaaatgaatgaaattgtgatttcctgagaattgaaccttggtttcctaaccctaactgatgagaggcttgttgcttgatggtgtgtacaaatttacctgaaagggaccttttaaagacagatcttcatgacttgttcccatcccaggtcttcattacctcttttacacaaaaagatctacagggtgtggtcactgtttcttttgtgctgttttggggtggagagggtggatgtgatgaagccaataattcaggacttaattccttcctgagttgtggtttttttgtccttgcatcagtgtataaaatagcttccaggagctctagctataagcttggaagagtctgtataattgtaatcacagggtgacagcactcagaatctaaactgggcttatgtggtattctcaccactcaatttattttttagcagtttaatgggtacattttagagtcttccattttgtgtggaattagatcctcttcctcaaatgctgtaattaacttaaaaaaa

SEQ ID NO: 306151 - DNA, 3862 bp, Homo sapiens
agaatatctgattgggtataggcaagagaaagaagtgccagggataatgcccatatttgctgcttctagaacctgatagataatggtgtggttcactggagtaggggggaaatactcaacattgttagtaattaagagaaatgcagatttaacctgtaagatactattttcacctatcagatgtgaaagattaaagaaaaggataatgttggatgttgaaagaaggcataatggagcagatacattcataccctttgacccagtgatttcatgtttatacaaaatcttacttagattaagaaaatttaggcaaaaactgaaatgcccaactctagggaactcatgatataaattgtcacagctagaggacagattactgtatagtcattaaaaaacaatcagacaaacactttagaacttttaataagatggaaaatactcataacaataaaaatgcaaaaacagtgtgcttaggaggttagaggtttttggtagacacaaaaaaacaaagatatgtgtaaaaaaacgccaaaagaaattggtcatgatgtcaattagagttgttatttctaagcgatagaattgtggggttttttttcctttttaatagatttccaaaaatattctacaatggctatgtattacttttataattaagatgttaaagtcctgtggggtcatttcagaaaataatcattactgtaatgatttttcagtctttccagtgtcagcctgcctttagctaagataattccaatagtaaacggacagatccattcagtttgcagtgaaacacctagtcattttgttcaggatctgttgacaatggagcaagtgaaagactttgctgctaatgtgtatgaagcttttagtacccctcagcaactggagaaatgatttttccttcaagaaaaactacagtgggattcatttactttttaaaatacactgggtaaatcacctatacttagagtaacagtttgttatcaaaatgcctgataaaatatattcttaataaaagtcttcatttcataatgaaatcaatttatttggcatcttaatatatttttttagattcatcaacagaccagtttttgtgggcatatatatatacacgtgcaaatatcagaattgttaataatttgttacacatggacatttgttccaaactgactaaaaatcaatatagatattttatatacatatatatatatataaatacaaaattcagtgtactttaccatattaatactgaggaaaaatctgttggagacataggtctaggatgtgtgaagtttggaaaaatatgctatttaattataatgttccctagactgctgtaaacagaagtgaatcagacttttctccagctacctttcaaaataataaattatttgtctcaaatataccttgatggaggacttttttattcttatggaaatagtgaattccaacaactatgatgaactatgttctttgctatttcttcactatattttttaaggttttattaaaaagccttagaaagttacatattggtttagaggctaaaattgtgttgatgctgtttactcacctaattacatagttttaatcatttgtacataattttaaaaacttactttgtattgattttgaatacagtgaaaatcttattgcaataaactattttagtaaaatattattttgttgagttaatatttttcagctattaatttacttatcccatagcatttttgttattatttcggaagagagagcatgctagtttaagtttcattttaattggtcgtgtacttggtgcttttttgttgttgttaacttgttcatttagtaaaaagcaaatagctttactttctgaaaaagaaataattcattatctctagtaatacatctgtaattcttcatttagaagggtaattagggcaaaagtaaataaatcattatatatcattagtatgttgacatatattttcagtaacattgttttatgttcctccagcgtaacatgtagctgaacagtagaaggtagaaaataaattatgacatctcttctaaggcctggctaggcctgaagctcactgccagggagtttgtgtctagaatgtttttaaaaataggtagtggagccatagccctcaccatagacacctctgagcccactggcattgtctctgagcagaagatggctgtgccactcacatatgctaatcttggcaaatctgccaagcatgtcttcaccaagggatatggatttggcttaataaaacctgatttgaaaacaaaatctgagaatggattggaatttacaagctcaggctcagccaacactgagaccaccaaagtgacaggcagtctggaaaccaagtacagatagaccgaatatggcctgacatttgcaaagaaatggaacactgacaacacactaggcaccgagattactatggaagaccagttagcatgtggactgaagctgaccctccattcatccttctcgcctaacactgggggaaaagtgctaaaatcaagacaggatacaagtgggagcacattaacctgggctgcgacgtggatttggacattgctgagccttcagtccgaggcactcttaagtgctgggttatgaggattggctggccagctaccaggtcaattttgagaccacaaagtcctgagtgacccagagcaactttgcggttggccacaagactgatgaattccagcttcacactaatgtgaatgacgggacagagtttggcagctccaattagcagaaggtgagcaagaagttggagactgctgtcagtctcgctgggacagcaagaaacaggaacactcgcttcagaatagcagccaagtatcagatcgatcctaaagcccacttctccactaaagtgaacaactccagcctgataggtttaggatacacttaaaccctaaagccaggtttcatactgacactgtcagctctcctgggtggcaagaacatctatgctagtggccacaagcttggtctaggactggaatttcaagcataaatgaatgctgtagaattgtttaaattattttgcagcatagataccttcacaatttagtgtatcttttaatgttgtatggctgggatgcaagtattgctaaatgtcatattggacctccaggttaaagatgattcagctttaaggtgttaccctttcaggggtacagaagaaacccagttccaaaaaggtcccttcagtggtagatttggggaacttggtggcccctgtagagatgccaggtttcttttttatctagaaatggctgcaagtggaagctgataatatataggcaccttgtaaattcatattgagtaaatgaatgaaattgtgatttcctgagaattgaaccttggtttcctaaccctaactgatgagaggcttgttgcttgatggtgtgtacaaatttacctgaaagggaccttttaaagacagatcttcatgacttgttcccatcccaggtcttcattacctcttttacacaaaaagatctacagggtgtggtcactgtttcttttgtgctgttttggggtggagagggtggatgtgatgaagccaataattcaggacttaattccttcctgagttgtggtttttttgtccttgcatcagtgtataaaatagcttccaggagctctagctataagcttggaagagtctgtataattgtaatcacagggtgacagcactcagaatctaaactgggcttatgtggtattctcaccactcaatttattttttagcagtttaatgggtacattttagagtcttccattttgtgtggaattagatcctcttcctcaaatgctgtaattaacttaaaaaaa

SEQ ID NO: 306152 - DNA, 521 bp, Homo sapiens
gctgggtcatctgggccaggtgacgaagaaacagtttcctggtgaagcagtccctcacccctagtcagcccacacccctagggcctaaagatgctgaggtctgtatggaattttctgaaacgccacaaaaagaaatgcatcttcctgggcacggtccttggaggtgggtgacaacgtgcttgaaagggggcattgggagaagggggtgggagaggtgacttcttctaaaataaggacaggccgggcgatcctagtctgggatatgtagagggagttcgatcaaccatgggatgaaaagggaggtggccaacctccagggttctcccatctctgcagttgagaaatgcctctgtgccctttgccctgtcaccgactcttaactctgtttctcacctatccttttttctcacggacctttggagaactcatcacagtttaagtttctgtttcaaggcaccattctcttacaggaactttttaaaaaaaattctgctttcctgtgagattctgcatttctcctt

SEQ ID NO: 306153 - DNA, 395 bp, Homo sapiens
cagggatgttctctcctcctgaacaggtttgctcatcattgctttgggcaaaaagagccattctctgacctttcagccctagaccctagccgggcagatgatggagaaatggttagatggagaaatggttagaggatgggcaggcaggagacaaataggctctccaccacctttgtacaaatatttcagaaagtcattgtgttaggacgctctggagttatgaaacacatgcagcctttagagaacttctggttccattcttgcatcttaaaactaggacctggaagtctgcacaacccttgatatttattaacatttactgctcacctgttgtgtgggaagtcctatgccatgcatgtcgttcacattaacttgtgcaattctcaaaacaaccc

SEQ ID NO: 306154 - DNA, 563 bp, Homo sapiens
aaaggactcacacggatgcggaaaccgagacgggctggatggaaaactctttccagacagactccggggccctcaactggtctccgaccttcccctgcaacctgcgacacctgccattttcccatcttaggctccagaagcagaatcaagtgggatgtcttggaagaaaaacaaacaaaaggcccactaggtggagtgaaatggatcaggagcaattatgttcaatttcacctttaagttttctcaaaaggaggagcattaagaatcagccaccttagtacatacttaaagatttactgaaacctgatcctgtccccgctgatgaaacatcagaggaatgggatcctgtaggtgaagatcatcagcttataaaatcctgttgccatcaatgggggtagcaggaaaatgatgaagattggttaaggggccagtggactcagcattgaaatgaatcatggacttgaagccaaaagactcagtttgtgtcccagctctctcaagcaaagcccccaagtcccagtttcctcatctataaaaaataataaaaatacttaatggacaaa

SEQ ID NO: 306155 - DNA, 598 bp, Homo sapiens
aaaggactcacacggatgcggaaaccgagacgggctggatggaaaactctttccagacagactccggggccctcaactggtctccgaccttcccctgcaacctgcgacacctgccattttcccatcttaggctccagaagcagaatcaagtgggatgtcttggaagaaaaacaaacaaaaggcccactaggtggagtgaaatggatcaggagcaattatgttcaatttcacctttaagttttctcaaaaggaggagcattaagaatcagccaccttagtacatacttaaagaattatcctcagactttccagttttaatcttctagatttactgaaacctgatcctgtccccgctgatgaaacatcagaggaatgggatcctgtaggtgaagatcatcagcttataaaatcctgttgccatcaatgggggtagcaggaaaatgatgaagattggttaaggggccagtggactcagcattgaaatgaatcatggacttgaagccaaaagactcagtttgtgtcccagctctctcaagcaaagcccccaagtcccagtttcctcatctataaaaaataataaaaatacttaatggacaaa

SEQ ID NO: 306156 - DNA, 474 bp, Homo sapiens
ttttctcaaaaggaggagcattaagaatcagccaccttagtacatacttaaaggtaaatattacatttaagaaaatccttgttatcttaatgtggcactgagaaaatactatcaagtacagcacgtggactaagttagaacattaaatacacaggatctcttgatagaattatcctcagactttccagttttaatcttctagatttactgaaacctgatcctgtccccgctgatgaaacatcagaggaatgggatcctgtaggtgaagatcatcagcttataaaatcctgttgccatcaatgggggtagcaggaaaatgatgaagattggttaaggggccagtggactcagcattgaaatgaatcatggacttgaagccaaaagactcagtttgtgtcccagctctctcaagcaaagcccccaagtcccagtttcctcatctataaaaaataataaaaatacttaatggacaaa

SEQ ID NO: 306157 - DNA, 559 bp, Homo sapiens
aggagaaaatatttgcaagtcatctatctgataagggattaatgtacagaatatatagaacactcttcaaacaacaataaaaaaaatcaaattacccaatttaaaaataggcaaaggacttgaatggacgtttctccaagatatacaaatggttagtaagcacatgaaaagagactcaactcttttttgctagggaaatgcaacccaagaatacaacacagcaccacctcacccccattagggtggcttctatgatcagaaatcggaatccgtgggcactgttgatgggaatggaaaatggtcagccactgtggaaaacagtacggcagtgcctcaaaaacttaaaaatggaattaccgtgtaatctaataatcttatttattggcgtatatgtacagaaattgaaagaagggtcttgaagagatattcatacccccatattcagactactcttattcacaatagctggactgcagaaggaacccaagtgtctgttgatgttgaatggatacacaaaagctggtttatacatacaataaaatattattctaaaaaaaaa

SEQ ID NO: 306158 - DNA, 969 bp, Homo sapiens
tgggatgaaatcttacacatcttactttgtcccttcctcatcacaggaagaaggatgggtacagtacaataaaatattgaataaataagcaaattcaataaagtagcaggatccgaagtcaacacacaaaaaatattcattttttctattatgtgcaataacaatgaatgatctagaaaggaaatttaaaaaacaattccatttacaatagaatagcataaaaaagcataaaatacttaggaatgaatttaaccaaggagttgaaagacttatacaatgaaaactacaaaatagttctgaaagaaattaaaggagacacaaaaacctggaagacatcccatgttcacagattgaaaaaagtattgttaagatgtcaataataccgaatatgatatgcagatttaatgcaatcgttgtgaaaatccaaaagatatttctttttttgcagaaatagaaaaagctatcctaaaatttatatgaaacctcaagggaccccgattaaccaaacaatcctgaaaaataagaataaagctggagttctctcacttcttgatttcaaaaaatacatatgttacaataatcgagagagtgaggtacaaagacaaacatataaaccattggaatagaataaaagtccagaaataaagtcttgtatatatgtgtaaatgatttttgatgagtgtgtcaggatcgttcaatgaggaaaagacagtctttttaagaaatgatactgggaaaactggctatccacatgcaaaagaataaagttggacccttacctaacaccaaaaataaaaattaactcaaaatggatctatgacctaaatgtagaccaaaaactataaaactcttagaagacaacatagggcaaaaactttatgacatcagatttggcaatgatttcgtcattattacaccaaaggcatacatacgtaacaaaggaaaaaatatacaagttggactttatga

SEQ ID NO: 306159 - DNA, 295 bp, Homo sapiens
gtctcaaaaaaaataaaaattaaaaaattaaaatactaaatattcatgactgaaattatgtaaattaagtagagatgtaatttttctaaataaacattatagtatccttataccacattaataactaaaaaggcatcagaatttttaaaattcactttactggtataaatttatgggcaatcggaaaaataagactacataaacacaaaacatatcacagctcaattcaattttttgcaatttggctaagtctataaaacatattttgaacttcaagtcatctccttgcttatcc

SEQ ID NO: 306160 - DNA, 519 bp, Homo sapiens
aaaagacattcaaaaaagaaaataagaattgtgctcgaaagaattagggcacgagacagacagcacctgtgtggtcaattctggacacttcccagagaagtctttgagtagagaatcctactcaaatttcactgtatattttaagcattcctctcctttccctttgcctcccctgttgccttttcttcccctgatttctcctctggtcatctcctctcccttctgcgtgtaagccatgggaaagggatgagggaggacagcttctggttaaacacaggtccctcttccacatcaaatgaacattggcttcctgggacagaaggccttcaaaggagggattgcaaagcaaggcaaagcgttctgtcttcattttccccatccccatgagacaagactgatggaaagggtggtggggcaacactgcttaatggatgccttttcacatcatttcagtttttagccctcatgactgtattttctaatcagagacaataacattttaaataaaacaacgacaaa

SEQ ID NO: 306161 - DNA, 2901 bp, Homo sapiens
tttttttgagacagggtctagctctatggcccaggctggagtgcagtggcacaatcatagctcactgcagcctcaactttctgtgctcgagtgattctcctgcctcagtctcctgagtagctgggaccacagacgtgcactaccacacttggctaattttattttttcagagatcacatgtggtttgagggaggatagagaggacagggtgtcaagaacagcatttttaccaagttgatataaaaatgaaacaggatccaggcatgggtctttacactgatagttacagtaagttttaaaatctgagcagcaatttgaatcacttcttgaaaaacacacaaaatatattttttgtagaggtgggggtcttgctctgttgcccaggctggtcttgaactcgagattctcctgctttggcctcccacaagtgctgggattacaggcgtgagctactgcacccggcctgctttctttttagtgaaaaggatctgtgggagcttttattcccatggctgccttcctcaagtcaacctctttccccggaaatggcatcatctctggactgttgtttctccttcttccttctcctccttctcctcctcctcctcctccaccatgcccggctgatttttgtatttttagtagagacagggtttcactatatgggccaggcagatctcgaactccaaacctcgtgatccacctaccttggcctctgaaagtgctgggataccgtggcctctgaaagtgctgggattacaggcatgagccaccgcgcccggccccgttgtttcccttctaagaaacgcagtggtctctgaagcctgcaggggcaggccagccctgcactgaacgcctgttcttgccaggtggcagaaggttgctgctcatttgagcagtacctgtcacccctcctcccactgctgcggctgttaactcatcttcaggtctcacaccttctgcacataaataagctatttttaaaagttattatttttttactctttcttttctttggagagggtaccaaaggatagctgttctgtttaagtagggacctctcatggcctacaggctttgacatctgagaatcaaactggagaacattccgaagccgttcttataagtgtctccatctctacctgggctgaaatggaatgtgcaaatgtagcccagcctggtccttgggtgttgccagttgattgatgactgggagccaaagtggcatctcctttgacctaaacgggcgatgatgaaataaaactcaacagcctttctctcatcttgcattgtgagatgcgaaatagagcgtgtctctctgcctctcattttaggctgaggccgtccaaagcggccatgccccatgtttccactagatggcgctgacacttcaggcatcaaccctcatggcctctcagccttgcaaaggcagccacttaaagtcggtgtcctgtgtggggcaccaagctgagctgcagacacccagtaggcgcgaggcaaatgcgtcccattttaagaggcttgtatttatgagctctttgcttcctccctcccactaactttaaagaattgctctccatctcctttggcaaagttcctttgccctttgtcttatttttgtgaaaccctccaaggtatttccagtccatttgcatccaatctggcatctttacggagagcggtctcatatgctattgttgttaacgtggactagtatttatgtgttgagaacactggctgtttgtcaggaaaagtgtgccaaaacaaagagtacggccggccctggaaatgcatcagcaaaacccatttcccccgtgcactcattctgagcttccttccttcatttctgtcattactgctgagaactggactgtgcccagctgacctttcccttccttgccctcatcttgctgccagggtctgcaggtttgccaccgtcccggccccagtctgaaacatgggattatttcagaattggaggtggcagcttcagaaaaaaatccttctcgtgtgttgactgctgagatccaggaactgggaaatcaacccccagtttgtagattgctctctttggaaattctgtggcccaacctcgtggctgttttctggaattccttctatcggggcagacagtgctgtgcctttcttgacttcaggatgttccaaggatgctgctggatctgtgtgtgtgtgtgtgtgtgtgtgtgtgtgtgtgtgtgcgtgcgtgcgtgtatgtgcgcctgaccctgatttctgcaacctccagatttctttcttgacccttcaaagtggaacagtccagtgccaaaaattttagagtttgagaaggtcacagaaatcctctagttggtgcctccacagtcttcattttacagaggaactcagggctaatggagttaatgcaactagatcagggttttgggtctgtgttctttctaccgtcagcacctgtgtggtcaattctggacacttcccagagaagtctttgagtagagaatcctactcaaatttcactgtatattttaagcattcctctcctttccctttgcctcccctgttgccttttcttcccctgatttctcctctggtcatctcctctcccttctgcgtgtaagccatgggaaagggatgagggaggacagcttctggttaaacacaggtccctcttccacatcaaatgaacattggcttcctgggacagaaggccttcaaaggagggattgcaaagcaaggcaaagcgttctgtcttcattttccccatccccatgagacaagactgatggaaagggtggtggggcaacactgcttaatggatgccttttcacatcatttcagtttttagccctcatgactgtattttctaatcagagacaataacattttaaataaaacaacgacaaa

SEQ ID NO: 306162 - DNA, 2977 bp, Homo sapiens
ctagagatccccggacagggtgtcaagaacagcatttgtaccaagttgatataaaaatgaaacaggatccaggcatgggtctttacactgatagttacagtaagttttaaaatctgagcagccatttgaatcacttcctgaaaaacacaccaaatatattttttgtagaggtgggggtcttgctctgttgcccaggctgggaccacagacgtgcactaccacacttggctaattttattttttcagagatcacatgtggtttgagggaggatagagaggacagggtgtcaagaacagcatttttaccaagttgatataaaaatgaaacaggatccaggcatgggtctttacactgatagttacagtaagttttaaaatctgagcagcaatttgaatcacttcttgaaaaacacacaaaatatattttttgtagaggtgggggtcttgctctgttgcccaggctggtcttgaactcgagattctcctgctttggcctcccacaagtgctgggattacaggcgtgagctactgcacccggcctgctttctttttagtgaaaaggatctgtgggagcttttattcccatggctgccttcctcaagtcaacctctttccccggaaatggcatcatctctggactgttgtttctccttcttccttctcctccttctcctcctcctcctcctccaccatgcccggctgatttttgtatttttagtagagacagggtttcactatatgggccaggcagatctcgaactccaaacctcgtgatccacctaccttggcctctgaaagtgctgggataccgtggcctctgaaagtgctgggattacaggcatgagccaccgcgcccggccccgttgtttcccttctaagaaacgcagtggtctctgaagcctgcaggggcaggccagccctgcactgaacgcctgttcttgccaggtggcagaaggttgctgctcatttgagcagtacctgtcacccctcctcccactgctgcggctgttaactcatcttcaggtctcacaccttctgcacataaataagctatttttaaaagttattatttttttactctttcttttctttggagagggtaccaaaggatagctgttctgtttaagtagggacctctcatggcctacaggctttgacatctgagaatcaaactggagaacattccgaagccgttcttataagtgtctccatctctacctgggctgaaatggaatgtgcaaatgtagcccagcctggtccttgggtgttgccagttgattgatgactgggagccaaagtggcatctcctttgacctaaacgggcgatgatgaaataaaactcaacagcctttctctcatcttgcattgtgagatgcgaaatagagcgtgtctctctgcctctcattttaggctgaggccgtccaaagcggccatgccccatgtttccactagatggcgctgacacttcaggcatcaaccctcatggcctctcagccttgcaaaggcagccacttaaagtcggtgtcctgtgtggggcaccaagctgagctgcagacacccagtaggcgcgaggcaaatgcgtcccattttaagaggcttgtatttatgagctctttgcttcctccctcccactaactttaaagaattgctctccatctcctttggcaaagttcctttgccctttgtcttatttttgtgaaaccctccaaggtatttccagtccatttgcatccaatctggcatctttacggagagcggtctcatatgctattgttgttaacgtggactagtatttatgtgttgagaacactggctgtttgtcaggaaaagtgtgccaaaacaaagagtacggccggccctggaaatgcatcagcaaaacccatttcccccgtgcactcattctgagcttccttccttcatttctgtcattactgctgagaactggactgtgcccagctgacctttcccttccttgccctcatcttgctgccagggtctgcaggtttgccaccgtcccggccccagtctgaaacatgggattatttcagaattggaggtggcagcttcagaaaaaaatccttctcgtgtgttgactgctgagatccaggaactgggaaatcaacccccagtttgtagattgctctctttggaaattctgtggcccaacctcgtggctgttttctggaattccttctatcggggcagacagtgctgtgcctttcttgacttcaggatgttccaaggatgctgctggatctgtgtgtgtgtgtgtgtgtgtgtgtgtgtgtgtgtgtgcgtgcgtgcgtgtatgtgcgcctgaccctgatttctgcaacctccagatttctttcttgacccttcaaagtggaacagtccagtgccaaaaattttagagtttgagaaggtcacagaaatcctctagttggtgcctccacagtcttcattttacagaggaactcagggctaatggagttaatgcaactagatcagggttttgggtctgtgttctttctaccgtcagcacctgtgtggtcaattctggacacttcccagagaagtctttgagtagagaatcctactcaaatttcactgtatattttaagcattcctctcctttccctttgcctcccctgttgccttttcttcccctgatttctcctctggtcatctcctctcccttctgcgtgtaagccatgggaaagggatgagggaggacagcttctggttaaacacaggtccctcttccacatcaaatgaacattggcttcctgggacagaaggccttcaaaggagggattgcaaagcaaggcaaagcgttctgtcttcattttccccatccccatgagacaagactgatggaaagggtggtggggcaacactgcttaatggatgccttttcacatcatttcagtttttagccctcatgactgtattttctaatcagagacaataacattttaaataaaacaacgacaaa

SEQ ID NO: 306163 - DNA, 2725 bp, Homo sapiens
tgtcatgagtggaaacacgcgtctcaccgtgtcacccaggacatagagcgcagtggtgtcatcttggctcattgcagcctcccaggctcaagatgatcctcccatctcaagccgtctgagatagctgagaccaagatgcacgtcaccatgcttggctaattttttaaccttttgtggagatggggtctctatattacccaagctagtctcaaactcttgggctcaagcaatcctgactcagtctcccacaagtgctgggattacaggcgtgagctactgcacccggcctgctttctttttagtgaaaaggatctgtgggagcttttattcccatggctgccttcctcaagtcaacctctttccccggaaatggcatcatctctggactgttgtttctccttcttccttctcctccttctcctcctcctcctcctccaccatgcccggctgatttttgtatttttagtagagacagggtttcactatatgggccaggcagatctcgaactccaaacctcgtgatccacctaccttggcctctgaaagtgctgggataccgtggcctctgaaagtgctgggattacaggcatgagccaccgcgcccggccccgttgtttcccttctaagaaacgcagtggtctctgaagcctgcaggggcaggccagccctgcactgaacgcctgttcttgccaggtggcagaaggttgctgctcatttgagcagtacctgtcacccctcctcccactgctgcggctgttaactcatcttcaggtctcacaccttctgcacataaataagctatttttaaaagttattatttttttactctttcttttctttggagagggtaccaaaggatagctgttctgtttaagtagggacctctcatggcctacaggctttgacatctgagaatcaaactggagaacattccgaagccgttcttataagtgtctccatctctacctgggctgaaatggaatgtgcaaatgtagcccagcctggtccttgggtgttgccagttgattgatgactgggagccaaagtggcatctcctttgacctaaacgggcgatgatgaaataaaactcaacagcctttctctcatcttgcattgtgagatgcgaaatagagcgtgtctctctgcctctcattttaggctgaggccgtccaaagcggccatgccccatgtttccactagatggcgctgacacttcaggcatcaaccctcatggcctctcagccttgcaaaggcagccacttaaagtcggtgtcctgtgtggggcaccaagctgagctgcagacacccagtaggcgcgaggcaaatgcgtcccattttaagaggcttgtatttatgagctctttgcttcctccctcccactaactttaaagaattgctctccatctcctttggcaaagttcctttgccctttgtcttatttttgtgaaaccctccaaggtatttccagtccatttgcatccaatctggcatctttacggagagcggtctcatatgctattgttgttaacgtggactagtatttatgtgttgagaacactggctgtttgtcaggaaaagtgtgccaaaacaaagagtacggccggccctggaaatgcatcagcaaaacccatttcccccgtgcactcattctgagcttccttccttcatttctgtcattactgctgagaactggactgtgcccagctgacctttcccttccttgccctcatcttgctgccagggtctgcaggtttgccaccgtcccggccccagtctgaaacatgggattatttcagaattggaggtggcagcttcagaaaaaaatccttctcgtgtgttgactgctgagatccaggaactgggaaatcaacccccagtttgtagattgctctctttggaaattctgtggcccaacctcgtggctgttttctggaattccttctatcggggcagacagtgctgtgcctttcttgacttcaggatgttccaaggatgctgctggatctgtgtgtgtgtgtgtgtgtgtgtgtgtgtgtgtgtgtgcgtgcgtgcgtgtatgtgcgcctgaccctgatttctgcaacctccagatttctttcttgacccttcaaagtggaacagtccagtgccaaaaattttagagtttgagaaggtcacagaaatcctctagttggtgcctccacagtcttcattttacagaggaactcagggctaatggagttaatgcaactagatcagggttttgggtctgtgttctttctaccgtcagcacctgtgtggtcaattctggacacttcccagagaagtctttgagtagagaatcctactcaaatttcactgtatattttaagcattcctctcctttccctttgcctcccctgttgccttttcttcccctgatttctcctctggtcatctcctctcccttctgcgtgtaagccatgggaaagggatgagggaggacagcttctggttaaacacaggtccctcttccacatcaaatgaacattggcttcctgggacagaaggccttcaaaggagggattgcaaagcaaggcaaagcgttctgtcttcattttccccatccccatgagacaagactgatggaaagggtggtggggcaacactgcttaatggatgccttttcacatcatttcagtttttagccctcatgactgtattttctaatcagagacaataacattttaaataaaacaacgacaaa

SEQ ID NO: 306164 - DNA, 2764 bp, Homo sapiens
tttacttacttgattttataatcgtgtatcttttacactgatgatctctcttttttttttaatgtcacccaggctggaatgcagtggcacaatcttggttcactgcaatctccacctcccaggctcaagtgatcctcccaccccagcctcccgagtagatggcactacaggcatgtgccaccacgcctggctaatttttgtatttttagtacagacgaggtttcaccatgttgaccaggctggtcttgaactcctgatcttaagtgatctgcccgccttggcctcccaaagtgctgggattacgggcgtgagctactgcacccggcctgctttctttttagtgaaaaggatctgtgggagcttttattcccatggctgccttcctcaagtcaacctctttccccggaaatggcatcatctctggactgttgtttctccttcttccttctcctccttctcctcctcctcctcctccaccatgcccggctgatttttgtatttttagtagagacagggtttcactatatgggccaggcagatctcgaactccaaacctcgtgatccacctaccttggcctctgaaagtgctgggataccgtggcctctgaaagtgctgggattacaggcatgagccaccgcgcccggccccgttgtttcccttctaagaaacgcagtggtctctgaagcctgcaggggcaggccagccctgcactgaacgcctgttcttgccaggtggcagaaggttgctgctcatttgagcagtacctgtcacccctcctcccactgctgcggctgttaactcatcttcaggtctcacaccttctgcacataaataagctatttttaaaagttattatttttttactctttcttttctttggagagggtaccaaaggatagctgttctgtttaagtagggacctctcatggcctacaggctttgacatctgagaatcaaactggagaacattccgaagccgttcttataagtgtctccatctctacctgggctgaaatggaatgtgcaaatgtagcccagcctggtccttgggtgttgccagttgattgatgactgggagccaaagtggcatctcctttgacctaaacgggcgatgatgaaataaaactcaacagcctttctctcatcttgcattgtgagatgcgaaatagagcgtgtctctctgcctctcattttaggctgaggccgtccaaagcggccatgccccatgtttccactagatggcgctgacacttcaggcatcaaccctcatggcctctcagccttgcaaaggcagccacttaaagtcggtgtcctgtgtggggcaccaagctgagctgcagacacccagtaggcgcgaggcaaatgcgtcccattttaagaggcttgtatttatgagctctttgcttcctccctcccactaactttaaagaattgctctccatctcctttggcaaagttcctttgccctttgtcttatttttgtgaaaccctccaaggtatttccagtccatttgcatccaatctggcatctttacggagagcggtctcatatgctattgttgttaacgtggactagtatttatgtgttgagaacactggctgtttgtcaggaaaagtgtgccaaaacaaagagtacggccggccctggaaatgcatcagcaaaacccatttcccccgtgcactcattctgagcttccttccttcatttctgtcattactgctgagaactggactgtgcccagctgacctttcccttccttgccctcatcttgctgccagggtctgcaggtttgccaccgtcccggccccagtctgaaacatgggattatttcagaattggaggtggcagcttcagaaaaaaatccttctcgtgtgttgactgctgagatccaggaactgggaaatcaacccccagtttgtagattgctctctttggaaattctgtggcccaacctcgtggctgttttctggaattccttctatcggggcagacagtgctgtgcctttcttgacttcaggatgttccaaggatgctgctggatctgtgtgtgtgtgtgtgtgtgtgtgtgtgtgtgtgtgtgcgtgcgtgcgtgtatgtgcgcctgaccctgatttctgcaacctccagatttctttcttgacccttcaaagtggaacagtccagtgccaaaaattttagagtttgagaaggtcacagaaatcctctagttggtgcctccacagtcttcattttacagaggaactcagggctaatggagttaatgcaactagatcagggttttgggtctgtgttctttctaccgtcagcacctgtgtggtcaattctggacacttcccagagaagtctttgagtagagaatcctactcaaatttcactgtatattttaagcattcctctcctttccctttgcctcccctgttgccttttcttcccctgatttctcctctggtcatctcctctcccttctgcgtgtaagccatgggaaagggatgagggaggacagcttctggttaaacacaggtccctcttccacatcaaatgaacattggcttcctgggacagaaggccttcaaaggagggattgcaaagcaaggcaaagcgttctgtcttcattttccccatccccatgagacaagactgatggaaagggtggtggggcaacactgcttaatggatgccttttcacatcatttcagtttttagccctcatgactgtattttctaatcagagacaataacattttaaataaaacaacgacaaa

SEQ ID NO: 306165 - DNA, 2044 bp, Homo sapiens
ttcttagggattagggaggagggttgacaggtactgctcaaagtgagcagcaccctcctcccactgctgcggctgttaactcatcttcaggtctcacaccttctgcacataaataagctatttttaaaagttattatttttttactctttcttttctttggagagggtaccaaaggatagctgttctgtttaagtagggacctctcatggcctacaggctttgacatctgagaatcaaactggagaacattccgaagccgttcttataagtgtctccatctctacctgggctgaaatggaatgtgcaaatgtagcccagcctggtccttgggtgttgccagttgattgatgactgggagccaaagtggcatctcctttgacctaaacgggcgatgatgaaataaaactcaacagcctttctctcatcttgcattgtgagatgcgaaatagagcgtgtctctctgcctctcattttaggctgaggccgtccaaagcggccatgccccatgtttccactagatggcgctgacacttcaggcatcaaccctcatggcctctcagccttgcaaaggcagccacttaaagtcggtgtcctgtgtggggcaccaagctgagctgcagacacccagtaggcgcgaggcaaatgcgtcccattttaagaggcttgtatttatgagctctttgcttcctccctcccactaactttaaagaattgctctccatctcctttggcaaagttcctttgccctttgtcttatttttgtgaaaccctccaaggtatttccagtccatttgcatccaatctggcatctttacggagagcggtctcatatgctattgttgttaacgtggactagtatttatgtgttgagaacactggctgtttgtcaggaaaagtgtgccaaaacaaagagtacggccggccctggaaatgcatcagcaaaacccatttcccccgtgcactcattctgagcttccttccttcatttctgtcattactgctgagaactggactgtgcccagctgacctttcccttccttgccctcatcttgctgccagggtctgcaggtttgccaccgtcccggccccagtctgaaacatgggattatttcagaattggaggtggcagcttcagaaaaaaatccttctcgtgtgttgactgctgagatccaggaactgggaaatcaacccccagtttgtagattgctctctttggaaattctgtggcccaacctcgtggctgttttctggaattccttctatcggggcagacagtgctgtgcctttcttgacttcaggatgttccaaggatgctgctggatctgtgtgtgtgtgtgtgtgtgtgtgtgtgtgtgtgtgtgcgtgcgtgcgtgtatgtgcgcctgaccctgatttctgcaacctccagatttctttcttgacccttcaaagtggaacagtccagtgccaaaaattttagagtttgagaaggtcacagaaatcctctagttggtgcctccacagtcttcattttacagaggaactcagggctaatggagttaatgcaactagatcagggttttgggtctgtgttctttctaccgtcagcacctgtgtggtcaattctggacacttcccagagaagtctttgagtagagaatcctactcaaatttcactgtatattttaagcattcctctcctttccctttgcctcccctgttgccttttcttcccctgatttctcctctggtcatctcctctcccttctgcgtgtaagccatgggaaagggatgagggaggacagcttctggttaaacacaggtccctcttccacatcaaatgaacattggcttcctgggacagaaggccttcaaaggagggattgcaaagcaaggcaaagcgttctgtcttcattttccccatccccatgagacaagactgatggaaagggtggtggggcaacactgcttaatggatgccttttcacatcatttcagtttttagccctcatgactgtattttctaatcagagacaataacattttaaataaaacaacgacaaa

SEQ ID NO: 306166 - DNA, 1428 bp, Homo sapiens
tctagaggatctcccgggagccttaaccctcattaggccagacaccagtctggccgggtcagggaggccagccttggcgcctgtcacacgtagtccagaatctccatctcctttggcaaagttcctttgccctttgtcttatttttgtgaaaccctccaaggtatttccagtccatttgcatccaatctggcatctttacggagagcggtctcatatgctattgttgttaacgtggactagtatttatgtgttgagaacactggctgtttgtcaggaaaagtgtgccaaaacaaagagtacggccggccctggaaatgcatcagcaaaacccatttcccccgtgcactcattctgagcttccttccttcatttctgtcattactgctgagaactggactgtgcccagctgacctttcccttccttgccctcatcttgctgccagggtctgcaggtttgccaccgtcccggccccagtctgaaacatgggattatttcagaattggaggtggcagcttcagaaaaaaatccttctcgtgtgttgactgctgagatccaggaactgggaaatcaacccccagtttgtagattgctctctttggaaattctgtggcccaacctcgtggctgttttctggaattccttctatcggggcagacagtgctgtgcctttcttgacttcaggatgttccaaggatgctgctggatctgtgtgtgtgtgtgtgtgtgtgtgtgtgtgtgtgtgtgcgtgcgtgcgtgtatgtgcgcctgaccctgatttctgcaacctccagatttctttcttgacccttcaaagtggaacagtccagtgccaaaaattttagagtttgagaaggtcacagaaatcctctagttggtgcctccacagtcttcattttacagaggaactcagggctaatggagttaatgcaactagatcagggttttgggtctgtgttctttctaccgtcagcacctgtgtggtcaattctggacacttcccagagaagtctttgagtagagaatcctactcaaatttcactgtatattttaagcattcctctcctttccctttgcctcccctgttgccttttcttcccctgatttctcctctggtcatctcctctcccttctgcgtgtaagccatgggaaagggatgagggaggacagcttctggttaaacacaggtccctcttccacatcaaatgaacattggcttcctgggacagaaggccttcaaaggagggattgcaaagcaaggcaaagcgttctgtcttcattttccccatccccatgagacaagactgatggaaagggtggtggggcaacactgcttaatggatgccttttcacatcatttcagtttttagccctcatgactgtattttctaatcagagacaataacattttaaataaaacaacgacaaa

SEQ ID NO: 306167 - DNA, 1421 bp, Homo sapiens
cgcacataattagtacgcacataatttgtacgcacataattagtacgcacataattagtacgcacataattagtacgcacataattagtacgcacataactatagcaccacagattcctttgccctttgtcttatttttgtgaaaccctccaaggtatttccagtccatttgcatccaatctggcatctttacggagagcggtctcatatgctattgttgttaacgtggactagtatttatgtgttgagaacactggctgtttgtcaggaaaagtgtgccaaaacaaagagtacggccggccctggaaatgcatcagcaaaacccatttcccccgtgcactcattctgagcttccttccttcatttctgtcattactgctgagaactggactgtgcccagctgacctttcccttccttgccctcatcttgctgccagggtctgcaggtttgccaccgtcccggccccagtctgaaacatgggattatttcagaattggaggtggcagcttcagaaaaaaatccttctcgtgtgttgactgctgagatccaggaactgggaaatcaacccccagtttgtagattgctctctttggaaattctgtggcccaacctcgtggctgttttctggaattccttctatcggggcagacagtgctgtgcctttcttgacttcaggatgttccaaggatgctgctggatctgtgtgtgtgtgtgtgtgtgtgtgtgtgtgtgtgtgtgcgtgcgtgcgtgtatgtgcgcctgaccctgatttctgcaacctccagatttctttcttgacccttcaaagtggaacagtccagtgccaaaaattttagagtttgagaaggtcacagaaatcctctagttggtgcctccacagtcttcattttacagaggaactcagggctaatggagttaatgcaactagatcagggttttgggtctgtgttctttctaccgtcagcacctgtgtggtcaattctggacacttcccagagaagtctttgagtagagaatcctactcaaatttcactgtatattttaagcattcctctcctttccctttgcctcccctgttgccttttcttcccctgatttctcctctggtcatctcctctcccttctgcgtgtaagccatgggaaagggatgagggaggacagcttctggttaaacacaggtccctcttccacatcaaatgaacattggcttcctgggacagaaggccttcaaaggagggattgcaaagcaaggcaaagcgttctgtcttcattttccccatccccatgagacaagactgatggaaagggtggtggggcaacactgcttaatggatgccttttcacatcatttcagtttttagccctcatgactgtattttctaatcagagacaataacattttaaataaaacaacgacaaa

SEQ ID NO: 306168 - DNA, 1965 bp, Homo sapiens
agcgggcttcgcagcgtcacgccctccggggccgtggcggcgacggcggtgcgtagcttactcacaggggcggcccgtatccctccgccgccggcgcggctcggccctccctcccctggccgccaatccccgcgcctcccgacctgcccctcggtcgggcccaccccgtgctccgacggccccaccccggcggcgcagcccgcccgcccgcgcgtccctcggtccacctgcagcagggaggaagacaggcaatccctccggctgtccgaccaagagaggccggccgagcccgaggcttgggcttttgctttctggcggagggatctgcggcggtttaggaggcggcgctgatcctgggaggaagaggcagctacggcggcggcggcggtggcggctagggcggcggcgaataaaggggccgccgccgggtgatgcggtgaccgctgcggcaggcccaggagctgagtgggccccggccctcagcccgtcccgccggacccgctttcctcaactctccatcttctcctgccgaccgagatcgccgaggcggcctcaggctccctagccccttccccgtcccttccccgcccccgtccccgccccgggggccgccgccacccgcctcccaccatggctctgaagagaatccacaaggaattgaatgatctggcacgggaccctccagcacagtgttcagcaggtcctgttggagatgatatgttccattggcaagctacaataatggggccaaatgacagtccctatcagggtggagtatttttcttgacaattcatttcccaacagattaccccttcaaaccacctaaggttgcatttacaacaagaatttatcatccaaatattaacagtaatggcagcatttgtcttgatattctacgatcacagtggtctccagcactaactatttcaaaagtactcttgtccatctgttctctgttgtgtgatcccaatccagatgatcctttagtgcctgagattgctcggatctacaaaacagatagagaaaagtacaacagaatagctcgggaatggactcagaagtatgcgatgtaattaaagaaattattggataacctctacaaataaagataggggaactctgaaagagaaagtccttttgatttccatttgactgctttctatgagcccacgcctcatcttcccctgtgcacatgtttacctgatacagcagtgctgcgtgttgtacatacttggaacaacaaactagaaatactgtacttctgtaccaacattgcctcctagcagagaagtgtgtgtgtgacaagccagttctacaggcattacctaggtgtgagactaaaagcttttcttattgacttaaatttggataacagcaaggtgtgaggggggtggtgggtatggtgtgtgcttggatgggaaagaaaaggctccactcacctataggagattatttttaagtggaatccatttaaactcaaaacagttatgaaaagcaaggtgaagaacatgaagctgtgtctgtattcattttattccgaaggagctacgtcttaggtgaaagttatgaccaaccagattaaactctacccacatcctgcattttaaggtctaagtttaactggtcaacatttaaatggattggagctattagtacatcaagtgtgatgggctttgttcccaactcttttacatctccctaccccttcaacctttggcctttcagcccttctttctctcttccatattctttggtttgtatgtggtttctcagttaatacatagctaatagctcttatttttcttatgtttttaaccgcttaggtctatttggatgtaagggtgaaaattcatttgatggaaatacttgtgtatatttaaagacccaattgctcctctggagcttgtactttcaagaatgattaatctgtgtaataaactggttactacagtcattacatataa

SEQ ID NO: 306169 - DNA, 2707 bp, Homo sapiens
agcgggcttcgcagcgtcacgccctccggggccgtggcggcgacggcggtgcgtagcttactcacaggggcggcccgtatccctccgccgccggcgcggctcggccctccctcccctggccgccaatccccgcgcctcccgacctgcccctcggtcgggcccaccccgtgctccgacggccccaccccggcggcgcagcccgcccgcccgcgcgtccctcggtccacctgcagcagggaggaagacaggcaatccctccggctgtccgaccaagagaggccggccgagcccgaggcttgggcttttgctttctggcggagggatctgcggcggtttaggaggcggcgctgatcctgggaggaagaggcagctacggcggcggcggcggtggcggctagggcggcggcgaataaaggggccgccgccgggtgatgcggtgaccgctgcggcaggcccaggagctgagtgggccccggccctcagcccgtcccgccggacccgctttcctcaactctccatcttctcctgccgaccgagatcgccgaggcggcctcaggctccctagccccttccccgtcccttccccgcccccgtccccgccccgggggccgccgccacccgcctcccaccatggctctgaagagaatccacaaggaattgaatgatctggcacgggaccctccagcacagtgttcagcaggtcctgttggagatgatatgttccattggcaagctacaataatggggccaaatgacagtccctatcagggtggagtatttttcttgacaattcatttcccaacagattaccccttcaaaccacctaaggttgcatttacaacaagaatttatcatccaaatattaacagtaatggcagcatttgtcttgatattctacgatcacagtggtctccagcactaactatttcaaaagtactcttgtccatctgttctctgttgtgtgatcccaatccagatgatcctttagtgcctgagattgctcggatctacaaaacagatagagaaaagtacaacagaatagctcgggaatggactcagaagtatgcgatgtaattaaagaaattattggataacctctacaaataaagataggggaactctgaaagagaaagtccttttgatttccatttgactgctttctatgagcccacgcctcatcttcccctgtgcacatgtttacctgatacagcagtgctgcgtgttgtacatacttggaacaacaaactagaaatactgtacttctgtaccaacattgcctcctagcagagaagtgtgtgtgtgacaagccagttctacaggcattacctaggtgtgagactaaaagcttttcttattgacttaaatttggataacagcaaggtgtgaggggggtggtgggtatggtgtgtgcttggatgggaaagaaaaggctccactcacctataggagattatttttaagtggaatccatttaaactcaaaacagttatgaaaagcaaggtgaagaacatgaagctgtgtctgtattcattttattccgaaggagctacgtcttaggtgaaagttatgaccaaccagattaaactctacccacatcctgcattttaaggtctaagtttaactggtcaacatttaaatggattggagctattagtacatcaagtgtgatgggctttgttcccaactcttttacatctccctaccccttcaacctttggcctttcagcccttctttctctcttccatattctttggtttgtatgtggtttctcagttaatacatagctaatagctcttatttttcttatgtttttaaccgcttaggtctatttggatgtaagggtgaaaattcatttgatggaaatacttgtgtatatttaaagacccaattgctcctctggagcttgtactttcaagaatgattaatctgtgtaataaactggttactacagtcattacatataattttgtgtgaataggctttttcatttttaagaagtttgtctagctgagattagtggtggattttctcccacttctgaaatgttcatttatactggttgcattttaagatcatgaaacaattccagttacattgtaaaaaggatatcttacgagtaattttattgaacaagttagaggcataagcttaagagcatttccatgaaacaacacatgcagcattccaggaacttgattgttaaattcaataagaaatttgctttattaatgaaactaagctgcatttcatcaaaaccttgtgacattcccttggtacataggacataaaacacagaggcattgctatttggtaagttaagcttctgtgattgtaattataaaagagcaacattgaccaaacctgggaaacaagagcacagtcttgtttggagagtctacataattactttgcactaacatttgcaggatgttcacacaattttaaattgtactgtatgtggctttttgaagtcttcccttgaccctagtaaaatatagcttgaaacttgtaaacaactgtgtttgccagaaacatcattcatgtgaactaggcaagttaccttttttccccccttcttttcctaattgtaaactaggccaacctgaaagccatggctgatgctctagccatcaggttctttcaaatgcatctttacactcttgcacaaaagttaaggaataaatgtccactgcttttggttttaaa

SEQ ID NO: 306170 - DNA, 506 bp, Homo sapiens
tgctgggattacaggtgtgagccatcacgcccggcccataatacatgacacatgttttaccttcctgattgtatttatttgctaagctctgaacaaagcaaaaatgacccactttaaaaaaatacacattgccttgaagaatccaaaataccttaaagattcaccaatctactcatctcttactctgaaggaatgctcttaagagagtttcaccagcaggacagagaatattggtaacaatataaactttagtaatggataaaaggtacatttatgttgaatatatttcttttctttcttttttctgtaggaattggaattgaatgatctggcacgggaccctccagcacagtgttcagcaggtcctgttggagatgatagtaagtatttaaaaggaataatggagtaatagcataacagtggttattttgtgtgaagaaacaattatggtatagggaagaggcagtgtttaacccttagtggcccatgaagggagcaactctatg

SEQ ID NO: 306171 - DNA, 410 bp, Homo sapiens
ttggttccctgaccgggaagcaaggtgactgacagacggccgaggcagccccttaggcggcttaagcctgccctgtggagcatccctgtgggggactccggccagcctgagtgacgcgatccaaagagcgctcccgggtaggaaattgccctggtggaatgcctcgccagagcagcgtgtagcaggcccccgcggaggattaacacagtggctgaacaccgggaaggaactggcacttgggagtccggacatctgaaacttgctccctccacaaaaccgcctgagctcgggctgacagaggaagccgttttgcccgatccacaagtatatcctgagttcacttacctcttgggtggcagcacacatcggtccaccctgcttgtccagaaactgttaagagttggaagttc

SEQ ID NO: 306172 - DNA, 2044 bp, Homo sapiens
agcgggcttcgcagcgtcacgccctccggggccgtggcggcgacggcggtgcgtagcttactcacaggggcggcccgtatccctccgccgccggcgcggctcggccctccctcccctggccgccaatccccgcgcctcccgacctgcccctcggtcgggcccaccccgtgctccgacggccccaccccggcggcgcagcccgcccgcccgcgcgtccctcggtccacctgcagcagggaggaagacaggcaatccctccggctgtccgaccaagagaggccggccgagcccgaggcttgggcttttgctttctggcggagggatctgcggcggtttaggaggcggcgctgatcctgggaggaagaggcagctacggcggcggcggcggtggcggctagggcggcggcgaataaaggggccgccgccgggtgatgcggtgaccgctgcggcaggcccaggagctgagtgggccccggccctcagcccgtcccgccggacccgctttcctcaactctccatcttctcctgccgaccgagatcgccgaggcggcctcaggctccctagccccttccccgtcccttccccgcccccgtccccgccccgggggccgccgccacccgcctcccaccatggctctgaagagaatccacaaggaattgaatgatctggcacgggaccctccagcacagtgttcagcaggtcctgttggagatgatatgttccattggcaagctacaataatggggccagtaagtattcagattaatttcagaataaacagtttatgtaatttactcattttaatcccacttttcttgttatcaacagaatgacagtccctatcagggtggagtatttttcttgacaattcatttcccaacagattaccccttcaaaccacctaaggttgcatttacaacaagaatttatcatccaaatattaacagtaatggcagcatttgtcttgatattctacgatcacagtggtctccagcactaactatttcaaaagtactcttgtccatctgttctctgttgtgtgatcccaatccagatgatcctttagtgcctgagattgctcggatctacaaaacagatagagaaaagtacaacagaatagctcgggaatggactcagaagtatgcgatgtaattaaagaaattattggataacctctacaaataaagataggggaactctgaaagagaaagtccttttgatttccatttgactgctttctatgagcccacgcctcatcttcccctgtgcacatgtttacctgatacagcagtgctgcgtgttgtacatacttggaacaacaaactagaaatactgtacttctgtaccaacattgcctcctagcagagaagtgtgtgtgtgacaagccagttctacaggcattacctaggtgtgagactaaaagcttttcttattgacttaaatttggataacagcaaggtgtgaggggggtggtgggtatggtgtgtgcttggatgggaaagaaaaggctccactcacctataggagattatttttaagtggaatccatttaaactcaaaacagttatgaaaagcaaggtgaagaacatgaagctgtgtctgtattcattttattccgaaggagctacgtcttaggtgaaagttatgaccaaccagattaaactctacccacatcctgcattttaaggtctaagtttaactggtcaacatttaaatggattggagctattagtacatcaagtgtgatgggctttgttcccaactcttttacatctccctaccccttcaacctttggcctttcagcccttctttctctcttccatattctttggtttgtatgtggtttctcagttaatacatagctaatagctcttatttttcttatgtttttaaccgcttaggtctatttggatgtaagggtgaaaattcatttgatggaaatacttgtgtatatttaaagacccaattgctcctctggagcttgtactttcaagaatgattaatctgtgtaataaactggttactacagtcattacatataa

SEQ ID NO: 306173 - DNA, 1933 bp, Homo sapiens
agcgggcttcgcagcgtcacgccctccggggccgtggcggcgacggcggtgcgtagcttactcacaggggcggcccgtatccctccgccgccggcgcggctcggccctccctcccctggccgccaatccccgcgcctcccgacctgcccctcggtcgggcccaccccgtgctccgacggccccaccccggcggcgcagcccgcccgcccgcgcgtccctcggtccacctgcagcagggaggaagacaggcaatccctccggctgtccgaccaagagaggccggccgagcccgaggcttgggcttttgctttctggcggagggatctgcggcggtttaggaggcggcgctgatcctgggaggaagaggcagctacggcggcggcggcggtggcggctagggcggcggcgaataaaggggccgccgccgggtgatgcggtgaccgctgcggcaggcccaggagctgagtgggccccggccctcagcccgtcccgccggacccgctttcctcaactctccatcttctcctgccgaccgagatcgccgaggcggcctcaggctccctagccccttccccgtcccttccccgcccccgtccccgccccgggggccgccgccacccgcctcccaccatggctctgaagagaatccacaaggaattgaatgatctggcacgggaccctccagcacagtgttcagcaggtcctgttggagatgataaatgacagtccctatcagggtggagtatttttcttgacaattcatttcccaacagattaccccttcaaaccacctaaggttgcatttacaacaagaatttatcatccaaatattaacagtaatggcagcatttgtcttgatattctacgatcacagtggtctccagcactaactatttcaaaagtactcttgtccatctgttctctgttgtgtgatcccaatccagatgatcctttagtgcctgagattgctcggatctacaaaacagatagagaaaagtacaacagaatagctcgggaatggactcagaagtatgcgatgtaattaaagaaattattggataacctctacaaataaagataggggaactctgaaagagaaagtccttttgatttccatttgactgctttctatgagcccacgcctcatcttcccctgtgcacatgtttacctgatacagcagtgctgcgtgttgtacatacttggaacaacaaactagaaatactgtacttctgtaccaacattgcctcctagcagagaagtgtgtgtgtgacaagccagttctacaggcattacctaggtgtgagactaaaagcttttcttattgacttaaatttggataacagcaaggtgtgaggggggtggtgggtatggtgtgtgcttggatgggaaagaaaaggctccactcacctataggagattatttttaagtggaatccatttaaactcaaaacagttatgaaaagcaaggtgaagaacatgaagctgtgtctgtattcattttattccgaaggagctacgtcttaggtgaaagttatgaccaaccagattaaactctacccacatcctgcattttaaggtctaagtttaactggtcaacatttaaatggattggagctattagtacatcaagtgtgatgggctttgttcccaactcttttacatctccctaccccttcaacctttggcctttcagcccttctttctctcttccatattctttggtttgtatgtggtttctcagttaatacatagctaatagctcttatttttcttatgtttttaaccgcttaggtctatttggatgtaagggtgaaaattcatttgatggaaatacttgtgtatatttaaagacccaattgctcctctggagcttgtactttcaagaatgattaatctgtgtaataaactggttactacagtcattacatataa

SEQ ID NO: 306174 - DNA, 2275 bp, Homo sapiens
agcgggcttcgcagcgtcacgccctccggggccgtggcggcgacggcggtgcgtagcttactcacaggggcggcccgtatccctccgccgccggcgcggctcggccctccctcccctggccgccaatccccgcgcctcccgacctgcccctcggtcgggcccaccccgtgctccgacggccccaccccggcggcgcagcccgcccgcccgcgcgtccctcggtccacctgcagcagggaggaagacaggcaatccctccggctgtccgaccaagagaggccggccgagcccgaggcttgggcttttgctttctggcggagggatctgcggcggtttaggaggcggcgctgatcctgggaggaagaggcagctacggcggcggcggcggtggcggctagggcggcggcgaataaaggggccgccgccgggtgatgcggtgaccgctgcggcaggcccaggagctgagtgggccccggccctcagcccgtcccgccggacccgctttcctcaactctccatcttctcctgccgaccgagatcgccgaggcggcctcaggctccctagccccttccccgtcccttccccgcccccgtccccgccccgggggccgccgccacccgcctcccaccatggctctgaagagaatccacaaggaattgaatgatctggcacgggaccctccagcacagtgttcagcaggtcctgttggagatgatatgttccattggcaagctacaataatggggccaaatgacagtccctatcagggtggagtatttttcttgacaattcatttcccaacagattaccccttcaaaccacctaaggttgcatttacaacaagaatttatcatccaaatattaacagtaatggcagcatttgtcttgatattctacgatcacagtggtctccagcactaactatttcaaaagtactcttgtccatctgttctctgttgtgtgatcccaatccagatgatcctttagtgcctgagattgctcggatctacaaaacagatagagaaaagtacaacagaatagctcgggaatggactcagaagtatgcgatgtaattaaagaaattattggataacctctacaaataaagataggggaactctgaaagagaaagtccttttgatttccatttgactgctttctatgagcccacgcctcatcttcccctgtgcacatgtttacctgatacagcagtgctgcgtgttgtacatacttggaacaacaaactagaaatactgtacttctgtaccaacattgcctcctagcagagaagtgtgtgtgtgacaagccagttctacaggcattacctaggtgtgagactaaaagcttttcttattgacttaaatttggataacagcaaggtgtgaggggggtggtgggtatggtgtgtgcttggatgggaaagaaaaggctccactcacctataggagattatttttaagtggaatccatttaaactcaaaacagttatgaaaagcaaggtgaagaacatgaagctgtgtctgtattcattttattccgaaggagctacgtcttaggtgaaagttatgaccaaccagattaaactctacccacatcctgcattttaaggtctaagtttaactggtcaacatttaaatggattggagctattagtacatcaagtgtgatgggctttgttcccaactcttttacatctccctaccccttcaacctttggcctttcagcccttctttctctcttccatattctttggtttgtatgtggtttctcagttaatacatagctaatagctcttatttttcttatgtttttaaccgcttaggtctatttggatgtaagggtgaaaattcatttgatggaaatacttgtgtatatttaaagacccaattgctcctctggagcttgtactttcaagaatgattaatctgtgtaataaactggttactacagtcattacatataacaaaccaccccccccccacccaaaaccaacacacaacacagatctgatgatgatagatgaagcgagtatgagaatggaatcatgctgtatgacttcatctgctgactacactgacatgcatcaccttctatatctaactacctctaacaccatccaacacacaacaccaacacaccacccacataacaacacacacacaaccaaccatacctaatactaatactcctctcacctggctttctactctaactatatattctcatctctctcttttcttatattactccctttccctcattaataccatatc

SEQ ID NO: 306175 - DNA, 1913 bp, Homo sapiens
agcgggcttcgcagcgtcacgccctccggggccgtggcggcgacggcggtgcgtagcttactcacaggggcggcccgtatccctccgccgccggcgcggctcggccctccctcccctggccgccaatccccgcgcctcccgacctgcccctcggtcgggcccaccccgtgctccgacggccccaccccggcggcgcagcccgcccgcccgcgcgtccctcggtccacctgcagcagggaggaagacaggcaatccctccggctgtccgaccaagagaggccggccgagcccgaggcttgggcttttgctttctggcggagggatctgcggcggtttaggaggcggcgctgatcctgggaggaagaggcagctacggcggcggcggcggtggcggctagggcggcggcgaataaaggggccgccgccgggtgatgcggtgaccgctgcggcaggcccaggagctgagtgggccccggccctcagcccgtcccgccggacccgctttcctcaactctccatcttctcctgccgaccgagatcgccgaggcggcctcaggctccctagccccttccccgtcccttccccgcccccgtccccgccccgggggccgccgccacccgcctcccaccatggctctgaagagaatccacaaggaattgaatgatctggcacgggaccctccagcacagtgttcagcaggtcctgttggagatgatatgttccattggcaagctacaataatggggccaaatgacagtccctatcagggtggagtatttttcttgacaattcatttcccaacagattaccccttcaaaccacctaaggttgcatttacaacaagaatttatcatccaaatattaacagtaatggcagcatttgtcttgatattctacgatcacagtggtctccagcactaactatttcaaaagtactcttgtccatctgttctctgttgtgtgatcccaatccagatgatcctttagtgcctgagattgctcggatctacaaaacagatagagaaaaaaattattggataacctctacaaataaagataggggaactctgaaagagaaagtccttttgatttccatttgactgctttctatgagcccacgcctcatcttcccctgtgcacatgtttacctgatacagcagtgctgcgtgttgtacatacttggaacaacaaactagaaatactgtacttctgtaccaacattgcctcctagcagagaagtgtgtgtgtgacaagccagttctacaggcattacctaggtgtgagactaaaagcttttcttattgacttaaatttggataacagcaaggtgtgaggggggtggtgggtatggtgtgtgcttggatgggaaagaaaaggctccactcacctataggagattatttttaagtggaatccatttaaactcaaaacagttatgaaaagcaaggtgaagaacatgaagctgtgtctgtattcattttattccgaaggagctacgtcttaggtgaaagttatgaccaaccagattaaactctacccacatcctgcattttaaggtctaagtttaactggtcaacatttaaatggattggagctattagtacatcaagtgtgatgggctttgttcccaactcttttacatctccctaccccttcaacctttggcctttcagcccttctttctctcttccatattctttggtttgtatgtggtttctcagttaatacatagctaatagctcttatttttcttatgtttttaaccgcttaggtctatttggatgtaagggtgaaaattcatttgatggaaatacttgtgtatatttaaagacccaattgctcctctggagcttgtactttcaagaatgattaatctgtgtaataaactggttactacagtcattacatataa

SEQ ID NO: 306176 - DNA, 1594 bp, Homo sapiens
agcgggcttcgcagcgtcacgccctccggggccgtggcggcgacggcggtgcgtagcttactcacaggggcggcccgtatccctccgccgccggcgcggctcggccctccctcccctggccgccaatccccgcgcctcccgacctgcccctcggtcgggcccaccccgtgctccgacggccccaccccggcggcgcagcccgcccgcccgcgcgtccctcggtccacctgcagcagggaggaagacaggcaatccctccggctgtccgaccaagagaggccggccgagcccgaggcttgggcttttgctttctggcggagggatctgcggcggtttaggaggcggcgctgatcctgggaggaagaggcagctacggcggcggcggcggtggcggctagggcggcggcgaataaaggggccgccgccgggtgatgcggtgaccgctgcggcaggcccaggagctgagtgggccccggccctcagcccgtcccgccggacccgctttcctcaactctccatcttctcctgccgaccgagatcgccgaggcggcctcaggctccctagccccttccccgtcccttccccgcccccgtccccgccccgggggccgccgccacccgcctcccaccatggctctgaagagaatccacaaggaattgaatgatctggcacgggaccctccagcacagtgttcagcaggtcctgttggagatgatatgttccattggcaagctacaataatggggccaaatgacagtccctatcagggtggagtatttttcttgacaattcatttcccaacagattaccccttcaaaccacctaaggttgcatttacaacaagaatttatcatccaaatattaacagtaatggcagcatttgtcttgatattctacgatcacagtggtctccagcactaactatttcaaaagtactcttgtccatctgttctctgttgtgtgatcccaatccagatgatcctttagtgcctgagattgctcggatctacaaaacagatagagaaaagtacaacagaatagctcgggaatggactcagaagtatgcgatgtaattaaagaaattattggataacctctacaaataaagataggggaactctgaaagagaaagtccttttgatttccatttgactgctttctatgagcccacgcctcatcttcccctgtgcacatgtttacctgatacagcagtgctgcgtgttgtacatacttggaacaacaaactagaaatactgtacttctgtaccaacattgcctcctagcagagaagtgtgtgtgtgacaagccagttctacaggcattacctaggtgtgagactaaaagcttttcttattgacttaaatttggataacagcaaggtgtgaggggggtggtgggtatggtgtgtgcttggatgggaaagaaaaggctccactcacctataggagattatttttaagtggaatccatttaaactcaaaacagttatgaaaagcaaggtgaagaacatgaagctgtgtctgtattcattttattccgaaggagctacgtcttaggtgaaagttatgacgtagctccttcggaataaattga

SEQ ID NO: 306177 - DNA, 1380 bp, Homo sapiens
acccgactcagcctcccaaagtgctgggattacaggtgtgagccaacatgcccagccttctgtcggtttaatcattattagtatatgagttcaagaactatgtaatgtagaatcatataatttcaagtactttaaatgaatgaattgagtggacatcttttgtagaaataggccaatcaagtatggaataaggtatatgccaacaaatactaaaatttaatcagaaccctctataagtagcaattaaaggagactttcacattttacagctccttcccattatcattgaattaatccttatcagaaatttgggatagaaaggggcctttccttgaatgtcctataagctactctcttcaagttacttgatgggataatgaatggaatctgttgcttactgactccacacctatgttaagccaagcttctctttgtgtgtacaggtacaacagaatagctcgggaatggactcagaagtatgcgatgtaattaaagaaattattggataacctctacaaataaagataggggaactctgaaagagaaagtccttttgatttccatttgactgctttctatgagcccacgcctcatcttcccctgtgcacatgtttacctgatacagcagtgctgcgtgttgtacatacttggaacaacaaactagaaatactgtacttctgtaccaacattgcctcctagcagagaagtgtgtgtgtgacaagccagttctacaggcattacctaggtgtgagactaaaagcttttcttattgacttaaatttggataacagcaaggtgtgaggggggtggtgggtatggtgtgtgcttggatgggaaagaaaaggctccactcacctataggagattatttttaagtggaatccatttaaactcaaaacagttatgaaaagcaaggtgaagaacatgaagctgtgtctgtattcattttattccgaaggagctacgtcttaggtgaaagttatgaccaaccagattaaactctacccacatcctgcattttaaggtctaagtttaactggtcaacatttaaatggattggagctattagtacatcaagtgtgatgggctttgttcccaactcttttacatctccctaccccttcaacctttggcctttcagcccttctttctctcttccatattctttggtttgtatgtggtttctcagttaatacatagctaatagctcttatttttcttatgtttttaaccgcttaggtctatttggatgtaagggtgaaaattcatttgatggaaatacttgtgtatatttaaagacccaattgctcctctggagcttgtactttcaagaatgattaatctgtgtaataaactggttactacagtcattacatataa

SEQ ID NO: 306178 - DNA, 1563 bp, Homo sapiens
agcgggcttcgcagcgtcacgccctccggggccgtggcggcgacggcggtgcgtagcttactcacaggggcggcccgtatccctccgccgccggcgcggctcggccctccctcccctggccgccaatccccgcgcctcccgacctgcccctcggtcgggcccaccccgtgctccgacggccccaccccggcggcgcagcccgcccgcccgcgcgtccctcggtccacctgcagcagggaggaagacaggcaatccctccggctgtccgaccaagagaggccggccgagcccgaggcttgggcttttgctttctggcggagggatctgcggcggtttaggaggcggcgctgatcctgggaggaagaggcagctacggcggcggcggcggtggcggctagggcggcggcgaataaaggggccgccgccgggtgatgcggtgaccgctgcggcaggcccaggagctgagtgggccccggccctcagcccgtcccgccggacccgctttcctcaactctccatcttctcctgccgaccgagatcgccgaggcggcctcaggctccctagccccttccccgtcccttccccgcccccgtccccgccccgggggccgccgccacccgcctcccaccatggctctgaagagaatccacaaggaattgaatgatctggcacgggaccctccagcacagtgttcagcaggtcctgttggagatgatatgttccattggcaagctacaataatggggccaaatgacagtccctatcagggtggagtatttttcttgacaattcatttcccaacagattaccccttcaaaccacctaaggttgcatttacaacaagaatttatcatccaaatattaacagtaatggcagcatttgtcttgatattctacgatcacagtggtctccagcactaactatttcaaaagtactcttgtccatctgttctctgttgtgtgatcccaatccagatgatcctttagtgcctgagattgctcggatctacaaaacagatagagaaaagtacaacagaatagctcgggaatggactcagaagtatgcgatgtaattaaagaaattattggataacctctacaaataaagataggggaactctgaaagagaaagtccttttgatttccatttgactgctttctatgagcccacgcctcatcttcccctgtgcacatgtttacctgatacagcagtgctgcgtgttgtacatacttggaacaacaaactagaaatactgtacttctgtaccaacattgcctcctagcagagaagtgtgtgtgtgacaagccagttctacaggcattacctaggtgtgagactaaaagcttttcttattgacttaaatttggataacagcaaggtgtgaggggggtggtgggtatggtgtgtgcttggatgggaaagaaaaggctccactcacctataggagattatttttaagtggaatccatttaaactcaaaacagttatgaaaagcaagatgtgtccagttttcgttttctattgaatttttttttttttttttcttttttttttttttcta

SEQ ID NO: 306179 - DNA, 1362 bp, Homo sapiens
agcgggcttcgcagcgtcacgccctccggggccgtggcggcgacggcggtgcgtagcttactcacaggggcggcccgtatccctccgccgccggcgcggctcggccctccctcccctggccgccaatccccgcgcctcccgacctgcccctcggtcgggcccaccccgtgctccgacggccccaccccggcggcgcagcccgcccgcccgcgcgtccctcggtccacctgcagcagggaggaagacaggcaatccctccggctgtccgaccaagagaggccggccgagcccgaggcttgggcttttgctttctggcggagggatctgcggcggtttaggaggcggcgctgatcctgggaggaagaggcagctacggcggcggcggcggtggcggctagggcggcggcgaataaaggggccgccgccgggtgatgcggtgaccgctgcggcaggcccaggagctgagtgggccccggccctcagcccgtcccgccggacccgctttcctcaactctccatcttctcctgccgaccgagatcgccgaggcggcctcaggctccctagccccttccccgtcccttccccgcccccgtccccgccccgggggccgccgccacccgcctcccaccatggctctgaagagaatccacaaggaattgaatgatctggcacgggaccctccagcacagtgttcagcaggtcctgttggagatgatatgttccattggcaagctacaataatggggccaaatgacagtccctatcagggtggagtatttttcttgacaattcatttcccaacagattaccccttcaaaccacctaaggttgcatttacaacaagaatttatcatccaaatattaacagtaatggcagcatttgtcttgatattctacgatcacagtggtctccagcactaactatttcaaaagtactcttgtccatctgttctctgttgtgtgatcccaatccagatgatcctttagtgcctgagattgctcggatctacaaaacagatagagaaaagtacaacagaatagctcgggaatggactcagaagtatgcgatgtaattaaagaaattattggataacctctacaaataaagataggggaactctgaaagagaaagtccttttgatttccatttgactgctttctatgagcccacgcctcatcttcccctgtgcacatgtttacctgatacagcagtgctgcgtgttgtacatacttggaacaacaaactagaaatactgtacttctgtaccaacattgcctcctagcagagaagtgtgtgtgtgacaagccagttctacaggcattacctaggtgtgagcagcttgggagatcctgcagagtcg

SEQ ID NO: 306180 - DNA, 346 bp, Homo sapiens
ccacctcggcctcccaaagtgctgggattacaggcatgagccaccgcacccagcctagatattgttacatatatacattcaaagttctaataacatcatgccccggagtatatggctaagaaaagctaatagttaaacacacaaacatacacatgcagagaagcaaaagttatcaagtttttggtttttgtttttttcctgttttgggacaggatctggctctgtcacccaggctgcagtgcagtggtgccatctcagctcaatgcaacatacacctcccaagtcaaggatcctcccacctcagcttcccaagtagctgggactacaggtacacaccaccacaccc

SEQ ID NO: 306181 - DNA, 2481 bp, Homo sapiens
tgccagtgactggactcagcttctttgcgtaaccaatactggaaggcatttaaaggcacctctgccgccacagaccttgcagttaactccgccctgacccacccttcccgatgcagtccctgatgcaggctcccctcctgatcgccctgggcttgcttctcgcggcccctgcgcaagcccacctgaaaaagccatcccagctcagtagcttttcctgggataactgtgatgaagggaaggaccctgcggtgatcagaagcctgactctggagcctgaccccatcgtcgttcctggaaatgtgaccctcagtgtcgtgggcagcaccagtgtccccctgagttctcctctgaaggtggatttagttttggagaaggaggtggctggcctctggatcaagatcccatgcacagactacattggcagctgtacctttgaacacttctgtgatgtgcttgacatgttaattcctactggggagccctgcccagagcccctgcgtacctatgggcttccttgccactgtcccttcaaagaaggaacctactcactgcccaagagcgaattcgttgtgcctgacctggagctgcccagttggctcaccaccgggaactaccgcatagagagcgtcctgagcagcagtgggaagcgtctgggctgcatcaagatcgctgcctctctaaagggcatataacatggcatctgccacagcagaatggagcggtgtgaggaaggtcccttttcctctgttttgtgtttgccaaggccaaactcccactctctgcccccctttaatcccctttctacagtgagtccactaccctcactgaaaatcattttgtaccacttacattttaggctggggcaagcagccctgacctaagggagaatgagttggacagttcttgatagcccagggcatctgctgggctgaccacgttactcatccccgttaacattctctctaaagagcctcgttcatttccaaagcagttaaggaatgggaaccagagtgttttaggacctgaagaatctttatgactctctctctttcactctttttttttttggtcactaagttaaaagcgaagtgagagtattaacgtttttgttctcctccggccccctgttacaatgaaggggcaaaagtatttgctcttagtctattcctcccttaacttctgtgactaatttttatttcctttctagatttgcccaattaatactagggtgcagtgtatcctggagaggtagggtgtgtgggggaggaatcccttgggggagatattaggagtgctctgttgtttacaaactcaggtacccgcagggcctagcaagagacttaaatgactgataagaaccgtgagaaacatgttgcttccaggcttgatttcgatttttcgcttttttttttttttgagacagaatctcactttgtcaccaggctggagtgcagtggtgcaatctcacctcactgcaacctccgcctcctgggttcaagcaattctcctgcctcagcctcccaagtagcttggactacaggccctgccaccacgcccggctaatttgtgtatttttagtagagatggggtttcaccatgttggccaggatggtctcgatctcttgacctcgtgatccgtccaccttggccttgcaaagcgctggattacaggcatgagccactacacccagccgatttttcctttttgattaaagatgctattacaatgtaaatatttcttacacagaaagtcacagcacatgtgcccattgatacaaggctgctgaggcctggtctccagttggaaatataattaagggtggcaaggactggagtcagttggagagtgcatagccagtctgtgaagacaactgccagatactggcaatactccagcctggtgacagagtgagactctgtctcaaaaaaaaagtttcaatgtttactcctagagaagccaaaaatccagatttgtatatgaaatcttaccattttaaaagattggcagctaattatttttttaaaaagctgtgcagtgtgatgtgtcccaaacggactggctcatgggtggccacgtcacaacctctgatctcagaccgtgcatgccttgtcctcttaagacaactcctgtggcaccgtttctccctccacagggccaaagccatagtgtccggtcccaaggacaaggctcttccagtgctaggagaggtatgagcagcctctcacctgtgagctgtggggatcacaaggctgcctgcctcagtcttggagtcctgttgggtgaatgaggcagatgggaaagagcctcaccagcagctgcttttggagcaggggtccaaggaagagagggtggcctcgacatcaaactgcctggatttttctaccaccctgttacatcataacaacttctgaaacacacaccagccctgagttctgggctcatttgaagcctggaatagcaataaatctttttaacttgcg

SEQ ID NO: 306182 - DNA, 1178 bp, Homo sapiens
ggtaatgagaacatgggggacatattgaaaggacacaggaaccaaattgaatgtccctcagtggccaaatcttgggcaatttgagcaataaaataatgacaataatgggttatagtccactgactaaaaatacactatagaatcccatacacaatggaatcacaaatgtagaaggaacgatagaaatagaaaaaatggctgggtgcagtggctcacgcctgtagtcccagcactttgggaggccaaggcgggtggatcatctggggtcaggagttcaagaccagcctggccaacatgatgaaaccctgtctctactaaaaatacacaaagttagccaggcgtggtggcacgtgcctgtaatcccagctactccggaggctgaggcaggagaatcgcttgaacagggaggtggaggttgcagtgatccgggactgtgccactgccctctagcctgggtgacagagtgagactccatctcaaacccacaaacaaaaaaacaccattaggcaaacaccataggaatagttgttgcagacaagaaacacctatgaatgccgaattagtgaacagaagtatgatgggaaacacgattttgcatggttttaagatcccttcacaagatactaattacaaagggaaaaacagtcattatagtgaataagcctgacagaaaccaccttaacccagtgatcaagttaacatcaccactaataagacatactgataccatgtaccttccaatatgatgcactgagaagggcacaattgtcacttctgtggtgttgtcagaaatgtgcaatctcagtgcaatcaggagaaaagatcagacaagcccaaactgagagacactctacaaaataactggccagtacgttttgaaagtgccaaggccgtgaacaataaggaaagactgaggaacagtcatggactggaagagagtaaagaaatatgataactaactgcattgtgagataccgatttagatgttggattagaaaaaggaccagaaataagatttcatcaatgtcaattatttggttttgataattgtactgtggttatgtaagatgttaacattagtaagagctgggtgaagggtacatggaaactattatttttgccaccctttgaaagtctaacttttttcaaaataaaaagttttaaaaataaaaaaagaa

SEQ ID NO: 306183 - DNA, 1037 bp, Homo sapiens
aggatcccaaacagtccaagcagaaacataaatccattccttgcagactaagatatgggcacaagactacacatttatatctttagacatgatatctcataccagaacactcatcatcattatgcgactgccattgaatatcaaatcaggcatctcaaccatatagtaagtaaaagagaattctatatctgcatcctgccaatcctgcttctttcccagtaatttaacactcagtaatatgagccattatacatctatattctaaagcttcacaacatggagtcattaccagctgtattatatacaccattccaagcctatataatagacaaacagttagtgttcttactatataaggaattaaaaattaagggacaaaggaccaaaaacttgatagaaaaactgggaaaagacatgaacatactcacgtaaagatataaaaatggctctttaaaatgaaatattcaaactaactcattagagaaatgtaaattgagataatactgagataccatttatcatctctaagactggtgaaagaaagaacaacacatttctgttaggcaaggctatagggaaacacactgtcatcactgttggtaggaatgcaaactggtatgacttctggaggggaatttgtcagtacttaacaaattgcagaagcatttaccctttgacacaaccatttccactgtgggaatttcccttgaagatgcacctccaacagtacaaacatacagatgcacaagattactcattgcagcactgagactgcaaatattggaagcaaagtcatgttcatatacacgagaaagcctgagtaaaccatggcaccaatggcatacccacatgatggaatattattgagctataaaaaaaatgaggaagatctctatgaatcggtatagttattttcaagatatattaaatgcaaaaagcaaagtacaaaaagtagaaagtggtactttgtatgtaagaaagaaggagatgtaagaaagcacatgtatctatttgtttatgcaaagtaaataaggaaa

SEQ ID NO: 306184 - DNA, 4384 bp, Homo sapiens
tgccagtgactggactcagcttctttgcgtaaccaatactggaaggcatttaaaggcacctctgccgccacagaccttgcagttaactccgccctgacccacccttcccgatgcagtccctgatgcaggctcccctcctgatcgccctgggcttgcttctcgcggcccctgcgcaagcccacctgaaaaagccatcccagctcagtagcttttcctgggataactgtgatgaagggaaggaccctgcggtgatcagaagcctgactctggagcctgaccccatcgtcgttcctggaaatgtgaccctcagtgtcgtgggcagcaccagtgtccccctgagttctcctctgaaggtggatttagttttggagaaggaggtggctggcctctggatcaagatcccatgcacagactacattggcagctgtacctttgaacacttctgtgatgtgcttgacatgttaattcctactggggagccctgcccagagcccctgcgtacctatgggcttccttgccactgtcccttcaaagaaggaacctactcactgcccaagagcgaattcgttgtgcctgacctggagctgcccagttggctcaccaccgggaactaccgcatagagagcgtcctgagcagcagtgggaagcgtctgggctgcatcaagatcgctgcctctctaaagggcatataacatggcatctgccacagcagaatggagcggtgtgaggaaggtcccttttcctctgttttgtgtttgccaaggccaaactcccactctctgcccccctttaatcccctttctacagtgagtccactaccctcactgaaaatcattttgtaccacttacattttaggctggggcaagcagccctgacctaagggagaatgagttggacagttcttgatagcccagggcatctgctgggctgaccacgttactcatccccgttaacattctctctaaagagcctcgttcatttccaaagcagttaaggaatgggaaccagagtgttttaggacctgaagaatctttatgactctctctctttcactctttttttttttggtcactaagttaaaagcgaagtgagagtattaacgtttttgttctcctccggccccctgttacaatgaaggggcaaaagtatttgctcttagtctattcctcccttaacttctgtgactaatttttatttcctttctagatttgcccaattaatactagggtgcagtgtatcctggagaggtagggtgtgtgggggaggaatcccttgggggagatattaggagtgctctgttgtttacaaactcaggtacccgcagggcctagcaagagacttaaatgactgataagaaccgtgagaaacatgttgcttccaggcttgatttcgatttttcgcttttttttttttttgagacagaatctcactttgtcaccaggctggagtgcagtggtgcaatctcacctcactgcaacctccgcctcctgggttcaagcaattctcctgcctcagcctcccaagtagcttggactacaggccctgccaccacgcccggctaatttgtgtatttttagtagagatggggtttcaccatgttggccaggatggtctcgatctcttgacctcgtgatccgtccaccttggccttgcaaagcgctggattacaggcatgagccactacacccagccgatttttcctttttgattaaagatgctattacaatgtaaatatttcttacacagaaagtcacagcacatgtgcccattgatacaaggctgctgaggcctggtctccagttggaaatataattaagggtggcaaggactggagtcagttggagagtgcatagccagtctgtgaagacaactgccagatactggcaatactccagcctggtgacagagtgagactctgtctcaaaaaaaaagtttcaatgtttactcctagagaagccaaaaatccagatttgtatatgaaatcttaccattttaaaagattggcagctaattatttttttaaaaagctgtgcagtgtgatgtgtcccaaacggactggctcatgggtggccacgtcacaacctctgatctcagaccgtgcatgccttgtcctcttaagacaactcctgtggcaccgtttctccctccacagggccaaagccatagtgtccggtcccaaggacaaggctcttccagtgctaggagaggtatgagcagcctctcacctgtgagctgtggggatcacaaggctgcctgcctcagtcttggagtcctgttgggtgaatgaggcagatgggaaagagcctcaccagcagctgcttttggagcaggggtccaaggaagagagggtggcctcgacatcaaactgcctggatttttctaccaccctgttacatcataacaacttctgaaacacacaccagccctgagttctgggctcatttgaagcctggaatagcaataaatctttttaacttgcgcagtttccccttgccttggctgcatatttcactgatcacatctcaggatttcaaaagcatttttggggtggggctcttttggttggaagggtttgttggaacggtacaggtgagccgaggtgattccagggacggacccttctgcaggagcttgagcttgcttgttgtctctgcttcatcgccatccagctcccttgtttgctattttgctttccatcacatcatgactgcggagagcaaaaatcacctagtgaccattgaacaggtcccagagacaaaatctttttatctgaggaatttaaaagggagcaaagaccacctggtgactatcaggccatgcagaggcaaaacgccttatttggggaaaattaaaagtaattagactttcctattatctaaagcaggcatctggttccagatttcttttccccgaaaaaaaccttagaagtaactaaaatttctgtacatctccggaatgccatgctgaaactcactgcaaccccacggtcccgctttaaggtccataaatatccctaaggaaaaatccaccgtggtacattcagtcctctcaccgaggtgccccatggcagtcttctgcagcattcttctaatacctttcctttttcaaacctatactgttgttggtgaattctttttaccaacccacgagttgaccacttcccaatgccggggatctgacacctcacctggcaatgacctccacagccgtttccctctgttggatcttccagccttattctcaacagttcatttttagttcacattcttgaccgaatctcagtagctcagttaatctttttatgtctgctctgctcttgggtcatatgttccgtgaggtttcttaggggtgggggatgaggagttaaaggtggcatcttcaatcgcaggtcaaagcagactttaataaatggtgctgagccaactggaaagccccttggagaaagttgaagttagacctgtacttcacaccatatgcaagaatgaactccatctggatccaggatccaaatgtaagaaaatgaagccatataaatacagaaggaaacgtggtggaaatatccagtggcaacaaaatattgacacatttgactacatgaagataataaaaatgcttagtaaaaacacaataaaatcaaatgactgggagaaaaatttatccagcctatataatagacaaacagttagtgttcttactatataaggaattaaaaattaagggacaaaggaccaaaaacttgatagaaaaactgggaaaagacatgaacatactcacgtaaagatataaaaatggctctttaaaatgaaatattcaaactaactcattagagaaatgtaaattgagataatactgagataccatttatcatctctaagactggtgaaagaaagaacaacacatttctgttaggcaaggctatagggaaacacactgtcatcactgttggtaggaatgcaaactggtatgacttctggaggggaatttgtcagtacttaacaaattgcagaagcatttaccctttgacacaaccatttccactgtgggaatttcccttgaagatgcacctccaacagtacaaacatacagatgcacaagattactcattgcagcactgagactgcaaatattggaagcaaagtcatgttcatatacacgagaaagcctgagtaaaccatggcaccaatggcatacccacatgatggaatattattgagctataaaaaaaatgaggaagatctctatgaatcggtatagttattttcaagatatattaaatgcaaaaagcaaagtacaaaaagtagaaagtggtactttgtatgtaagaaagaaggagatgtaagaaagcacatgtatctatttgtttatgcaaagtaaataaggaaa

SEQ ID NO: 306185 - DNA, 2145 bp, Homo sapiens
  misc_feature (1494)..(1494): n is a, c, g, or t
tgccagtgactggactcagcttctttgcgtaaccaatactggaaggcatttaaaggcacctctgccgccacagaccttgcagttaactccgccctgacccacccttcccgatgcagtccctgatgcaggctcccctcctgatcgccctgggcttgcttctcgcggcccctgcgcaagcccacctgaaaaagccatcccagctcagtagcttttcctgggataactgtgatgaagggaaggaccctgcggtgatcagaagcctgactctggagcctgaccccatcgtcgttcctggaaatgtgaccctcagtgtcgtgggcagcaccagtgtccccctgagttctcctctgaaggtggatttagttttggagaaggaggtggctggcctctggatcaagatcccatgcacagactacattggcagctgtacctttgaacacttctgtgatgtgcttgacatgttaattcctactggggagccctgcccagagcccctgcgtacctatgggcttccttgccactgtcccttcaaagaaggaacctactcactgcccaagagcgaattcgttgtgcctgacctggagctgcccagttggctcaccaccgggaactaccgcatagagagcgtcctgagcagcagtgggaagcgtctgggctgcatcaagatcgctgcctctctaaagggcatataacatggcatctgccacagcagaatggagcggtgtgaggaaggtcccttttcctctgttttgtgtttgccaaggccaaactcccactctctgcccccctttaatcccctttctacagtgagtccactaccctcactgaaaatcattttgtaccacttacattttaggctggggcaagcagccctgacctaagggagaatgagttggacagttcttgatagcccagggcatctgctgggctgaccacgttactcatccccgttaacattctctctaaagagcctcgttcatttccaaagcagttaaggaatgggaaccagagtgttttaggacctgaagaatctttatgactctctctctttcactctttttttttttggtcactaagttaaaagcgaagtgagagtattaacgtttttgttctcctccggccccctgttacaatgaaggggcaaaagtatttgctcttagtctattcctcccttaacttctgtgactaatttttatttcctttctagatttgcccaattaatactagggtgcagtgtatcctggagaggtagggtgtgtgggggaggaatcccttgggggagatattaggagtgctctgttgtttacaaactcaggtacccgcagggcctagcaagagacttaaatgactgataagaaccgtgagaaacatgttgcttccaggcttgatttcgatttttcgcttttttttttttttgagacagaatctcactttgtcaccaggctggagtgcagtggtgcaatctcacctcactgcaacctccgcctcctgagnaaggagaatcgcttgaacagggaggtggaggttgcagtgatccgggactgtgccactgccctccagcctggtgacagagtgagactctgtctcaaaaaaaaagtttcaatgtttactcctagagaagccaaaaatccagatttgtatatgaaatcttaccattttaaaagattggcagctaattatttttttaaaaagctgtgcagtgtgatgtgtcccaaacggactggctcatgggtggccacgtcacaacctctgatctcagaccgtgcatgccttgtcctcttaagacaactcctgtggcaccgtttctccctccacagggccaaagccatagtgtccggtcccaaggacaaggctcttccagtgctaggagaggtatgagcagcctctcacctgtgagctgtggggatcacaaggctgcctgcctcagtcttggagtcctgttgggtgaatgaggcagatgggaaagagcctcaccagcagctgcttttggagcaggggtccaaggaagagagggtggcctcgacatcaaactgcctggatttttctaccaccctgttacatcataacaacttctgaaacacacaccagccctgagttctgggctcatttgaagcctggaatagcaataaatctttttaacttgcg

SEQ ID NO: 306186 - DNA, 2952 bp, Homo sapiens
tgccagtgactggactcagcttctttgcgtaaccaatactggaaggcatttaaaggcacctctgccgccacagaccttgcagttaactccgccctgacccacccttcccgatgcagtccctgatgcaggctcccctcctgatcgccctgggcttgcttctcgcggcccctgcgcaagcccacctgaaaaagccatcccagctcagtagcttttcctgggataactgtgatgaagggaaggaccctgcggtgatcagaagcctgactctggagcctgaccccatcgtcgttcctggaaatgtgaccctcagtgtcgtgggcagcaccagtgtccccctgagttctcctctgaaggtggatttagttttggagaaggaggtggctggcctctggatcaagatcccatgcacagactacattggcagctgtacctttgaacacttctgtgatgtgcttgacatgttaattcctactggggagccctgcccagagcccctgcgtacctatgggcttccttgccactgtcccttcaaagaaggaacctactcactgcccaagagcgaattcgttgtgcctgacctggagctgcccagttggctcaccaccgggaactaccgcatagagagcgtcctgagcagcagtgggaagcgtctgggctgcatcaagatcgctgcctctctaaagggcatataacatggcatctgccacagcagaatggagcggtgtgaggaaggtcccttttcctctgttttgtgtttgccaaggccaaactcccactctctgcccccctttaatcccctttctacagtgagtccactaccctcactgaaaatcattttgtaccacttacattttaggctggggcaagcagccctgacctaagggagaatgagttggacagttcttgatagcccagggcatctgctgggctgaccacgttactcatccccgttaacattctctctaaagagcctcgttcatttccaaagcagttaaggaatgggaaccagagtgttttaggacctgaagaatctttatgactctctctctttcactctttttttttttggtcactaagttaaaagcgaagtgagagtattaacgtttttgttctcctccggccccctgttacaatgaaggggcaaaagtatttgctcttagtctattcctcccttaacttctgtgactaatttttatttcctttctagatttgcccaattaatactagggtgcagtgtatcctggagaggtagggtgtgtgggggaggaatcccttgggggagatattaggagtgctctgttgtttacaaactcaggtacccgcagggcctagcaagagacttaaatgactgataagaaccgtgagaaacatgttgcttccaggcttgatttcgatttttcgcttttttttttttttgagacagaatctcactttgtcaccaggctggagtgcagtggtgcaatctcacctcactgcaacctccgcctcctgggttcaagcaattctcctgcctcagcctcccaagtagcttggactacaggccctgccaccacgcccggctaatttgtgtatttttagtagagatggggtttcaccatgttggccaggatggtctcgatctcttgacctcgtgatccgtccaccttggccttgcaaagcgctggattacaggcatgagccactacacccagccgatttttcctttttgattaaagatgctattacaatgtaaatatttcttacacagaaagtcacagcacatgtgcccattgatacaaggctgctgaggcctggtctccagttggaaatataattaagggtggcaaggactggagtcagttggagagtgcatagccagtctgtgaagacaactgccagatactggcaatactccagcctggtgacagagtgagactctgtctcaaaaaaaaagtttcaatgtttactcctagagaagccaaaaatccagatttgtatatgaaatcttaccattttaaaagattggcagctaattatttttttaaaaagctgtgcagtgtgatgtgtcccaaacggactggctcatgggtggccacgtcacaacctctgatctcagaccgtgcatgccttgtcctcttaagacaactcctgtggcaccgtttctccctccacagggccaaagccatagtgtccggtcccaaggacaaggctcttccagtgctaggagaggtatgagcagcctctcacctgtgagctgtggggatcacaaggctgcctgcctcagtcttggagtcctgttgggtgaatgaggcagatgggaaagagcctcaccagcagctgcttttggagcaggggtccaaggaagagagggtggcctcgacatcaaactgcctggatttttctaccaccctgttacatcataacaacttctgaaacacacaccagccctgagttctgggctcatttgaagcctggaatagcaataaatctttttaacttgcgaaaaaaataaaagaaaaaaaagaaagaaaaaaaaaaaaaaaaaaaaagacaagaaggaggaaaaacacggagcgagaaagagagccgcgggagcacaagaggggcaatgagagacaaacagcagcggcagcgaccagagagaggagctaaaaaaacgagcgaagaagaagaggaggggaagaaggagcacagagaggagaagggccgagatagaccacagggaagaaaaataggcagaagagggagaaaagaggcgacacaaaagagagaaaggacaacaaacgaggggacagagacaagcacgagcaaggagagagagtgagaaagcggaagtgtgatggacaacacgaacagagagcgacgtaaaaacgcggagacagaaaaagaggcaataaaggagcgccacaacggagcagacaacaacagggaggagaaaaaacaacgaggagaggggacacacaggagaaccaa

SEQ ID NO: 306187 - DNA, 2701 bp, Homo sapiens
tgccagtgactggactcagcttctttgcgtaaccaatactggaaggcatttaaaggcacctctgccgccacagaccttgcagttaactccgccctgacccacccttcccgatgcagtccctgatgcaggctcccctcctgatcgccctgggcttgcttctcgcggcccctgcgcaagcccacctgaaaaagccatcccagctcagtagcttttcctgggataactgtgatgaagggaaggaccctgcggtgatcagaagcctgactctggagcctgaccccatcgtcgttcctggaaatgtgaccctcagtgtcgtgggcagcaccagtgtccccctgagttctcctctgaaggtggatttagttttggagaaggaggtggctggcctctggatcaagatcccatgcacagactacattggcagctgtacctttgaacacttctgtgatgtgcttgacatgttaattcctactggggagccctgcccagagcccctgcgtacctatgggcttccttgccactgtcccttcaaagaaggaacctactcactgcccaagagcgaattcgttgtgcctgacctggagctgcccagttggctcaccaccgggaactaccgcatagagagcgtcctgagcagcagtgggaagcgtctgggctgcatcaagatcgctgcctctctaaagggcatataacatggcatctgccacagcagaatggagcggtgtgaggaaggtcccttttcctctgttttgtgtttgccaaggccaaactcccactctctgcccccctttaatcccctttctacagtgagtccactaccctcactgaaaatcattttgtaccacttacattttaggctggggcaagcagccctgacctaagggagaatgagttggacagttcttgatagcccagggcatctgctgggctgaccacgttactcatccccgttaacattctctctaaagagcctcgttcatttccaaagcagttaaggaatgggaaccagagtgttttaggacctgaagaatctttatgactctctctctttcactctttttttttttggtcactaagttaaaagcgaagtgagagtattaacgtttttgttctcctccggccccctgttacaatgaaggggcaaaagtatttgctcttagtctattcctcccttaacttctgtgactaatttttatttcctttctagatttgcccaattaatactagggtgcagtgtatcctggagaggtagggtgtgtgggggaggaatcccttgggggagatattaggagtgctctgttgtttacaaactcaggtacccgcagggcctagcaagagacttaaatgactgataagaaccgtgagaaacatgttgcttccaggcttgatttcgatttttcgcttttttttttttttgagacagaatctcactttgtcaccaggctggagtgcagtggtgcaatctcacctcactgcaacctccgcctcctgggttcaagcaattctcctgcctcagcctcccaagtagcttggactacaggccctgccaccacgcccggctaatttgtgtatttttagtagagatggggtttcaccatgttggccaggatggtctcgatctcttgacctcgtgatccgtccaccttggccttgcaaagcgctggattacaggcatgagccactacacccagccgatttttcctttttgattaaagatgctattacaatgtaaatatttcttacacagaaagtcacagcacatgtgcccattgatacaaggctgctgaggcctggtctccagttggaaatataattaagggtggcaaggactggagtcagttggagagtgcatagccagtctgtgaagacaactgccagatactggcaatactccagcctggtgacagagtgagactctgtctcaaaaaaaaagtttcaatgtttactcctagagaagccaaaaatccagatttgtatatgaaatcttaccattttaaaagattggcagctaattatttttttaaaaagctgtgcagtgtgatgtgtcccaaacggactggctcatgggtggccacgtcacaacctctgatctcagaccgtgcatgccttgtcctcttaagacaactcctgtggcaccgtttctccctccacagggccaaagccatagtgtccggtcccaaggacaaggctcttccagtgctaggagaggtatgagcagcctctcacctgtgagctgtggggatcacaaggctgcctgcctcagtcttggagtcctgttgggtgaatgaggcagatgggaaagagcctcaccagcagctgcttttggagcaggggtccaaggaagagagggtggcctcgacatcaaactgcctggatttttctaccaccctgttacatcataacaacttctgaaacacacaccagccctgagttctgggctcatttgaagcctggaatagcaataaatctttttaacttgcgacacaaaacacacaccacccacacccacccacacaatcacacccccgccacgcccacccccccacaccacccccacaccacaaccagcgccaccacacccaccaccacaccaagcacagccgcgcaccacacaacacaccccgcaccaacccacacacacacgccccccccccccccagccaccaccgaggacggcaccccacacacacacgcccaccac

SEQ ID NO: 306188 - DNA, 2632 bp, Homo sapiens
tgccagtgactggactcagcttctttgcgtaaccaatactggaaggcatttaaaggcacctctgccgccacagaccttgcagttaactccgccctgacccacccttcccgatgcagtccctgatgcaggctcccctcctgatcgccctgggcttgcttctcgcggcccctgcgcaagcccacctgaaaaagccatcccagctcagtagcttttcctgggataactgtgatgaagggaaggaccctgcggtgatcagaagcctgactctggagcctgaccccatcgtcgttcctggaaatgtgaccctcagtgtcgtgggcagcaccagtgtccccctgagttctcctctgaaggtggatttagttttggagaaggaggtggctggcctctggatcaagatcccatgcacagactacattggcagctgtacctttgaacacttctgtgatgtgcttgacatgttaattcctactggggagccctgcccagagcccctgcgtacctatgggcttccttgccactgtcccttcaaagaaggaacctactcactgcccaagagcgaattcgttgtgcctgacctggagctgcccagttggctcaccaccgggaactaccgcatagagagcgtcctgagcagcagtgggaagcgtctgggctgcatcaagatcgctgcctctctaaagggcatataacatggcatctgccacagcagaatggagcggtgtgaggaaggtcccttttcctctgttttgtgtttgccaaggccaaactcccactctctgcccccctttaatcccctttctacagtgagtccactaccctcactgaaaatcattttgtaccacttacattttaggctggggcaagcagccctgacctaagggagaatgagttggacagttcttgatagcccagggcatctgctgggctgaccacgttactcatccccgttaacattctctctaaagagcctcgttcatttccaaagcagttaaggaatgggaaccagagtgttttaggacctgaagaatctttatgactctctctctttcactctttttttttttggtcactaagttaaaagcgaagtgagagtattaacgtttttgttctcctccggccccctgttacaatgaaggggcaaaagtatttgctcttagtctattcctcccttaacttctgtgactaatttttatttcctttctagatttgcccaattaatactagggtgcagtgtatcctggagaggtagggtgtgtgggggaggaatcccttgggggagatattaggagtgctctgttgtttacaaactcaggtacccgcagggcctagcaagagacttaaatgactgataagaaccgtgagaaacatgttgcttccaggcttgatttcgatttttcgcttttttttttttttgagacagaatctcactttgtcaccaggctggagtgcagtggtgcaatctcacctcactgcaacctccgcctcctgggttcaagcaattctcctgcctcagcctcccaagtagcttggactacaggccctgccaccacgcccggctaatttgtgtatttttagtagagatggggtttcaccatgttggccaggatggtctcgatctcttgacctcgtgatccgtccaccttggccttgcaaagcgctggattacaggcatgagccactacacccagccgatttttcctttttgattaaagatgctattacaatgtaaatatttcttacacagaaagtcacagcacatgtgcccattgatacaaggctgctgaggcctggtctccagttggaaatataattaagggtggcaaggactggagtcagttggagagtgcatagccagtctgtgaagacaactgccagatactggcaatactccagcctggtgacagagtgagactctgtctcaaaaaaaaagtttcaatgtttactcctagagaagccaaaaatccagatttgtatatgaaatcttaccattttaaaagattggcagctaattatttttttaaaaagctgtgcagtgtgatgtgtcccaaacggactggctcatgggtggccacgtcacaacctctgatctcagaccgtgcatgccttgtcctcttaagacaactcctgtggcaccgtttctccctccacagggccaaagccatagtgtccggtcccaaggacaaggctcttccagtgctaggagaggtatgagcagcctctcacctgtgagctgtggggatcacaaggctgcctgcctcagtcttggagtcctgttgggtgaatgaggcagatgggaaagagcctcaccagcagctgcttttggagcaggggtccaaggaagagagggtggcctcgacatcaaactgcctggatttttctaccaccctgttacatcataacaacttctgaaacacacaccagccctgagttctgggctcatttgaagcctggaatagcaataaatctttttaacttgcgaagaagaagcaaaagagcgaaaaaaaaaagacacaagaaagacacaaaaagacaaacaaagagaggggtgacacacaaaactcaccagagggggacaagaaagaaggagacaccgaatgtacaacgaagggcccaacaaagatacgacaag

SEQ ID NO: 306189 - DNA, 4424 bp, Homo sapiens
tgccagtgactggactcagcttctttgcgtaaccaatactggaaggcatttaaaggcacctctgccgccacagaccttgcagttaactccgccctgacccacccttcccgatgcagtccctgatgcaggctcccctcctgatcgccctgggcttgcttctcgcggcccctgcgcaagcccacctgaaaaagccatcccagctcagtagcttttcctgggataactgtgatgaagggaaggaccctgcggtgatcagaagcctgactctggagcctgaccccatcgtcgttcctggaaatgtgaccctcagtgtcgtgggcagcaccagtgtccccctgagttctcctctgaaggtggatttagttttggagaaggaggtggctggcctctggatcaagatcccatgcacagactacattggcagctgtacctttgaacacttctgtgatgtgcttgacatgttaattcctactggggagccctgcccagagcccctgcgtacctatgggcttccttgccactgtcccttcaaagaaggaacctactcactgcccaagagcgaattcgttgtgcctgacctggagctgcccagttggctcaccaccgggaactaccgcatagagagcgtcctgagcagcagtgggaagcgtctgggctgcatcaagatcgctgcctctctaaagggcatataacatggcatctgccacagcagaatggagcggtgtgaggaaggtcccttttcctctgttttgtgtttgccaaggccaaactcccactctctgcccccctttaatcccctttctacagtgagtccactaccctcactgaaaatcattttgtaccacttacattttaggctggggcaagcagccctgacctaagggagaatgagttggacagttcttgatagcccagggcatctgctgggctgaccacgttactcatccccgttaacattctctctaaagagcctcgttcatttccaaagcagttaaggaatgggaaccagagtgttttaggacctgaagaatctttatgactctctctctttcactctttttttttttggtcactaagttaaaagcgaagtgagagtattaacgtttttgttctcctccggccccctgttacaatgaaggggcaaaagtatttgctcttagtctattcctcccttaacttctgtgactaatttttatttcctttctagatttgcccaattaatactagggtgcagtgtatcctggagaggtagggtgtgtgggggaggaatcccttgggggagatattaggagtgctctgttgtttacaaactcaggtacccgcagggcctagcaagagacttaaatgactgataagaaccgtgagaaacatgttgcttccaggcttgatttcgatttttcgcttttttttttttttgagacagaatctcactttgtcaccaggctggagtgcagtggtgcaatctcacctcactgcaacctccgcctcctgggttcaagcaattctcctgcctcagcctcccaagtagcttggactacaggccctgccaccacgcccggctaatttgtgtatttttagtagagatggggtttcaccatgttggccaggatggtctcgatctcttgacctcgtgatccgtccaccttggccttgcaaagcgctggattacaggcatgagccactacacccagccgatttttcctttttgattaaagatgctattacaatgtaaatatttcttacacagaaagtcacagcacatgtgcccattgatacaaggctgctgaggcctggtctccagttggaaatataattaagggtggcaaggactggagtcagttggagagtgcatagccagtctgtgaagacaactgccagatactggcaatactccagcctggtgacagagtgagactctgtctcaaaaaaaaagtttcaatgtttactcctagagaagccaaaaatccagatttgtatatgaaatcttaccattttaaaagattggcagctaattatttttttaaaaagctgtgcagtgtgatgtgtcccaaacggactggctcatgggtggccacgtcacaacctctgatctcagaccgtgcatgccttgtcctcttaagacaactcctgtggcaccgtttctccctccacagggccaaagccatagtgtccggtcccaaggacaaggctcttccagtgctaggagaggtatgagcagcctctcacctgtgatccccacagctcacaggtgagaggctgctcatacctgtgagctgtggggatcacaaggctgcctgcctcagtcttggagtcctgttgggtgaatgaggcagatgggaaagagcctcaccagcagctgcttttggagcaggggtccaaggaagagagggtggcctcgacatcaaactgcctggatttttctaccaccctgttacatcataacaacttctgaaacacacaccagccctgagttctgggctcatttgaagcctggaatagcaataaatctttttaacttgcgcagtttccccttgccttggctgcatatttcactgatcacatctcaggatttcaaaagcatttttggggtggggctcttttggttggaagggtttgttggaacggtacaggtgagccgaggtgattccagggacggacccttctgcaggagcttgagcttgcttgttgtctctgcttcatcgccatccagctcccttgtttgctattttgctttccatcacatcatgactgcggagagcaaaaatcacctagtgaccattgaacaggtcccagagacaaaatctttttatctgaggaatttaaaagggagcaaagaccacctggtgactatcaggccatgcagaggcaaaacgccttatttggggaaaattaaaagtaattagactttcctattatctaaagcaggcatctggttccagatttcttttccccgaaaaaaaccttagaagtaactaaaatttctgtacatctccggaatgccatgctgaaactcactgcaaccccacggtcccgctttaaggtccataaatatccctaaggaaaaatccaccgtggtacattcagtcctctcaccgaggtgccccatggcagtcttctgcagcattcttctaatacctttcctttttcaaacctatactgttgttggtgaattctttttaccaacccacgagttgaccacttcccaatgccggggatctgacacctcacctggcaatgacctccacagccgtttccctctgttggatcttccagccttattctcaacagttcatttttagttcacattcttgaccgaatctcagtagctcagttaatctttttatgtctgctctgctcttgggtcatatgttccgtgaggtttcttaggggtgggggatgaggagttaaaggtggcatcttcaatcgcaggtcaaagcagactttaataaatggtgctgagccaactggaaagccccttggagaaagttgaagttagacctgtacttcacaccatatgcaagaatgaactccatctggatccaggatccaaatgtaagaaaatgaagccatataaatacagaaggaaacgtggtggaaatatccagtggcaacaaaatattgacacatttgactacatgaagataataaaaatgcttagtaaaaacacaataaaatcaaatgactgggagaaaaatttatccagcctatataatagacaaacagttagtgttcttactatataaggaattaaaaattaagggacaaaggaccaaaaacttgatagaaaaactgggaaaagacatgaacatactcacgtaaagatataaaaatggctctttaaaatgaaatattcaaactaactcattagagaaatgtaaattgagataatactgagataccatttatcatctctaagactggtgaaagaaagaacaacacatttctgttaggcaaggctatagggaaacacactgtcatcactgttggtaggaatgcaaactggtatgacttctggaggggaatttgtcagtacttaacaaattgcagaagcatttaccctttgacacaaccatttccactgtgggaatttcccttgaagatgcacctccaacagtacaaacatacagatgcacaagattactcattgcagcactgagactgcaaatattggaagcaaagtcatgttcatatacacgagaaagcctgagtaaaccatggcaccaatggcatacccacatgatggaatattattgagctataaaaaaaatgaggaagatctctatgaatcggtatagttattttcaagatatattaaatgcaaaaagcaaagtacaaaaagtagaaagtggtactttgtatgtaagaaagaaggagatgtaagaaagcacatgtatctatttgtttatgcaaagtaaataaggaaa

SEQ ID NO: 306190 - DNA, 2212 bp, Homo sapiens
tgccagtgactggactcagcttctttgcgtaaccaatactggaaggcatttaaaggcacctctgccgccacagaccttgcagttaactccgccctgacccacccttcccgatgcagtccctgatgcaggctcccctcctgatcgccctgggcttgcttctcgcggcccctgcgcaagcccacctgaaaaagccatcccagctcagtagcttttcctgggataactgtgatgaagggaaggaccctgcggtgatcagaagcctgactctggagcctgaccccatcgtcgttcctggaaatgtgaccctcagtgtcgtgggcagcaccagtgtccccctgagttctcctctgaaggtggatttagttttggagaaggaggtggctggcctctggatcaagatcccatgcacagactacattggcagctgtacctttgaacacttctgtgatgtgcttgacatgttaattcctactggggagccctgcccagagcccctgcgtacctatgggcttccttgccactgtcccttcaaagaaggaacctactcactgcccaagagcgaattcgttgtgcctgacctggagctgcccagttggctcaccaccgggaactaccgcatagagagcgtcctgagcagcagtgggaagcgtctgggctgcatcaagatcgctgcctctctaaagggcatataacatggcatctgccacagcagaatggagcggtgtgaggaaggtcccttttcctctgttttgtgtttgccaaggccaaactcccactctctgcccccctttaatcccctttctacagtgagtccactaccctcactgaaaatcattttgtaccacttacattttaggctggggcaagcagccctgacctaagggagaatgagttggacagttcttgatagcccagggcatctgctgggctgaccacgttactcatccccgttaacattctctctaaagagcctcgttcatttccaaagcagttaaggaatgggaaccagagtgttttaggacctgaagaatctttatgactctctctctttcactctttttttttttggtcactaagttaaaagcgaagtgagagtattaacgtttttgttctcctccggccccctgttacaatgaaggggcaaaagtatttgctcttagtctattcctcccttaacttctgtgactaatttttatttcctttctagatttgcccaattaatactagggtgcagtgtatcctggagaggtagggtgtgtgggggaggaatcccttgggggagatattaggagtgctctgttgtttacaaactcaggtacccgcagggcctagcaagagacttaaatgactgataagaaccgtgagaaacatgttgcttccaggcttgatttcgatttttcgcttttttttttttttgagacagaatctcactttgtcaccaggtggaggttgcagtgatccgggactgtgccactgccctctagcctgggtgacagagtgagactccatctcaaacccacaaacaaaaaaacaccattaggcaaacaccataggaatagttgttgcagacaagaaacacctatgaatgccgaattagtgaacagaagtatgatgggaaacacgattttgcatggttttaagatcccttcacaagatactaattacaaagggaaaaacagtcattatagtgaataagcctgacagaaaccaccttaacccagtgatcaagttaacatcaccactaataagacatactgataccatgtaccttccaatatgatgcactgagaagggcacaattgtcacttctgtggtgttgtcagaaatgtgcaatctcagtgcaatcaggagaaaagatcagacaagcccaaactgagagacactctacaaaataactggccagtacgttttgaaagtgccaaggccgtgaacaataaggaaagactgaggaacagtcatggactggaagagagtaaagaaatatgataactaactgcattgtgagataccgatttagatgttggattagaaaaaggaccagaaataagatttcatcaatgtcaattatttggttttgataattgtactgtggttatgtaagatgttaacattagtaagagctgggtgaagggtacatggaaactattatttttgccaccctttgaaagtctaacttttttcaaaataaaaagttttaaaaataaaaaaagaa

SEQ ID NO: 306191 - DNA, 2521 bp, Homo sapiens
tgccagtgactggactcagcttctttgcgtaaccaatactggaaggcatttaaaggcacctctgccgccacagaccttgcagttaactccgccctgacccacccttcccgatgcagtccctgatgcaggctcccctcctgatcgccctgggcttgcttctcgcggcccctgcgcaagcccacctgaaaaagccatcccagctcagtagcttttcctgggataactgtgatgaagggaaggaccctgcggtgatcagaagcctgactctggagcctgaccccatcgtcgttcctggaaatgtgaccctcagtgtcgtgggcagcaccagtgtccccctgagttctcctctgaaggtggatttagttttggagaaggaggtggctggcctctggatcaagatcccatgcacagactacattggcagctgtacctttgaacacttctgtgatgtgcttgacatgttaattcctactggggagccctgcccagagcccctgcgtacctatgggcttccttgccactgtcccttcaaagaaggaacctactcactgcccaagagcgaattcgttgtgcctgacctggagctgcccagttggctcaccaccgggaactaccgcatagagagcgtcctgagcagcagtgggaagcgtctgggctgcatcaagatcgctgcctctctaaagggcatataacatggcatctgccacagcagaatggagcggtgtgaggaaggtcccttttcctctgttttgtgtttgccaaggccaaactcccactctctgcccccctttaatcccctttctacagtgagtccactaccctcactgaaaatcattttgtaccacttacattttaggctggggcaagcagccctgacctaagggagaatgagttggacagttcttgatagcccagggcatctgctgggctgaccacgttactcatccccgttaacattctctctaaagagcctcgttcatttccaaagcagttaaggaatgggaaccagagtgttttaggacctgaagaatctttatgactctctctctttcactctttttttttttggtcactaagttaaaagcgaagtgagagtattaacgtttttgttctcctccggccccctgttacaatgaaggggcaaaagtatttgctcttagtctattcctcccttaacttctgtgactaatttttatttcctttctagatttgcccaattaatactagggtgcagtgtatcctggagaggtagggtgtgtgggggaggaatcccttgggggagatattaggagtgctctgttgtttacaaactcaggtacccgcagggcctagcaagagacttaaatgactgataagaaccgtgagaaacatgttgcttccaggcttgatttcgatttttcgcttttttttttttttgagacagaatctcactttgtcaccaggctggagtgcagtggtgcaatctcacctcactgcaacctccgcctcctgggttcaagcaattctcctgcctcagcctcccaagtagcttggactacaggccctgccaccacgcccggctaatttgtgtatttttagtagagatggggtttcaccatgttggccaggatggtctcgatctcttgacctcgtgatccgtccaccttggccttgcaaagcgctggattacaggcatgagccactacacccagccgatttttcctttttgattaaagatgctattacaatgtaaatatttcttacacagaaagtcacagcacatgtgcccattgatacaaggctgctgaggcctggtctccagttggaaatataattaagggtggcaaggactggagtcagttggagagtgcatagccagtctgtgaagacaactgccagatactggcaatactccagcctggtgacagagtgagactctgtctcaaaaaaaaagtttcaatgtttactcctagagaagccaaaaatccagatttgtatatgaaatcttaccattttaaaagattggcagctaattatttttttaaaaagctgtgcagtgtgatgtgtcccaaacggactggctcatgggtggccacgtcacaacctctgatctcagaccgtgcatgccttgtcctcttaagacaactcctgtggcaccgtttctccctccacagggccaaagccatagtgtccggtcccaaggacaaggctcttccagtgctaggagaggtatgagcagcctctcacctgtgatccccacagctcacaggtgagaggctgctcatacctgtgagctgtggggatcacaaggctgcctgcctcagtcttggagtcctgttgggtgaatgaggcagatgggaaagagcctcaccagcagctgcttttggagcaggggtccaaggaagagagggtggcctcgacatcaaactgcctggatttttctaccaccctgttacatcataacaacttctgaaacacacaccagccctgagttctgggctcatttgaagcctggaatagcaataaatctttttaacttgcg

SEQ ID NO: 306192 - DNA, 2058 bp, Homo sapiens
tgccagtgactggactcagcttctttgcgtaaccaatactggaaggcatttaaaggcacctctgccgccacagaccttgcagttaactccgccctgacccacccttcccgatgcagtccctgatgcaggctcccctcctgatcgccctgggcttgcttctcgcggcccctgcgcaagcccacctgaaaaagccatcccagctcagtagcttttcctgggataactgtgatgaagggaaggaccctgcggtgatcagaagcctgactctggagcctgaccccatcgtcgttcctggaaatgtgaccctcagtgtcgtgggcagcaccagtgtccccctgagttctcctctgaaggtggatttagttttggagaaggaggtggctggcctctggatcaagatcccatgcacagactacattggcagctgtacctttgaacacttctgtgatgtgcttgacatgttaattcctactggggagccctgcccagagcccctgcgtacctatgggcttccttgccactgtcccttcaaagaaggaacctactcactgcccaagagcgaattcgttgtgcctgacctggagctgcccagttggctcaccaccgggaactaccgcatagagagcgtcctgagcagcagtgggaagcgtctgggctgcatcaagatcgctgcctctctaaagggcatataacatggcatctgccacagcagaatggagcggtgtgaggaaggtcccttttcctctgttttgtgtttgccaaggccaaactcccactctctgcccccctttaatcccctttctacagtgagtccactaccctcactgaaaatcattttgtaccacttacattttaggctggggcaagcagccctgacctaagggagaatgagttggacagttcttgatagcccagggcatctgctgggctgaccacgttactcatccccgttaacattctctctaaagagcctcgttcatttccaaagcagttaaggaatgggaaccagagtgttttaggacctgaagaatctttatgactctctctctttcactctttttttttttggtcactaagttaaaagcgaagtgagagtattaacgtttttgttctcctccggccccctgttacaatgaaggggcaaaagtatttgctcttagtctattcctcccttaacttctgtgactaatttttatttcctttctagatttgcccaattaatactagggtgcagtgtatcctggagaggtagggtgtgtgggggaggaatcccttgggggagatattaggagtgctctgttgtttacaaactcaggtacccgcagggcctagcaagagaactctgtctcaaaaaaaaagtttcaatgtttactcctagagaagccaaaaatccagatttgtatatgaaatcttaccattttaaaagattggcagctaattatttttttaaaaagctgtgcagtgtgatgtgtcccaaacggactggctcatgggtggccacgtcacaacctctgatctcagaccgtgcatgccttgtcctcttaagacaactcctgtggcaccgtttctccctccacagggccaaagccatagtgtccggtcccaaggacaaggctcttccagtgctaggagaggtatgagcagcctctcacctgtgagctgtggggatcacaaggctgcctgcctcagtcttggagtcctgttgggtgaatgaggcagatgggaaagagcctcaccagcagctgcttttggagcaggggtccaaggaagagagggtggcctcgacatcaaactgcctggatttttctaccaccctgttacatcataacaacttctgaaacacacaccagccctgagttctgggctcatttgaagcctggaatagcaataaatctttttaacttgcgaagaagaagcaaaagagcgaaaaaaaaaagacacaagaaagacacaaaaagacaaacaaagagaggggtgacacacaaaactcaccagagggggacaagaaagaaggagacaccgaatgtacaacgaagggcccaacaaagatacgacaag

SEQ ID NO: 306193 - DNA, 2518 bp, Homo sapiens
ctgcagaggaggctgccggcagtacaggatgcagggagaacccaggcctggggttgaggccaggagactcaattccagctttactgtgtgcctttagcaggaatgtcatgggtagaagctgctggcgtgtcatctacagccttggaggacaggattgtggccaagcatgaggaggttccagaagtttcagttcagtatgaagaaaaatttcagaaccatcacaaactgccatcccagctcagtagcttttcctgggataactgtgatgaagggaaggaccctgcggtgatcagaagcctgactctggagcctgaccccatcgtcgttcctggaaatgtgaccctcagtgtcgtgggcagcaccagtgtccccctgagttctcctctgaaggtggatttagttttggagaaggaggtggctggcctctggatcaagatcccatgcacagactacattggcagctgtacctttgaacacttctgtgatgtgcttgacatgttaattcctactggggagccctgcccagagcccctgcgtacctatgggcttccttgccactgtcccttcaaagaaggaacctactcactgcccaagagcgaattcgttgtgcctgacctggagctgcccagttggctcaccaccgggaactaccgcatagagagcgtcctgagcagcagtgggaagcgtctgggctgcatcaagatcgctgcctctctaaagggcatataacatggcatctgccacagcagaatggagcggtgtgaggaaggtcccttttcctctgttttgtgtttgccaaggccaaactcccactctctgcccccctttaatcccctttctacagtgagtccactaccctcactgaaaatcattttgtaccacttacattttaggctggggcaagcagccctgacctaagggagaatgagttggacagttcttgatagcccagggcatctgctgggctgaccacgttactcatccccgttaacattctctctaaagagcctcgttcatttccaaagcagttaaggaatgggaaccagagtgttttaggacctgaagaatctttatgactctctctctttcactctttttttttttggtcactaagttaaaagcgaagtgagagtattaacgtttttgttctcctccggccccctgttacaatgaaggggcaaaagtatttgctcttagtctattcctcccttaacttctgtgactaatttttatttcctttctagatttgcccaattaatactagggtgcagtgtatcctggagaggtagggtgtgtgggggaggaatcccttgggggagatattaggagtgctctgttgtttacaaactcaggtacccgcagggcctagcaagagacttaaatgactgataagaaccgtgagaaacatgttgcttccaggcttgatttcgatttttcgcttttttttttttttgagacagaatctcactttgtcaccaggctggagtgcagtggtgcaatctcacctcactgcaacctccgcctcctgggttcaagcaattctcctgcctcagcctcccaagtagcttggactacaggccctgccaccacgcccggctaatttgtgtatttttagtagagatggggtttcaccatgttggccaggatggtctcgatctcttgacctcgtgatccgtccaccttggccttgcaaagcgctggattacaggcatgagccactacacccagccgatttttcctttttgattaaagatgctattacaatgtaaatatttcttacacagaaagtcacagcacatgtgcccattgatacaaggctgctgaggcctggtctccagttggaaatataattaagggtggcaaggactggagtcagttggagagtgcatagccagtctgtgaagacaactgccagatactggcaatactccagcctggtgacagagtgagactctgtctcaaaaaaaaagtttcaatgtttactcctagagaagccaaaaatccagatttgtatatgaaatcttaccattttaaaagattggcagctaattatttttttaaaaagctgtgcagtgtgatgtgtcccaaacggactggctcatgggtggccacgtcacaacctctgatctcagaccgtgcatgccttgtcctcttaagacaactcctgtggcaccgtttctccctccacagggccaaagccatagtgtccggtcccaaggacaaggctcttccagtgctaggagaggtatgagcagcctctcacctgtgagctgtggggatcacaaggctgcctgcctcagtcttggagtcctgttgggtgaatgaggcagatgggaaagagcctcaccagcagctgcttttggagcaggggtccaaggaagagagggtggcctcgacatcaaactgcctggatttttctaccaccctgttacatcataacaacttctgaaacacacaccagccctgagttctgggctcatttgaagcctggaatagcaataaatctttttaacttgcg

SEQ ID NO: 306194 - DNA, 1751 bp, Homo sapiens
tgccagtgactggactcagcttctttgcgtaaccaatactggaaggcatttaaaggcacctctgccgccacagaccttgcagttaactccgccctgacccacccttcccgatgcagtccctgatgcaggctcccctcctgatcgccctgggcttgcttctcgcggcccctgcgcaagcccacctgaaaaagccatcccagctcagtagcttttcctgggataactgtgatgaagggaaggaccctgcggtgatcagaagcctgactctggagcctgaccccatcgtcgttcctggaaatgtgaccctcagtgtcgtgggcagcaccagtgtccccctgagttctcctctgaaggtggatttagttttggagaaggaggtggctggcctctggatcaagatcccatgcacagactacattggcagctgtacctttgaacacttctgtgatgtgcttgacatgttaattcctactggggagccctgcccagagcccctgcgtacctatgggcttccttgccactgtcccttcaaagaaggaacctactcactgcccaagagcgaattcgttgtgcctgacctggagctgcccagttggctcaccaccgggaactaccgcatagagagcgtcctgagcagcagtgggaagcgtctgggctgcatcaagatcgctgcctctctaaagggcatataacatggcatctgccacagcagaatggagcggtgtgaggaaggtcccttttcctctgttttgtgtttgccaaggccaaactcccactctctgcccccctttaatcccctttctacagtgagtccactaccctcactgaaaatcattttgtaccacttacattttaggctggggcaagcagccctgacctaagggagaatgagttggacagttcttgatagcccagggcatctgctgggctgaccacgttactcatccccgttaacattctctctaaagagcctcgttcatttccaaagcagttaaggaatgggaaccagagtgttttaggacctgaagaatctttatgactctctctctttcactctttttttttttggtcactaagttaaaagcgaagtgagagtattaacgtttttgttctcctccggccccctgttacaatgaaggggcaaaagtatttgctcttagtctattcctcccttaacttctgtgactaatttttatttcctttctagatttgcccaattaatactagggtgcagtgtatcctggagaggtagggtgtgtgggggaggaatcccttgggggagatattaggagtgctctgttgtttacaaactcaggtacccgcagggcctagcaagagacttaaatgactgataagaaccgtgagaaacatgttgcttccaggcttgatttcgatttttcctttttgattaaagatgctattacaatgtaaatatttcttacacagaaagtcacagcacatgtgcccattgatacaaggctgctgaggcctggtctccagttggaaatataattaagggtggcaaggactggagtcagttggagagtgcatagccagtctgtgaagacaactgccagatactggcaatactccagcctggtgacagagtgagactctgtctcaaaaaaaaaaaaagattcatgtccttagattagattgtaacgcactgggcaggtactgtgtctaatgttttgtgtggcacctgtcacattgttagagctcaataaacgttcaacaacaaaaaaaaaaaa

SEQ ID NO: 306195 - DNA, 681 bp, Homo sapiens
gaatcgagctggtccgtctcgccacaggactggagtcagttggagagtgcatagccagtctgtgaagacaactgccagatactggcaatactccagcctggtgacagagtgagactctgtctcaaaaaaaaagtttcaatgtttactcctagagaagccaaaaatccagatttgtatatgaaatcttaccattttaaaagattggcagctaattatttttttaaaaagctgtgcagtgtgatgtgtcccaaacggactggctcatgggtggccacgtcacaacctctgatctcagaccgtgcatgccttgtcctcttaagacaactcctgtggcaccgtttctccctccacagggccaaagccatagtgtccggtcccaaggacaaggctcttccagtgctaggagaggtatgagcagcctctcacctgtgagctgtggggatcacaaggctgcctgcctcagtcttggagtcctgttgggtgaatgaggcagatgggaaagagcctcaccagcagctgcttttggagcaggggtccaaggaagagagggtggcctcgacatcaaactgcctggatttttctaccaccctgttacatcataacaacttctgaaacacacaccagccctgagttctgggctcatttgaagcctggaatagcaataaatctttttaacttgcg

SEQ ID NO: 306196 - DNA, 2363 bp, Homo sapiens
  misc_feature (1)..(1): n is a, c, g, or t
ntgatatagagctcggtaccgtcagcccacaaggactggctcatgggtggccacgtcacaacctctgatctcagaccgtgcatgccttgtcctcttaagacaactcctgtggcaccgtttctccctccacagggccaaagccatagtgtccggtcccaaggacaaggctcttccagtgctaggagaggtatgagcagcctctcacctgtgagctgtggggatcacaaggctgcctgcctcagtcttggagtcctgttgggtgaatgaggcagatgggaaagagcctcaccagcagctgcttttggagcaggggtccaaggaagagagggtggcctcgacatcaaactgcctggatttttctaccaccctgttacatcataacaacttctgaaacacacaccagccctgagttctgggctcatttgaagcctggaatagcaataaatctttttaacttgcgcagtttccccttgccttggctgcatatttcactgatcacatctcaggatttcaaaagcatttttggggtggggctcttttggttggaagggtttgttggaacggtacaggtgagccgaggtgattccagggacggacccttctgcaggagcttgagcttgcttgttgtctctgcttcatcgccatccagctcccttgtttgctattttgctttccatcacatcatgactgcggagagcaaaaatcacctagtgaccattgaacaggtcccagagacaaaatctttttatctgaggaatttaaaagggagcaaagaccacctggtgactatcaggccatgcagaggcaaaacgccttatttggggaaaattaaaagtaattagactttcctattatctaaagcaggcatctggttccagatttcttttccccgaaaaaaaccttagaagtaactaaaatttctgtacatctccggaatgccatgctgaaactcactgcaaccccacggtcccgctttaaggtccataaatatccctaaggaaaaatccaccgtggtacattcagtcctctcaccgaggtgccccatggcagtcttctgcagcattcttctaatacctttcctttttcaaacctatactgttgttggtgaattctttttaccaacccacgagttgaccacttcccaatgccggggatctgacacctcacctggcaatgacctccacagccgtttccctctgttggatcttccagccttattctcaacagttcatttttagttcacattcttgaccgaatctcagtagctcagttaatctttttatgtctgctctgctcttgggtcatatgttccgtgaggtttcttaggggtgggggatgaggagttaaaggtggcatcttcaatcgcaggtcaaagcagactttaataaatggtgctgagccaactggaaagccccttggagaaagttgaagttagacctgtacttcacaccatatgcaagaatgaactccatctggatccaggatccaaatgtaagaaaatgaagccatataaatacagaaggaaacgtggtggaaatatccagtggcaacaaaatattgacacatttgactacatgaagataataaaaatgcttagtaaaaacacaataaaatcaaatgactgggagaaaaatttatccagcctatataatagacaaacagttagtgttcttactatataaggaattaaaaattaagggacaaaggaccaaaaacttgatagaaaaactgggaaaagacatgaacatactcacgtaaagatataaaaatggctctttaaaatgaaatattcaaactaactcattagagaaatgtaaattgagataatactgagataccatttatcatctctaagactggtgaaagaaagaacaacacatttctgttaggcaaggctatagggaaacacactgtcatcactgttggtaggaatgcaaactggtatgacttctggaggggaatttgtcagtacttaacaaattgcagaagcatttaccctttgacacaaccatttccactgtgggaatttcccttgaagatgcacctccaacagtacaaacatacagatgcacaagattactcattgcagcactgagactgcaaatattggaagcaaagtcatgttcatatacacgagaaagcctgagtaaaccatggcaccaatggcatacccacatgatggaatattattgagctataaaaaaaatgaggaagatctctatgaatcggtatagttattttcaagatatattaaatgcaaaaagcaaagtacaaaaagtagaaagtggtactttgtatgtaagaaagaaggagatgtaagaaagcacatgtatctatttgtttatgcaaagtaaataaggaaa

SEQ ID NO: 306197 - DNA, 1718 bp, Homo sapiens
tgccagtgactggactcagcttctttgcgtaaccaatactggaaggcatttaaaggcacctctgccgccacagaccttgcagttaactccgccctgacccacccttcccgatgcagtccctgatgcaggctcccctcctgatcgccctgggcttgcttctcgcggcccctgcgcaagcccacctgaaaaagccatcccagctcagtagcttttcctgggataactgtgatgaagggaaggaccctgcggtgatcagaagcctgactctggagcctgaccccatcgtcgttcctggaaatgtgaccctcagtgtcgtgggcagcaccagtgtccccctgagttctcctctgaaggtggatttagttttggagaaggaggtggctggcctctggatcaagatcccatgcacagactacattggcagctgtacctttgaacacttctgtgatgtgcttgacatgttaattcctactggggagccctgcccagagcccctgcgtacctatgggcttccttgccactgtcccttcaaagaaggaacctactcactgcccaagagcgaattcgttgtgcctgacctggagctgcccagttggctcaccaccgggaactaccgcatagagagcgtcctgagcagcagtgggaagcgtctgggctgcatcaagatcgctgcctctctaaagggcatataacatggcatctgccacagcagaatggagcggtgtcaaagcagactttaataaatggtgctgagccaactggaaagccccttggagaaagttgaagttagacctgtacttcacaccatatgcaagaatgaactccatctggatccaggatccaaatgtaagaaaatgaagccatataaatacagaaggaaacgtggtggaaatatccagtggcaacaaaatattgacacatttgactacatgaagataataaaaatgcttagtaaaaacacaataaaatcaaatgactgggagaaaaatttatccagcctatataatagacaaacagttagtgttcttactatataaggaattaaaaattaagggacaaaggaccaaaaacttgatagaaaaactgggaaaagacatgaacatactcacgtaaagatataaaaatggctctttaaaatgaaatattcaaactaactcattagagaaatgtaaattgagataatactgagataccatttatcatctctaagactggtgaaagaaagaacaacacatttctgttaggcaaggctatagggaaacacactgtcatcactgttggtaggaatgcaaactggtatgacttctggaggggaatttgtcagtacttaacaaattgcagaagcatttaccctttgacacaaccatttccactgtgggaatttcccttgaagatgcacctccaacagtacaaacatacagatgcacaagattactcattgcagcactgagactgcaaatattggaagcaaagtcatgttcatatacacgagaaagcctgagtaaaccatggcaccaatggcatacccacatgatggaatattattgagctataaaaaaaatgaggaagatctctatgaatcggtatagttattttcaagatatattaaatgcaaaaagcaaagtacaaaaagtagaaagtggtactttgtatgtaagaaagaaggagatgtaagaaagcacatgtatctatttgtttatgcaaagtaaataaggaaa

SEQ ID NO: 306198 - DNA, 883 bp, Homo sapiens
  misc_feature (798)..(798): n is a, c, g, or t
  misc_feature (842)..(842): n is a, c, g, or t
  misc_feature (879)..(879): n is a, c, g, or t
  misc_feature (881)..(882): n is a, c, g, or t
tgccagtgactggactcagcttctttgcgtaaccaatactggaaggcatttaaaggcacctctgccgccacagaccttgcagttaactccgccctgacccacccttcccgatgcagtccctgatgcaggctcccctcctgatcgccctgggcttgcttctcgcggcccctgcgcaagcccacctgaaaaagccatcccagctcagtagcttttcctgggataactgtgatgaagggaaggaccctgcggtgatcagaagcctgactctggagcctgaccccatcgtcgttcctggaaatgtgaccctcagtgtcgtgggcagcaccagtgtccccctgagttctcctctgaaggtggatttagttttggagaaggaggtggctggcctctggatcaagatcccatgcacagactacattggcagctgtacctttgaacacttctgtgatgtgcttgacatgttaattcctactggggagccctgcccagagcccctgcgtacctatgggcttccttgccactgtcccttcaaagaagtaagtacttagggaggagagagcgttacccctgtggctaaagagatggggtttggagagaagggtctttgcattctccttctgcagatctgcatgtctctggatttgtaagccagtgtgacctatcaggaatcacttatcttccgggagcctcagttatccatctacgaaatgggagacttgaacttagatgtgatcttcagggccctttatccataataatccatgctctacagtgctatggccgtctctcatcttgtgnggctgttttgagaatgggaagaggggtggtagttcatggctgcnatcctagcagtggctctaggagaaagaccccatcagnannt

SEQ ID NO: 306199 - DNA, 531 bp, Homo sapiens
ctgcagaggaggctgccggcagtacaggatgcagggagaacccaggcctggggttgaggccaggagactcaattccagctttactgtgtgcctttagcaggaatgtcatgggtagaagctgctggcgtgtcatctacagccttggaggacaggattgtggccaagcatgaggaggttccagaagtttcagttcagtatgaagaaaaatttcagaaccatcacaaactgatgaggaaactgaggcatggagaagccaagccactcttaaggtcacttaatggatcttccatgtagtcaggactgaaccagcatccaacccagagcccggtgtggtcgacccacaaatgtttgccaagttagccatgcccttgttgtctactggttgatttcagaattacccaagcctgcaccagcctcttccttatcattcacttctgtcacctggcttgctacatggatgtgctcatgaagggctgctgaatgactgacccaccaagtacctgtcacctgaggcccagctttggcagctgt

SEQ ID NO: 306200 - DNA, 519 bp, Homo sapiens
aggaccctgcggtgatcagaagcctgactctggagcctgaccccatcgtcgttcctggaaatgtgaccctcagtgtcgtgggcagcaccagtgtccccctgagttctcctctgaaggtgagcctgggggtgggtggagaaggggaggtgcgagggtctggccagcaggggtactggggcatgtatgcttggggaactgtgaagaatttcagaatcctggattcccagagaatagtacaggacatgtagattcagacactctttcacaggttcatggaatctcaggatcataagattgaaaggaatctctgatgtcagcgccagcaacttcctggtgagggcaggagtgacggataccttgcacctggcagaagcgtcctggccttctctgggcctggtggccaactgctcattattgtctgacagctctggttggccaatttggttttgttgttaattataaaattgatataccaattagccagtaatatatagtcactttagaaaacacaagtggtca

SEQ ID NO: 306201 - DNA, 2030 bp, Homo sapiens
ctctgcaacagccgcgcttcccgggtcccgcggctcccgcgcgcgatctgccgcggccggctgctgggcaaaaatcagagccgcctccgccccattacccatcatggaaaccctccaggaaaaagtggccccggacgcgcgagcctgaggattctgcacaaaagaggtgcccaaaatgaagaccctgatgcgccatggtctggcagtgtgtttagcgctcaccaccatgtgcaccagcttgttgctagtgtacagcagcctcggcggccagaaggagcggcccccgcagcagcagcagcagcagcagcaacagcagcagcaggcgtcggccaccggcagctcgcagccggcggcggagagcagcacccagcagcgccccggggtccccgcgggaccgcggccactggacggatacctcggagtggcggaccacaagcccctgaaaatgcactgcagggactgtgccctggtgaccagctcagggcatctgctgcacagtcggcaaggctcccagattgaccagacagagtgtgtcatccgcatgaatgacgcccccacacgcggctatgggcgtgacgtgggcaatcgcaccagcctgagggtcatcgcgcattccagcatccagaggatcctccgcaaccgccatgacctgctcaacgtgagccagggcaccgtgttcatcttctggggccccagcagctacatgcggcgggacggcaagggccaggtctacaacaacctgcatctcctgagccaggtgctgccccggctgaaggccttcatgattactcgccacaagatgctgcagtttgatgagctcttcaagcaggagactggcaaagacaggaagatatccaacacttggctcagcactggctggtttacaatgacaattgcactggagctctgtgacaggatcaatgtttatggcatggtgcccccagacttctgcagggatcccaatcacccttcagtaccttatcattattatgaaccttttggacctgatgaatgtacaatgtacctctcccatgagcgaggacgcaagggcagtcatcaccgctttatcacagagaaacgagtctttaagaactgggcacggacattcaatattcacttttttcaaccagactggaaaccagaatcacttgctataaatcatcctgagaataaacctgtgttctaaggaatgagcatgccagactgtaatcccaggtattcactgcatcagacaccgagacactgaacttcctgagccaccagacaggaaagggtagcagaaaacagcttcactcctcaggaagtaccatggacagacgcctaccaggggtgacaaagcagtgcagttggattgtaaggaaaaattccggaattaatgcatcctaatgaatgttgtccccttcaatggtgttaccttaggagctgaacattcaattcagttacaccactatgactaaaaacagtttggatctcttagtattgcctttgaaactgcaacataagcaactcaacaatattagttgcattcctttatagacataccatgtcaaagacgtttttctatcaagttgtattctttcctgttctataacctttgtcatctgttagactctgtatgtgtgatttgtaaaaagcaggctgaaactatggacatgatttctgaagagcacatctccactgactttcataaagcaaatgtccaatatttatttattgagagttttttagtgcaatctgggccagtatttttatagattatgattatgtggtaatttatccttcctaactctttaatcctgaatgatggttggaaatggcctagaattaggttactctgttcacaatgctcattgttagcatgcaattggtatttgacttggaagtgttgtgttgtattttttgaacccctaggcttcaggaaaactgctcttttgtaaaaagaatagcgatgacattttctaatgtgcagaaatgttccaaaaggacaaaattgaaaaccaaaaactatgttattaaaacaaaaaaatgct

SEQ ID NO: 306202 - DNA, 3707 bp, Homo sapiens
ctctgcaacagccgcgcttcccgggtcccgcggctcccgcgcgcgatctgccgcggccggctgctgggcaaaaatcagagccgcctccgccccattacccatcatggaaaccctccaggaaaaagtggccccggacgcgcgagcctgaggattctgcacaaaagaggtgcccaaaatgaagaccctgatgcgccatggtctggcagtgtgtttagcgctcaccaccatgtgcaccagcttgttgctagtgtacagcagcctcggcggccagaaggagcggcccccgcagcagcagcagcagcagcagcaacagcagcagcaggcgtcggccaccggcagctcgcagccggcggcggagagcagcacccagcagcgccccggggtccccgcgggaccgcggccactggacggatacctcggagtggcggaccacaagcccctgaaaatgcactgcagggactgtgccctggtgaccagctcagggcatctgctgcacagtcggcaaggctcccagattgaccagacagagtgtgtcatccgcatgaatgacgcccccacacgcggctatgggcgtgacgtgggcaatcgcaccagcctgagggtcatcgcgcattccagcatccagaggatcctccgcaaccgccatgacctgctcaacgtgagccagggcaccgtgttcatcttctggggccccagcagctacatgcggcgggacggcaagggccaggtctacaacaacctgcatctcctgagccaggtgctgccccggctgaaggccttcatgattactcgccacaagatgctgcagtttgatgagctcttcaagcaggagactggcaaagacaggaagatatccaacacttggctcagcactggctggtttacaatgacaattgcactggagctctgtgacaggatcaatgtttatggcatggtgcccccagacttctgcagggatcccaatcacccttcagtaccttatcattattatgaaccttttggacctgatgaatgtacaatgtacctctcccatgagcgaggacgcaagggcagtcatcaccgctttatcacagagaaacgagtctttaagaactgggcacggacattcaatattcacttttttcaaccagactggaaaccagaatcacttgctataaatcatcctgagaataaacctgtgttctaaggaatgagcatgccagactgtaatcccaggtattcactgcatcagacaccgagacactgaacttcctgagccaccagacaggaaagggtagcagaaaacagcttcactcctcaggaagtaccatggacagacgcctaccaggggtgacaaagcagtgcagttggattgtaaggaaaaattccggaattaatgcatcctaatgaatgttgtccccttcaatggtgttaccttaggagctgaacattcaattcagttacaccactatgactaaaaacagtttggatctcttagtattgcctttgaaactgcaacataagcaactcaacaatattagttgcattcctttatagacataccatgtcaaagacgtttttctatcaagttgtattctttcctgttctataacctttgtcatctgttagactctgtatgtgtgatttgtaaaaagcaggctgaaactatggacatgatttctgaagagcacatctccactgactttcataaagcaaatgtccaatatttatttattgagagttttttagtgcaatctgggccagtatttttatagattatgattatgtggtaatttatccttcctaactctttaatcctgaatgatggttggaaatggcctagaattaggttactctgttcacaatgctcattgttagcatgcaattggtatttgacttggaagtgttgtgttgtattttttgaacccctaggcttcaggaaaactgctcttttgtaaaaagaatagcgatgacattttctaatgtgcagaaatgttccaaaaggacaaaattgaaaaccaaaaactatgttattaaaacaaaaaaatgctaacaagagaaatttaaaggtagttttctttagtaataatttatgtaagtgtcctctcttgagccctagtttcctttttggcagaatgatgtcactgtaccagacaacctcttaggtttcatcccaaatctaaacttgtggcctcttcttgacccatttgaagactctgcacttggagtgatggggccccaacagtagcaggaactttattttggggagccttatctacattcatattacttatatcactcttgtgggttaaaactacacttcttcctgtgtccacatggggctaaaatctaccccctggcttctctcggaaggcatcaccatccgccttcttccccagcctcttcaacacaaaaacacaggatacacacacacacacacacaaaagacatagctccaaggggttccctggctacaatagcaaacagctgcccttctgtgaggaaaagagactacaaggacatgccctatcattcaactcatttatgctatgaactgtttagactcactacaaatcttcttagattatattcattaccattccctggtctgaaggagtataaaggacttattttattcagagccaagataaattcatattatagatttttatttaaacaagtaatattgttcaaaaatagtctcttataaatatactagtgttttctttacacatgacttagaaggcattagtttctctaatgccaaatttgaaggcaccagcaaatattatgtatgaagactgacattgttttacagacatgacctggcttatgataaaagaagttttatcgcattaccacttcttttcccttttcttaattagtacactaactagtactattaattacacggagtattgttgttaaaatgcaaacacaatcagggtactcacataacataaacaaagttgatattgatgtgtatggcttgggctgttcaaagccagtaagattgaaatggccgtccaaaacatactggaatatgttctttaagttttctcatagtttttaaagggactatgaattttattccaacacattgtcttccacagcatggactctgaacacatcatactttatcaacatatgaaaaagtgtattaattttatacaatttacttataggccacctttataatcacttgaagacgttatgttgctcaaacataagtggctcctttggcaatttctatatttgtggaaatttggaaaggcatagtttcaacatgcaagaatgtaattatattgcttcatctaataatatctcacatatctgtctatcttcagattttagattttctttattaaaaaaaccatcatggtagctccatctcgtttgtaacttctccctctcaaatactcagaagaatgaagaggccaaattcagaaaatcatggcttcactgggaaatgttttaaatctacatgtagctaggatatgtgatttcatattttttaaaaatgtggtgtaaataagtgtaaaaaattaccacttgcaaagtggttttattacagcgttaaagaaaatgactagaattctgatagattgtgctgatgaacctggttgtgggcaattgaattcttgtcttcccactaccatttcatgactgtcgtctgaacactattcaacaccattaaatataaactctgatataaaagatgactacag

SEQ ID NO: 306203 - DNA, 3339 bp, Homo sapiens
gcagtgcgtgagggaagagcagagtcatagactctcctcagactatcttattgacggacaagttacagcccctgaaaatgcactgcagggactgtgccctggtgaccagctcagggcatctgctgcacagtcggcaaggctcccagattgaccagacagagtgtgtcatccgcatgaatgacgcccccacacgcggctatgggcgtgacgtgggcaatcgcaccagcctgagggtcatcgcgcattccagcatccagaggatcctccgcaaccgccatgacctgctcaacgtgagccagggcaccgtgttcatcttctggggccccagcagctacatgcggcgggacggcaagggccaggtctacaacaacctgcatctcctgagccaggtgctgccccggctgaaggccttcatgattactcgccacaagatgctgcagtttgatgagctcttcaagcaggagactggcaaagacaggaagatatccaacacttggctcagcactggctggtttacaatgacaattgcactggagctctgtgacaggatcaatgtttatggcatggtgcccccagacttctgcagggatcccaatcacccttcagtaccttatcattattatgaaccttttggacctgatgaatgtacaatgtacctctcccatgagcgaggacgcaagggcagtcatcaccgctttatcacagagaaacgagtctttaagaactgggcacggacattcaatattcacttttttcaaccagactggaaaccagaatcacttgctataaatcatcctgagaataaacctgtgttctaaggaatgagcatgccagactgtaatcccaggtattcactgcatcagacaccgagacactgaacttcctgagccaccagacaggaaagggtagcagaaaacagcttcactcctcaggaagtaccatggacagacgcctaccaggggtgacaaagcagtgcagttggattgtaaggaaaaattccggaattaatgcatcctaatgaatgttgtccccttcaatggtgttaccttaggagctgaacattcaattcagttacaccactatgactaaaaacagtttggatctcttagtattgcctttgaaactgcaacataagcaactcaacaatattagttgcattcctttatagacataccatgtcaaagacgtttttctatcaagttgtattctttcctgttctataacctttgtcatctgttagactctgtatgtgtgatttgtaaaaagcaggctgaaactatggacatgatttctgaagagcacatctccactgactttcataaagcaaatgtccaatatttatttattgagagttttttagtgcaatctgggccagtatttttatagattatgattatgtggtaatttatccttcctaactctttaatcctgaatgatggttggaaatggcctagaattaggttactctgttcacaatgctcattgttagcatgcaattggtatttgacttggaagtgttgtgttgtattttttgaacccctaggcttcaggaaaactgctcttttgtaaaaagaatagcgatgacattttctaatgtgcagaaatgttccaaaaggacaaaattgaaaaccaaaaactatgttattaaaacaaaaaaatgctaacaagagaaatttaaaggtagttttctttagtaataatttatgtaagtgtcctctcttgagccctagtttcctttttggcagaatgatgtcactgtaccagacaacctcttaggtttcatcccaaatctaaacttgtggcctcttcttgacccatttgaagactctgcacttggagtgatggggccccaacagtagcaggaactttattttggggagccttatctacattcatattacttatatcactcttgtgggttaaaactacacttcttcctgtgtccacatggggctaaaatctaccccctggcttctctcggaaggcatcaccatccgccttcttccccagcctcttcaacacaaaaacacaggatacacacacacacacacacaaaagacatagctccaaggggttccctggctacaatagcaaacagctgcccttctgtgaggaaaagagactacaaggacatgccctatcattcaactcatttatgctatgaactgtttagactcactacaaatcttcttagattatattcattaccattccctggtctgaaggagtataaaggacttattttattcagagccaagataaattcatattatagatttttatttaaacaagtaatattgttcaaaaatagtctcttataaatatactagtgttttctttacacatgacttagaaggcattagtttctctaatgccaaatttgaaggcaccagcaaatattatgtatgaagactgacattgttttacagacatgacctggcttatgataaaagaagttttatcgcattaccacttcttttcccttttcttaattagtacactaactagtactattaattacacggagtattgttgttaaaatgcaaacacaatcagggtactcacataacataaacaaagttgatattgatgtgtatggcttgggctgttcaaagccagtaagattgaaatggccgtccaaaacatactggaatatgttctttaagttttctcatagtttttaaagggactatgaattttattccaacacattgtcttccacagcatggactctgaacacatcatactttatcaacatatgaaaaagtgtattaattttatacaatttacttataggccacctttataatcacttgaagacgttatgttgctcaaacataagtggctcctttggcaatttctatatttgtggaaatttggaaaggcatagtttcaacatgcaagaatgtaattatattgcttcatctaataatatctcacatatctgtctatcttcagattttagattttctttattaaaaaaaccatcatggtagctccatctcgtttgtaacttctccctctcaaatactcagaagaatgaagaggccaaattcagaaaatcatggcttcactgggaaatgttttaaatctacatgtagctaggatatgtgatttcatattttttaaaaatgtggtgtaaataagtgtaaaaaattaccacttgcaaagtggttttattacagcgttaaagaaaatgactagaattctgatagattgtgctgatgaacctggttgtgggcaattgaattcttgtcttcccactaccatttcatgactgtcgtctgaacactattcaacaccattaaatataaactctgatataaaagatgactacag

SEQ ID NO: 306204 - DNA, 1410 bp, Homo sapiens
gagagggctaaacaaacttacagaatcccaaccatgtataagaagaccaccactgcctcccccaggactccaggtaccaagcgataacactgtctaagcacaggatacacacacacacacacacaaaagacatagctccaaggggttccctggctacaatagcaaacagctgcccttctgtgaggaaaagagactacaaggacatgccctatcattcaactcatttatgctatgaactgtttagactcactacaaatcttcttagattatattcattaccattccctggtctgaaggagtataaaggacttattttattcagagccaagataaattcatattatagatttttatttaaacaagtaatattgttcaaaaatagtctcttataaatatactagtgttttctttacacatgacttagaaggcattagtttctctaatgccaaatttgaaggcaccagcaaatattatgtatgaagactgacattgttttacagacatgacctggcttatgataaaagaagttttatcgcattaccacttcttttcccttttcttaattagtacactaactagtactattaattacacggagtattgttgttaaaatgcaaacacaatcagggtactcacataacataaacaaagttgatattgatgtgtatggcttgggctgttcaaagccagtaagattgaaatggccgtccaaaacatactggaatatgttctttaagttttctcatagtttttaaagggactatgaattttattccaacacattgtcttccacagcatggactctgaacacatcatactttatcaacatatgaaaaagtgtattaattttatacaatttacttataggccacctttataatcacttgaagacgttatgttgctcaaacataagtggctcctttggcaatttctatatttgtggaaatttggaaaggcatagtttcaacatgcaagaatgtaattatattgcttcatctaataatatctcacatatctgtctatcttcagattttagattttctttattaaaaaaaccatcatggtagctccatctcgtttgtaacttctccctctcaaatactcagaagaatgaagaggccaaattcagaaaatcatggcttcactgggaaatgttttaaatctacatgtagctaggatatgtgatttcatattttttaaaaatgtggtgtaaataagtgtaaaaaattaccacttgcaaagtggttttattacagcgttaaagaaaatgactagaattctgatagattgtgctgatgaacctggttgtgggcaattgaattcttgtcttcccactaccatttcatgactgtcgtctgaacactattcaacaccattaaatataaactctgatataaaagatgactacag

SEQ ID NO: 306205 - DNA, 1365 bp, Homo sapiens
ctctgcaacagccgcgcttcccgggtcccgcggctcccgcgcgcgatctgccgcggccggctgctgggcaaaaatcagagccgcctccgccccattacccatcatggaaaccctccaggaaaaagtggccccggacgcgcgagcctgaggattctgcacaaaagaggtgcccaaaatgaagaccctgatgcgccatggtctggcagtgtgtttagcgctcaccaccatgtgcaccagcttgttgctagtgtacagcagcctcggcggccagaaggagcggcccccgcagcagcagcagcagcagcagcaacagcagcagcaggcgtcggccaccggcagctcgcagccggcggcggagagcagcacccagcagcgccccggggtccccgcgggaccgcggccactggacggatacctcggagtggcggaccacaagcccctgaaaatgcactgcagggactgtgccctggtgaccagctcagggcatctgctgcacagtcggcaaggctcccagattgaccagacagagtgtgtcatccgcatgaatgacgcccccacacgcggctatgggcgtgacgtgggcaatcgcaccagcctgagggtcatcgcgcattccagcatccagaggatcctccgcaaccgccatgacctgctcaacgtgagccagggcaccgtgttcatcttctggggccccagcagctacatgcggcgggacggcaagggccaggtctacaacaacctgcatctcctgagccaggtgctgccccggctgaaggccttcatgattactcgccacaagatgctgcagtttgatgagctcttcaagcaggagactggcaaagacaggtacaaaggcacagggaagaagatgcaggggagggtgaggataagtcatcactggctgactcacccaaagcaaagcttttgctacaggcttttgttgtgggctccactgctcatgtcattgctagagttcacttgtagggtcctctgcgtgactgggctgctcaagctgactttacaagacaaagtgaaaagaagcatggagataattatatggatatttcagggccttatttttgaggaagaggctacacagctcctggccttcattggttaaaagtgcagtataacagctttattgcatttcattttacttgcataaaccctcaccaaaaaaaaagtatatgggtttattttttcccattcaaaggcaaacatttatttagtcaaccaatatttcttgagtgcccactacttgctcatcactgtgcttggccctggggaaacagtcaaacacaagtatataaagccttggacacttaccaagtagtagccagtgcactgagggtcttgagagggaag

SEQ ID NO: 306206 - DNA, 1406 bp, Homo sapiens
taggtatgaatatgcatgttgtatatgtttgggggcattatacacagatttttaagtgattcctggtatccagaaaggattaagattaggaaagtctctgagcttttgtagtgtcaataaacatttatctccactggtttgtttttctgtttccctaaccgttcggcttaaaactggccctccaaaaatgaatctgttagcaagtttatactgatccatcctcgttttcagatataccatcctcaggttctacagagccagaattgtctcaaagcgtacttgatgcttttgaccttgcgcttcccaagataaaaattctgacggagggatttgtggacttgattttcacaaggcctgcgaggtgtttacaagcctcgagggctttgagtagaaaaggtagggtcatgcgctagctagggagatatcggagagaggaagtgctgcacaggacccagatgatagcggtttcaaatactggcttagtctgcggcgggcgcaggtcccctcacccggcaccctgtggttcagcacaggagggttctttctctccgcgggcactgattccgggtcgcggcggacgtcgcttccggagcagcatggcggccactgaggatgagaggctagcagggagcggtgagggagagcggctggatttcttacgggatcggcacgtgcgatttttccagcgctgcctccaggttttgccggagcgctattcttcactcgagacaagcaggtaactcgtggcacagtcagccaggctggcacaaggcccgggctccagcggaaaggcgcggcggagtcggaccgcaaactgggcgccggaagggggctgcgcggccgcccagttggcactgactggtttcaagtgggcttgaggttacccccactctcccgccgtacggtgggaaggtctggaaggctgtaggtcgagggctgtggcatctccagtttccggctttttcacttcccttttcttctggcaactctgagctgcttttttacccgctcccatagcctgtcactttgcctcattacttccgagtgtaaaaggaaaaggacaaagtttgtcgtcgtatttttagatgaatacttctgtgcatccttgtcctctctaaagtcattaactcttaatagagtgtctgtatggtgttttatgtgtaggagcggcagagaacctctaaggtcttagaaactttgtgggaactataaatctaatggtaggcgaaagaggtgtggtgttgcgtgaagcagcctgttaaaagtatcgcaatagctgaagagtgtggtgcggcagagactaagcgacttcatttacagtaaaagctggggatgagaagaaagaaaggagaaggcaatctttgctccgcattgctgtgttttgaagtgaagctcaaaagctgctt

SEQ ID NO: 306207 - DNA, 3027 bp, Homo sapiens
gaataaaatgaacaattcagttcctcagtcacatgagctgtgtgtcaaatgcacaacagccgtatgtggctcgtggcccctgtaccggacactcccatccctgcagagttactggacagtgctgatctagggattctgttacaaaatccatgaaagtgttcagcacaatgccgggcccatataaacgtcagtagttgttgttattataattagtcttgacccaacggcaaattcactttgagaccttagataaatcactctacctctctgagcctggtttccttgccctaaaaggatggcaaggggctgggcatggcggccactgaggatgagaggctagcagggagcggtgagggagagcggctggatttcttacgggatcggcacgtgcgatttttccagcgctgcctccaggttttgccggagcgctattcttcactcgagacaagcaggttgacaattgcattttttgcactctccgggctggatatgttggattccttagatgtggtgaacaaagatgatataatagagtggatttattccctgcaggtccttcccacagaagacagatcaaatctaaatcgctgtggtttccgaggctcttcatacctgggtattccgttcaatccatcaaaggctcctggaacagctcatccttatgatagtggccacattgcaatgacctacactggcctctcatgcttagttattcttggagacgacttaagccgagtaaataaagaagcttgcttagcgggcttgagagcccttcagctggaagatgggagtttttgtgcagtacctgaaggcagtgaaaatgacatgcgatttgtgtactgtgcttcctgtatttgctatatgctcaacaactggtcaggcatggatatgaaaaaagccatcacctatattagaaggagtatgtcctatgacaatggactggcacagggagctggacttgaatctcatggaggatcaactttttgtggcattgcctcactatgtctgatgggtaaactagaagaagttttttcagaaaaagaattgaacaggataaagaggtggtgtataatgaggcaacaaaatggttatcatggaagacctaataagcctgtagacacctgttattctttttgggtgggagcaactctgaagcttctaaaaattttccaatacactaactttgagaaaaatagaaattacatcttatcaactcaagatcgccttgtagggggatttgccaagtggccagacagtcatccagatgctttgcatgcatactttgggatctgtggcctgtcactaatggaggaaagtggaatttgtaaagttcatcctgctctgaatgtaagcacacggacttctgaacgccttctagatctccatcaaagctggaaaaccaaggactctaaacaatgctcagagaatgtacatatctccacatgactgattttagattgggagggtggggggatttgtagcataactgtagctcaagtttaaaagccatgtataaccaagtgtgctctttttttaaaaggtagagtcttacaatcaaatctcctgctgatttcactttgggatatggtcttgagccagtaatctttatactgggtttcaagaaaatctttgttgaagtttgaaccacaactttgtcgtggttcttaaatgtttatactgtatttctaagaagttgtttgaggcaaattaactgtatgtgtgtaggttatctttttaaaaactcttcagtgcaaattgtatcttattataaaatggacacaaattttcaagtttacacttcatatagcattgataatcttcaggtgaacacttagtgatcatttaaaaagctcactgctgatcgtagaaaatttgctttaattaattaagtatctgggattattctttgaaaacagatgaccataattttttttaaagaagagtgacttattttgtcttattcttaagtaaagtgtgccaattaaacctgtgtggcctatataaatgaagttaataacttcatagtaagaataaataggtttaactaatgtgatagttttctaaaaggagattgtttgaagacaactattatgtaactgagggaaaagcaacttaactgtatgtgattgtgaatgagaaagtttgtgctatgtgggtcatttatctagacattgctgtggtgaataccagttatgtttgattttattctcaaatcattagttgcctttttttttttttattttgtgctttctaggaagaaaacaatcttttttatctagaagggaaagatactttgtgttttcatttttagccatttgaagtttttaatttattgcccccagtgtgttagctgctctaatttcaaacctaatacttttctaatttttttcaaattaaataagtaaaaaatacaaaaacagaaccattcaaacagattcagtggtgtaactcaatacatggtcatttttattctcatattttcaggtaagtgaaagggaaatgcgaccatttagagggtaagaaatagggttttgtttttgttcattgttttgttttaagtctatgaactagctaattataaaggaggtagtataaaaactcttcattagtaattaatttatcaataactcatatccattacttgctcagtgacattcagaactattgcgtctagtactgaaatggggaaagaaatctcttcactaaaggagttggctttaagttagtcttggtgataataaatgttgaaatacaagtatcagtataaaaactggattactggtatcactgtttaggcattgtaatactttaaatgttatctttttttctaaatcagagggaaaaaaatgttgtgaaataacagtccttcccaagggaaacactgtgtacttggagaaatgattgatttattattggcatgcttagttttaaacctgagtttgccaactgtatgttttttaattagaaataaaataaatcttctgatggtgggggaaaaagtaagcttaataacagatgttatccgtc

SEQ ID NO: 306208 - DNA, 2985 bp, Homo sapiens
gaataaaatgaacaattcagttcctcagtcacatgagctgtgtgtcaaatgcacaacagccgtatgtggctcgtggcccctgtaccggacactcccatccctgcagagttactggacagtgctgatctagggattctgttacaaaatccatgaaagtgttcagcacaatgccgggcccatataaacgtcagtagttgttgttattataattagtcttgacccaacggcaaattcactttgagaccttagataaatcactctacctctctgagcctggtttccttgccctaaaaggatggcaaggggctgggcatggcggccactgaggatgagaggctagcagggagcggtgagggagagcggctggatttcttacgggatcggcacgtgcgatttttccagcgctgcctccaggttttgccggagcgctattcttcactcgagacaagcaggttgacaattgcattttttgcactctccgggctggatatgttggattccttagatgtggtgaacaaagatgatataatagagtggatttattccctgcaggtccttcccacagaagacagatcaaatctaaatcgctgtggtttccgaggctcttcatacctgggtattccgttcaatccatcaaaggctcctggaacagctcatccttatgatagtggccacattgcaatgacctacactggcctctcatgcttagttattcttggagacgacttaagccgagtaaataaagaagcttgcttagcgggcttgagagcccttcagctggaagatgggagtttttgtgcagtacctgaaggcagtgaaaatgacatgcgatttgtgtactgtgcttcctgtatttgctatatgctcaacaactggtcaggcatggatatgaaaaaagccatcacctatattagaaggagtatgtcctatgacaatggactggcacagggagctggacttgaatctcatggaggatcaactttttgtggcattgcctcactatgtctgatgggtaaactagaagaagttttttcagaaaaagaattgaacaggataaagaggtggtgtataatgaggcaacaaaatggttatcatggaagacctaataagcctgtagacacctgttattctttttgggtgggagcaactctgaagcttctaaaaattttccaatacactaactttgagaaaaatagaaattacatcttatcaactcaagatcgccttgtagggggatttgccaagtggccagacagtcatccagatgctttgcatgcatactttgggatctgtggcctgtcactaatggaggaaagtggaatttgtaaagttcatcctgctctgaatgtaagcacacggacttctgaacgccttctagatctccatcaaagctggaaaaccaaggactctaaacaatgctcagagaatgtacatatctccacatgactgattttagattgggagggtggggggatttgtagcataactgtagctcaagtttaaaagccatgtataaccaagtgtgctctttttttaaaaggtagagtcttacaatcaaatctcctgctgatttcactttgggatatggtcttgagccagtaatctttatactgggtttcaagaaaatctttgttgaagtttgaaccacaactttgtcgtggttcttaaatgtttatactgtatttctaagaagttgtttgaggcaaattaactgtatgtgtgtaggttatctttttaaaaactcttcagtgcaaattgtatcttattataaaatggacacaaattttcaagtttacacttcatatagcattgataatcttcaggtgaacacttagtgatcatttaaaaagctcactgctgatcgtagaaaatttgctttaattaattaagtatctgggattattctttgaaaacagatgaccataattttttttaaagaagagtgacttattttgtcttattcttaagtaaagtgtgccaattaaacctgtgtggcctatataaatgaagttaataacttcatagtaagaataaataggtttaactaatgtgatagttttctaaaaggagattgtttgaagacaactattatgtaactgagggaaaagcaacttaactgtatgtgattgtgaatgagaaagtttgtgctatgtgggtcatttatctagacattgctgtggtgaataccagttatgtttgattttattctcaaatcattagttgcctttttttttttttattttgtgctttctaggaagaaaacaatcttttttatctagaagggaaagatactttgtgttttcatttttagccatttgaagtttttaatttattgcccccagtgtgttagctgctctaatttcaaacctaatacttttctaatttttttcaaattaaataagtaaaaaatacaaaaacagaaccattcaaacagattcagtggtgtaactcaatacatggtcatttttattctcatattttcaggtaagtgaaagggaaatgcgaccatttagagggtaagaaatagggttttgtttttgttcattgttttgttttaagtctatgaactagctaattataaaggaggtagtataaaaactcttcattagtaattaatttatcaataactcatatccattacttgctcagtgacattcagaactattgcgtctagtactgaaatggggaaagaaatctcttcactaaaggagttggctttaagttagtcttggtgataataaatgttgaaatacaagtatcagtataaaaactggattactggtatcactgtttaggcattgtaatactttaaatgttatctttttttctaaatcagagggaaaaaaatgttgtgaaataacagtccttcccaagggaaacactgtgtacttggagaaatgattgatttattattggcatgcttagttttaaacctgagtttgccaactgtatgttttttaattagaaataaaataaatcttctga

SEQ ID NO: 306209 - DNA, 3311 bp, Homo sapiens
taggtatgaatatgcatgttgtatatgtttgggggcattatacacagatttttaagtgattcctggtatccagaaaggattaagattaggaaagtctctgagcttttgtagtgtcaataaacatttatctccactggtttgtttttctgtttccctaaccgttcggcttaaaactggccctccaaaaatgaatctgttagcaagtttatactgatccatcctcgttttcagatataccatcctcaggttctacagagccagaattgtctcaaagcgtacttgatgcttttgaccttgcgcttcccaagataaaaattctgacggagggatttgtggacttgattttcacaaggcctgcgaggtgtttacaagcctcgagggctttgagtagaaaaggtagggtcatgcgctagctagggagatatcggagagaggaagtgctgcacaggacccagatgatagcggtttcaaatactggcttagtctgcggcgggcgcaggtcccctcacccggcaccctgtggttcagcacaggagggttctttctctccgcgggcactgattccgggtcgcggcggacgtcgcttccggagcagcatggcggccactgaggatgagaggctagcagggagcggtgagggagagcggctggatttcttacgggatcggcacgtgcgatttttccagcgctgcctccaggttttgccggagcgctattcttcactcgagacaagcaggttgacaattgcattttttgcactctccgggctggatatgttggattccttagatgtggtgaacaaagatgatataatagagtggatttattccctgcaggtccttcccacagaagacagatcaaatctaaatcgctgtggtttccgaggctcttcatacctgggtattccgttcaatccatcaaaggctcctggaacagctcatccttatgatagtggccacattgcaatgacctacactggcctctcatgcttagttattcttggagacgacttaagccgagtaaataaagaagcttgcttagcgggcttgagagcccttcagctggaagatgggagtttttgtgcagtacctgaaggcagtgaaaatgacatgcgatttgtgtactgtgcttcctgtatttgctatatgctcaacaactggtcaggcatggatatgaaaaaagccatcacctatattagaaggagtatgtcctatgacaatggactggcacagggagctggacttgaatctcatggaggatcaactttttgtggcattgcctcactatgtctgatgggtaaactagaagaagttttttcagaaaaagaattgaacaggataaagaggtggtgtataatgaggcaacaaaatggttatcatggaagacctaataagcctgtagacacctgttattctttttgggtgggagcaactctgaagcttctaaaaattttccaatacactaactttgagaaaaatagaaattacatcttatcaactcaagatcgccttgtagggggatttgccaagtggccagacagtcatccagatgctttgcatgcatactttgggatctgtggcctgtcactaatggaggaaagtggaatttgtaaagttcatcctgctctgaatgtaagcacacggacttctgaacgccttctagatctccatcaaagctggaaaaccaaggactctaaacaatgctcagagaatgtacatatctccacatgactgattttagattgggagggtggggggatttgtagcataactgtagctcaagtttaaaagccatgtataaccaagtgtgctctttttttaaaaggtagagtcttacaatcaaatctcctgctgatttcactttgggatatggtcttgagccagtaatctttatactgggtttcaagaaaatctttgttgaagtttgaaccacaactttgtcgtggttcttaaatgtttatactgtatttctaagaagttgtttgaggcaaattaactgtatgtgtgtaggttatctttttaaaaactcttcagtgcaaattgtatcttattataaaatggacacaaattttcaagtttacacttcatatagcattgataatcttcaggtgaacacttagtgatcatttaaaaagctcactgctgatcgtagaaaatttgctttaattaattaagtatctgggattattctttgaaaacagatgaccataattttttttaaagaagagtgacttattttgtcttattcttaagtaaagtgtgccaattaaacctgtgtggcctatataaatgaagttaataacttcatagtaagaataaataggtttaactaatgtgatagttttctaaaaggagattgtttgaagacaactattatgtaactgagggaaaagcaacttaactgtatgtgattgtgaatgagaaagtttgtgctatgtgggtcatttatctagacattgctgtggtgaataccagttatgtttgattttattctcaaatcattagttgcctttttttttttttattttgtgctttctaggaagaaaacaatcttttttatctagaagggaaagatactttgtgttttcatttttagccatttgaagtttttaatttattgcccccagtgtgttagctgctctaatttcaaacctaatacttttctaatttttttcaaattaaataagtaaaaaatacaaaaacagaaccattcaaacagattcagtggtgtaactcaatacatggtcatttttattctcatattttcaggtaagtgaaagggaaatgcgaccatttagagggtaagaaatagggttttgtttttgttcattgttttgttttaagtctatgaactagctaattataaaggaggtagtataaaaactcttcattagtaattaatttatcaataactcatatccattacttgctcagtgacattcagaactattgcgtctagtactgaaatggggaaagaaatctcttcactaaaggagttggctttaagttagtcttggtgataataaatgttgaaatacaagtatcagtataaaaactggattactggtatcactgtttaggcattgtaatactttaaatgttatctttttttctaaatcagagggaaaaaaatgttgtgaaataacagtccttcccaagggaaacactgtgtacttggagaaatgattgatttattattggcatgcttagttttaaacctgagtttgccaactgtatgttttttaattagaaataaaataaatcttctgatggtgggggaaaaagtaagcttaataacagatgttatccgtc

SEQ ID NO: 306210 - DNA, 3199 bp, Homo sapiens
taggtatgaatatgcatgttgtatatgtttgggggcattatacacagatttttaagtgattcctggtatccagaaaggattaagattaggaaagtctctgagcttttgtagtgtcaataaacatttatctccactggtttgtttttctgtttccctaaccgttcggcttaaaactggccctccaaaaatgaatctgttagcaagtttatactgatccatcctcgttttcagatataccatcctcaggttctacagagccagaattgtctcaaagcgtacttgatgcttttgaccttgcgcttcccaagataaaaattctgacggagggatttgtggacttgattttcacaaggcctgcgaggtgtttacaagcctcgagggctttgagtagaaaaggtagggtcatgcgctagctagggagatatcggagagaggaagtgctgcacaggacccagatgatagcggtttcaaatactggcttagtctgcggcgggcgcaggtcccctcacccggcaccctgtggttcagcacaggagggttctttctctccgcgggcactgattccgggtcgcggcggacgtcgcttccggagcagcatggcggccactgaggatgagaggctagcagggagcggtgagggagagcggctggatttcttacgggatcggcacgtgcgatttttccagcgctgcctccaggttttgccggagcgctattcttcactcgagacaagcaggttgacaattgcattttttgcactctccgggctggatatgttggattccttagatgtggtgaacaaagatgatataatagagtggatttattccctgcaggtccttcccacagaagacagatcaaatctaaatcgctgtggtttccgaggctcttcatacctgggtattccgttcaatccatcaaaggctcctggaacagctcatccttatgatagtggccacattgcaatgacctacactggcctctcatgcttagttattcttggagacgacttaagccgagtaaataaagaagcttgcttagcgggcttgagagcccttcagctggaagatgggagtttttgtgcagtacctgaaggcagtgaaaatgacatgcgatttgtgtactgtgcttcctgtatttgctatatgctcaacaactggtcaggcatggatatgaaaaaagccatcacctatattagaaggagtatgtcctatgacaatggactggcacagggagctggacttgaatctcatggaggatcaactttttgtggcattgcctcactatgtctgatgggtaaactagaagaagttttttcagaaaaagaattgaacaggataaagaggtggtgtataatgaggcaacaaaatggttatcatggaagacctaataagcctgtagacacctgttattctttttgggtgggagcaactctgaagcttctaaaaattttccaatacactaactttgagaaaaatagaaattacatcttatcaactcaagatcgccttgtagggggatttgccaagtggccagacagtcatccagatgctttgcatgcatactttgggatctgtggcctgtcactaatggaggaaagtggaatttgtaaagttcatcctgctctgaatgtaagcacacggacttctgaacgccttctagatctccatcaaagctggaaaaccaaggactctaaacaatgctcagagaatgtagagtcttacaatcaaatctcctgctgatttcactttgggatatggtcttgagccagtaatctttatactgggtttcaagaaaatctttgttgaagtttgaaccacaactttgtcgtggttcttaaatgtttatactgtatttctaagaagttgtttgaggcaaattaactgtatgtgtgtaggttatctttttaaaaactcttcagtgcaaattgtatcttattataaaatggacacaaattttcaagtttacacttcatatagcattgataatcttcaggtgaacacttagtgatcatttaaaaagctcactgctgatcgtagaaaatttgctttaattaattaagtatctgggattattctttgaaaacagatgaccataattttttttaaagaagagtgacttattttgtcttattcttaagtaaagtgtgccaattaaacctgtgtggcctatataaatgaagttaataacttcatagtaagaataaataggtttaactaatgtgatagttttctaaaaggagattgtttgaagacaactattatgtaactgagggaaaagcaacttaactgtatgtgattgtgaatgagaaagtttgtgctatgtgggtcatttatctagacattgctgtggtgaataccagttatgtttgattttattctcaaatcattagttgcctttttttttttttattttgtgctttctaggaagaaaacaatcttttttatctagaagggaaagatactttgtgttttcatttttagccatttgaagtttttaatttattgcccccagtgtgttagctgctctaatttcaaacctaatacttttctaatttttttcaaattaaataagtaaaaaatacaaaaacagaaccattcaaacagattcagtggtgtaactcaatacatggtcatttttattctcatattttcaggtaagtgaaagggaaatgcgaccatttagagggtaagaaatagggttttgtttttgttcattgttttgttttaagtctatgaactagctaattataaaggaggtagtataaaaactcttcattagtaattaatttatcaataactcatatccattacttgctcagtgacattcagaactattgcgtctagtactgaaatggggaaagaaatctcttcactaaaggagttggctttaagttagtcttggtgataataaatgttgaaatacaagtatcagtataaaaactggattactggtatcactgtttaggcattgtaatactttaaatgttatctttttttctaaatcagagggaaaaaaatgttgtgaaataacagtccttcccaagggaaacactgtgtacttggagaaatgattgatttattattggcatgcttagttttaaacctgagtttgccaactgtatgttttttaattagaaataaaataaatcttctgatggtgggggaaaaagtaagcttaataacagatgttatccgtc

SEQ ID NO: 306211 - DNA, 243 bp, Homo sapiens
agtataagccatatttaattttactatttactaaaaccttatgtcagatttcttaatgaaataagttttcatttcacttcattaattagtactatattaattttgtatttaggctcctggaacagctcatccttatgatagtggccacattgcaatgacctacactggcctctcatgcttagttattcttggagacgacttaagccgagtaaataaagaagcttgcttagcgggcttgagagc

SEQ ID NO: 306212 - DNA, 2404 bp, Homo sapiens
gggcgggcctcagacacactatgcgggttgcggggcctgggggccggacggctgtttcctgtcctggtgcatggtggtcggacgaaggaattgttggaaaattttctcggaggtagaagatgttgttagcccaaataaatcgagattctcagggaatgacagagtttcctggaggagggatggaggcgcaacatgttacgctgtgcttgacagaggcagtcaccgtggcagatggtgacaacttagaaaatatggaaggcgtaagcttgcaagcagtaacacttgcagatggttctactgcttacatacaacacaattctaaagatgcaaaactcatagatggccaggtcattcagttggaagatggttctgcggcctatgttcaacatgtacccatacctaaaagtacaggggacagtttgcgtctagaggatggtcaagcagtacagttagaagatggtaccacagcatttattcaccacacctccaaagatagttatgaccagagtgcattacaggcggttcagctggaagatggtaccacagcttatatccaccatgcagtgcaagtcccgcagtctgacaccatcttggcaattcaggctgatgggacagtggcaggtctgcacactggggatgctacaattgaccctgacaccatcagtgctttggaacagtatgcagcaaaggtgtccattgatggaagtgaaagtgtagcaggtactggaatgattggagaaaatgagcaagagaaaaaaatgcagattgttttacaaggacatgctacaagagtaactgctaaatctcaacagagtggagagaaggcatttcgatgtgaatatgatggatgtggaaaattatatacaacagctcatcatctcaaggtccatgagaggtcacacacaggagatcggccttatcagtgtgagcatgcaggctgtgggaaggcatttgcaacaggttatggattaaaaagtcacgtcagaactcatacaggagaaaagccatatcggtgttcggaagataattgtactaaatctttcaaaacttcaggagatctacagaaacacatcagaactcatacaggagaaaggccctttaagtgtcccttcgaaggctgcggtcggtcctttacaacatcaaatatcagaaaagtgcacgttaggacacacacaggagaaagaccttattactgcacagagccaggatgtgggagggcatttgccagtgcaacaaattataaaaaccatgtgaggatacacacaggagaaaagccatatgtttgtacagttcctgggtgtgacaaaaggtttacagaatattccagtttgtacaaacatcatgttgtccacactcattccaaaccttacaactgtaaccactgtgggaagacatacaagcagatctccacgctggccatgcacaaacggacagcccacaacgacactgagcccatcgaggaggagcaggaagccttctttgagccgcccccaggtcaaggtgaagatgttcttaaagggtcccagattacgtatgttacaggtgtagaaggggacgacgttgtttctacacaagtagccacagtaacccaatctggactgagtcaacaagttacactcatatcccaggatgggactcagcatgtcaacatatctcaagctgacatgcaggccattggcaacaccatcacaatggtaacgcaggatggcacgcccatcacagtccccgcccatgatgcagtcatctcctcagcaggaacgcactctgttgctatggttactgctgagggtacagaagggcaacaggttgcaattgtagctcaagacttggcagcattccatactgcctcatcagaaatggggcaccagcagcatagccatcacttagtaaccacagaaaccagacctctgaccttagtagcaacatccaatggcacccagattgcagttcagcttggagaacagccatctctggaagaagccatcagaatagcgtctagaatccaacaaggagaaacgccagggttggatgattaatcctcagaacaatggagcaataaagcagaaggagtctttcatcttctggcagcagaaatccatgaagcccgggcccaggaaaattagaagttttccattcctgatacactgtacacatttttatgcgagagtggagaacattttattcttgacacttttgtgtatataacccttggaatagattctcagagtgattcattgtgtacaaggaagtatgaaattagggcaatacagtaaattttcatgttactcttttatcagatcacaaactcctagagtctacatgcaagactagtaaagtcttatggagtcttatgatggatttttaacttcccgtggaaaaaaaaataaaggctgtatctaaaata

SEQ ID NO: 306213 - DNA, 618 bp, Homo sapiens
ttgttttgttttgcttaaggttgcaattgtagctcaagacttggcagcattccatactgcctcatcagaaatggggcaccagcagcatagccatcacttagtaaccacagaaaccagacctctgaccttagtagcaacatccaatggcacccagattgcagttcagcttggagaacagccatctctggaagaagccatcagaatagcgtctagaatccaacaaggagaaacgccagggttggatgattaatcctcagaacaatggagcaataaagcagaaggagtctttcatcttctggcagcagaaatccatgaagcccgggcccaggaaaattagaagttttccattcctgatacactgtacacatttttatgcgagagtggagaacattttattcttgacacttttgtgtatataacccttggaatagattctcagagtgattcattgtgtacaaggaagtatgaaattagggcaatacagtaaattttcatgttactcttttatcagatcacaaactcctagagtctacatgcaagactagtaaagtcttatggagtcttatgatggatttttaacttcccgtggaaaaaaaaataaaggctgtatctaaaata

SEQ ID NO: 306214 - DNA, 4026 bp, Homo sapiens
gggcgggcctcagacacactatgcgggttgcggggcctgggggccggacggctgtttcctgtcctggtgcatggtggtcggacgaaggaattgttggaaaattttctcggaggtagaagatgttgttagcccaaataaatcgagattctcagggaatgacagagtttcctggaggagggatggaggcgcaacatgttacgctgtgcttgacagaggcagtcaccgtggcagatggtgacaacttagaaaatatggaaggcgtaagcttgcaagcagtaacacttgcagatggttctactgcttacatacaacacaattctaaagatgcaaaactcatagatggccaggtcattcagttggaagatggttctgcggcctatgttcaacatgtacccatacctaaaagtacaggggacagtttgcgtctagaggatggtcaagcagtacagttagaagatggtaccacagcatttattcaccacacctccaaagatagttatgaccagagtgcattacaggcggttcagctggaagatggtaccacagcttatatccaccatgcagtgcaagtcccgcagtctgacaccatcttggcaattcaggctgatgggacagtggcaggtctgcacactggggatgctacaattgaccctgacaccatcagtgctttggaacagtatgcagcaaaggtgtccattgatggaagtgaaagtgtagcaggtactggaatgattggagaaaatgagcaagagaaaaaaatgcagattgttttacaaggacatgctacaagagtaactgctaaatctcaacagagtggagagaaggcatttcgatgtgaatatgatggatgtggaaaattatatacaacagctcatcatctcaaggtccatgagaggtcacacacaggagatcggccttatcagtgtgagcatgcaggctgtgggaaggcatttgcaacaggttatggattaaaaagtcacgtcagaactcatacaggagaaaagccatatcggtgttcggaagataattgtactaaatctttcaaaacttcaggagatctacagaaacacatcagaactcatacaggagaaaggccctttaagtgtcccttcgaaggctgcggtcggtcctttacaacatcaaatatcagaaaagtgcacgttaggacacacacaggagaaagaccttattactgcacagagccaggatgtgggagggcatttgccagtgcaacaaattataaaaaccatgtgaggatacacacaggagaaaagccatatgtttgtacagttcctgggtgtgacaaaaggtttacagaatattccagtttgtacaaacatcatgttgtccacactcattccaaaccttacaactgtaaccactgtgggaagacatacaagcagatctccacgctggccatgcacaaacggacagcccacaacgacactgagcccatcgaggaggagcaggaagccttctttgagccgcccccaggtcaaggtgaagatgttcttaaagggtcccagattacgtatgttacaggtgtagaaggggacgacgttgtttctacacaagtagccacagtaacccaatctggactgagtcaacaagttacactcatatcccaggatgggactcagcatgtcaacatatctcaagctgacatgcaggccattggcaacaccatcacaatggtaacgcaggatggcacgcccatcacagtccccgcccatgatgcagtcatctcctcagcaggaacgcactctgttgctatggttactgctgagggtacagaagggcaacaggttgcaattgtagctcaagacttggcagcattccatactgcctcatcagaaatggggcaccagcagcatagccatcacttagtaaccacagaaaccagacctctgaccttagtagcaacatccaatggcacccagattgcagttcagcttggagaacagccatctctggaagaagccatcagaatagcgtctagaatccaacaaggagaaacgccagggttggatgattaatcctcagaacaatggagcaataaagcagaaggagtctttcatcttctggcagcagaaatccatgaagcccgggcccaggaaaattagaagttttccattcctgatacactgtacacatttttatgcgagagtggagaacattttattcttgacacttttgtgtatataacccttggaatagattctcagagtgattcattgtgtacaaggaagtatgaaattagggcaatacagtaaattttcatgttactcttttatcagatcacaaactcctagagtctacatgcaagactagtaaagtcttatggagtcttatgatggatttttaacttcccgtggaaaaaaaaataaaggctgtatctaaaataaaaaaaaaaaaaaaaattttttaagtaagagcaatgtttactgagcgatacaggactgagtactatgaagggtttacaaggatggaaatgcaccccgcccccgccctggccacccccgacacccagaagactacagtacttaggagttacacacaacggccgtaactggtggctatctgttcataacaaacaaaccatagcatatttatactgtatcacatcgagtgattatagaaatccatatatatattgcttgtataaaatctttttttttgtaaaaaatattaaaaaaaaaaaaaaaaaaaaaggaaagtataaaaaacatgtgcagttgaaagccctgccaggacagccagtctgtaaacattcggtgagtatgtgctttggaaggcgcccgcgcctcagtgcccacagcaaactccagcagggctggcgagggtgcgcccggctgccgcctcctgggcagggccgcgctggaccgaggtgggtgggggcatcagggccccgcagcacgcccctctccagttcgcatcagggcgaggggcagggctgggggcaggtgggttgcagtttcattctgagttccatcctcagccgcgttttggttgcaactcatggcttttcctggctgttcggaggttccttggatgggtgccctggtgaagaggccagagaagagcccagggctgcctcgttgggcgtctccctggcctcggtgcctctgtcctgcctccttcaagtggggccccaggcaggacaaccctacccgagggtcaactttggtctcagcgcttggtccctctgggtttcctcagcccgctcttcctcctgggtggctgatctgagttcacaaaaaagctcggctgatgctggctgtgctgaacctcattgtacagtttttcatgcaccaaaggaagggccatctggggcccccctcctcctctctcttcgtcacttttccttctcctcttcctcctcctccacctcctcccagcccatggtcacttcttctcgagctgctcgagcagtgggttgccttctgactcgggggtcttgacactgtcggtccggacgatgcaggtggggcggtgtcggttcagcatcaggatggaggctgctgccgctcctgcttcagctcctcaatctgggtcttcagctctgcgttcatgagttccagccgctcggattcccgctgcagaaactccgtgcgctccttcttcttgttccggcatcgggctgctgcgactttgttcttctcccggcgccttttccttcgctcctcttcctcatctagctcacttttcacgggctggggcctcttgcccagtttcacctccaggaagtgcaagggtgcaatcatggccccgaggttgcggatgtcagcgtatttcagctcctccacagtcagggccgagctggggagcccggtcagggggccaagccctggcagggagcctgtggtcaccgaagggtccgggatctgcccaggcatcatagcaggaggagtggcaggccagccttaacctcccccgccgccttgggcgccctcctcaccgcgagagcgctcgcgctcctctccccgcggggcgtcccgcgctttagagcacactggggtaccggat

SEQ ID NO: 306215 - DNA, 4109 bp, Homo sapiens
tttgaattgttgaattataagaagcatgccttggactttgggctaatactcttaccctacatattgagtgaaatttcatcttatttccaacaccattacatcctcagcagctttttgtggttcataaatattctttgtaactttcatttcacatgtatcattctttgttcccaagtgtctttatttttcttcaaggtagaagatgttgttagcccaaataaatcgagattctcagggaatgacagagtttcctggaggagggatggaggcgcaacatgttacgctgtgcttgacagaggcagtcaccgtggcagatggtgacaacttagaaaatatggaaggcgtaagcttgcaagcagtaacacttgcagatggttctactgcttacatacaacacaattctaaagatgcaaaactcatagatggccaggtcattcagttggaagatggttctgcggcctatgttcaacatgtacccatacctaaaagtacaggggacagtttgcgtctagaggatggtcaagcagtacagttagaagatggtaccacagcatttattcaccacacctccaaagatagttatgaccagagtgcattacaggcggttcagctggaagatggtaccacagcttatatccaccatgcagtgcaagtcccgcagtctgacaccatcttggcaattcaggctgatgggacagtggcaggtctgcacactggggatgctacaattgaccctgacaccatcagtgctttggaacagtatgcagcaaaggtgtccattgatggaagtgaaagtgtagcaggtactggaatgattggagaaaatgagcaagagaaaaaaatgcagattgttttacaaggacatgctacaagagtaactgctaaatctcaacagagtggagagaaggcatttcgatgtgaatatgatggatgtggaaaattatatacaacagctcatcatctcaaggtccatgagaggtcacacacaggagatcggccttatcagtgtgagcatgcaggctgtgggaaggcatttgcaacaggttatggattaaaaagtcacgtcagaactcatacaggagaaaagccatatcggtgttcggaagataattgtactaaatctttcaaaacttcaggagatctacagaaacacatcagaactcatacaggagaaaggccctttaagtgtcccttcgaaggctgcggtcggtcctttacaacatcaaatatcagaaaagtgcacgttaggacacacacaggagaaagaccttattactgcacagagccaggatgtgggagggcatttgccagtgcaacaaattataaaaaccatgtgaggatacacacaggagaaaagccatatgtttgtacagttcctgggtgtgacaaaaggtttacagaatattccagtttgtacaaacatcatgttgtccacactcattccaaaccttacaactgtaaccactgtgggaagacatacaagcagatctccacgctggccatgcacaaacggacagcccacaacgacactgagcccatcgaggaggagcaggaagccttctttgagccgcccccaggtcaaggtgaagatgttcttaaagggtcccagattacgtatgttacaggtgtagaaggggacgacgttgtttctacacaagtagccacagtaacccaatctggactgagtcaacaagttacactcatatcccaggatgggactcagcatgtcaacatatctcaagctgacatgcaggccattggcaacaccatcacaatggtaacgcaggatggcacgcccatcacagtccccgcccatgatgcagtcatctcctcagcaggaacgcactctgttgctatggttactgctgagggtacagaagggcaacaggttgcaattgtagctcaagacttggcagcattccatactgcctcatcagaaatggggcaccagcagcatagccatcacttagtaaccacagaaaccagacctctgaccttagtagcaacatccaatggcacccagattgcagttcagcttggagaacagccatctctggaagaagccatcagaatagcgtctagaatccaacaaggagaaacgccagggttggatgattaatcctcagaacaatggagcaataaagcagaaggagtctttcatcttctggcagcagaaatccatgaagcccgggcccaggaaaattagaagttttccattcctgatacactgtacacatttttatgcgagagtggagaacattttattcttgacacttttgtgtatataacccttggaatagattctcagagtgattcattgtgtacaaggaagtatgaaattagggcaatacagtaaattttcatgttactcttttatcagatcacaaactcctagagtctacatgcaagactagtaaagtcttatggagtcttatgatggatttttaacttcccgtggaaaaaaaaataaaggctgtatctaaaataaaaaaaaaaaaaaaaattttttaagtaagagcaatgtttactgagcgatacaggactgagtactatgaagggtttacaaggatggaaatgcaccccgcccccgccctggccacccccgacacccagaagactacagtacttaggagttacacacaacggccgtaactggtggctatctgttcataacaaacaaaccatagcatatttatactgtatcacatcgagtgattatagaaatccatatatatattgcttgtataaaatctttttttttgtaaaaaatattaaaaaaaaaaaaaaaaaaaaaggaaagtataaaaaacatgtgcagttgaaagccctgccaggacagccagtctgtaaacattcggtgagtatgtgctttggaaggcgcccgcgcctcagtgcccacagcaaactccagcagggctggcgagggtgcgcccggctgccgcctcctgggcagggccgcgctggaccgaggtgggtgggggcatcagggccccgcagcacgcccctctccagttcgcatcagggcgaggggcagggctgggggcaggtgggttgcagtttcattctgagttccatcctcagccgcgttttggttgcaactcatggcttttcctggctgttcggaggttccttggatgggtgccctggtgaagaggccagagaagagcccagggctgcctcgttgggcgtctccctggcctcggtgcctctgtcctgcctccttcaagtggggccccaggcaggacaaccctacccgagggtcaactttggtctcagcgcttggtccctctgggtttcctcagcccgctcttcctcctgggtggctgatctgagttcacaaaaaagctcggctgatgctggctgtgctgaacctcattgtacagtttttcatgcaccaaaggaagggccatctggggcccccctcctcctctctcttcgtcacttttccttctcctcttcctcctcctccacctcctcccagcccatggtcacttcttctcgagctgctcgagcagtgggttgccttctgactcgggggtcttgacactgtcggtccggacgatgcaggtggggcggtgtcggttcagcatcaggatggaggctgctgccgctcctgcttcagctcctcaatctgggtcttcagctctgcgttcatgagttccagccgctcggattcccgctgcagaaactccgtgcgctccttcttcttgttccggcatcgggctgctgcgactttgttcttctcccggcgccttttccttcgctcctcttcctcatctagctcacttttcacgggctggggcctcttgcccagtttcacctccaggaagtgcaagggtgcaatcatggccccgaggttgcggatgtcagcgtatttcagctcctccacagtcagggccgagctggggagcccggtcagggggccaagccctggcagggagcctgtggtcaccgaagggtccgggatctgcccaggcatcatagcaggaggagtggcaggccagccttaacctcccccgccgccttgggcgccctcctcaccgcgagagcgctcgcgctcctctccccgcggggcgtcccgcgctttagagcacactggggtaccggat

SEQ ID NO: 306216 - DNA, 3961 bp, Homo sapiens
cccgaggacagaagatacttgtgttttcctgtagttgacaaaaaacggtagaagatgttgttagcccaaataaatcgagattctcagggaatgacagagtttcctggaggagggatggaggcgcaacatgttacgctgtgcttgacagaggcagtcaccgtggcagatggtgacaacttagaaaatatggaaggcgtaagcttgcaagcagtaacacttgcagatggttctactgcttacatacaacacaattctaaagatgcaaaactcatagatggccaggtcattcagttggaagatggttctgcggcctatgttcaacatgtacccatacctaaaagtacaggggacagtttgcgtctagaggatggtcaagcagtacagttagaagatggtaccacagcatttattcaccacacctccaaagatagttatgaccagagtgcattacaggcggttcagctggaagatggtaccacagcttatatccaccatgcagtgcaagtcccgcagtctgacaccatcttggcaattcaggctgatgggacagtggcaggtctgcacactggggatgctacaattgaccctgacaccatcagtgctttggaacagtatgcagcaaaggtgtccattgatggaagtgaaagtgtagcaggtactggaatgattggagaaaatgagcaagagaaaaaaatgcagattgttttacaaggacatgctacaagagtaactgctaaatctcaacagagtggagagaaggcatttcgatgtgaatatgatggatgtggaaaattatatacaacagctcatcatctcaaggtccatgagaggtcacacacaggagatcggccttatcagtgtgagcatgcaggctgtgggaaggcatttgcaacaggttatggattaaaaagtcacgtcagaactcatacaggagaaaagccatatcggtgttcggaagataattgtactaaatctttcaaaacttcaggagatctacagaaacacatcagaactcatacaggagaaaggccctttaagtgtcccttcgaaggctgcggtcggtcctttacaacatcaaatatcagaaaagtgcacgttaggacacacacaggagaaagaccttattactgcacagagccaggatgtgggagggcatttgccagtgcaacaaattataaaaaccatgtgaggatacacacaggagaaaagccatatgtttgtacagttcctgggtgtgacaaaaggtttacagaatattccagtttgtacaaacatcatgttgtccacactcattccaaaccttacaactgtaaccactgtgggaagacatacaagcagatctccacgctggccatgcacaaacggacagcccacaacgacactgagcccatcgaggaggagcaggaagccttctttgagccgcccccaggtcaaggtgaagatgttcttaaagggtcccagattacgtatgttacaggtgtagaaggggacgacgttgtttctacacaagtagccacagtaacccaatctggactgagtcaacaagttacactcatatcccaggatgggactcagcatgtcaacatatctcaagctgacatgcaggccattggcaacaccatcacaatggtaacgcaggatggcacgcccatcacagtccccgcccatgatgcagtcatctcctcagcaggaacgcactctgttgctatggttactgctgagggtacagaagggcaacaggttgcaattgtagctcaagacttggcagcattccatactgcctcatcagaaatggggcaccagcagcatagccatcacttagtaaccacagaaaccagacctctgaccttagtagcaacatccaatggcacccagattgcagttcagcttggagaacagccatctctggaagaagccatcagaatagcgtctagaatccaacaaggagaaacgccagggttggatgattaatcctcagaacaatggagcaataaagcagaaggagtctttcatcttctggcagcagaaatccatgaagcccgggcccaggaaaattagaagttttccattcctgatacactgtacacatttttatgcgagagtggagaacattttattcttgacacttttgtgtatataacccttggaatagattctcagagtgattcattgtgtacaaggaagtatgaaattagggcaatacagtaaattttcatgttactcttttatcagatcacaaactcctagagtctacatgcaagactagtaaagtcttatggagtcttatgatggatttttaacttcccgtggaaaaaaaaataaaggctgtatctaaaataaaaaaaaaaaaaaaaattttttaagtaagagcaatgtttactgagcgatacaggactgagtactatgaagggtttacaaggatggaaatgcaccccgcccccgccctggccacccccgacacccagaagactacagtacttaggagttacacacaacggccgtaactggtggctatctgttcataacaaacaaaccatagcatatttatactgtatcacatcgagtgattatagaaatccatatatatattgcttgtataaaatctttttttttgtaaaaaatattaaaaaaaaaaaaaaaaaaaaaggaaagtataaaaaacatgtgcagttgaaagccctgccaggacagccagtctgtaaacattcggtgagtatgtgctttggaaggcgcccgcgcctcagtgcccacagcaaactccagcagggctggcgagggtgcgcccggctgccgcctcctgggcagggccgcgctggaccgaggtgggtgggggcatcagggccccgcagcacgcccctctccagttcgcatcagggcgaggggcagggctgggggcaggtgggttgcagtttcattctgagttccatcctcagccgcgttttggttgcaactcatggcttttcctggctgttcggaggttccttggatgggtgccctggtgaagaggccagagaagagcccagggctgcctcgttgggcgtctccctggcctcggtgcctctgtcctgcctccttcaagtggggccccaggcaggacaaccctacccgagggtcaactttggtctcagcgcttggtccctctgggtttcctcagcccgctcttcctcctgggtggctgatctgagttcacaaaaaagctcggctgatgctggctgtgctgaacctcattgtacagtttttcatgcaccaaaggaagggccatctggggcccccctcctcctctctcttcgtcacttttccttctcctcttcctcctcctccacctcctcccagcccatggtcacttcttctcgagctgctcgagcagtgggttgccttctgactcgggggtcttgacactgtcggtccggacgatgcaggtggggcggtgtcggttcagcatcaggatggaggctgctgccgctcctgcttcagctcctcaatctgggtcttcagctctgcgttcatgagttccagccgctcggattcccgctgcagaaactccgtgcgctccttcttcttgttccggcatcgggctgctgcgactttgttcttctcccggcgccttttccttcgctcctcttcctcatctagctcacttttcacgggctggggcctcttgcccagtttcacctccaggaagtgcaagggtgcaatcatggccccgaggttgcggatgtcagcgtatttcagctcctccacagtcagggccgagctggggagcccggtcagggggccaagccctggcagggagcctgtggtcaccgaagggtccgggatctgcccaggcatcatagcaggaggagtggcaggccagccttaacctcccccgccgccttgggcgccctcctcaccgcgagagcgctcgcgctcctctccccgcggggcgtcccgcgctttagagcacactggggtaccggat

SEQ ID NO: 306217 - DNA, 2487 bp, Homo sapiens
gggcgggcctcagacacactatgcgggttgcggggcctgggggccggacggctgtttcctgtcctggtgcatggtggtcggacgaaggaattgttggaaaattttctcggaggtagaagatgttgttagcccaaataaatcgagattctcagggaatgacagagtttcctggaggagggatggaggcgcaacatgttacgctgtgcttgacagaggcagtcaccgtggcagatggtgacaacttagaaaatatggaaggcgtaagcttgcaagcagtaacacttgcagatggttctactgcttacatacaacacaattctaaagatgcaaaactcatagatggccaggtcattcagttggaagatggttctgcggcctatgttcaacatgtacccatacctaaaagtacaggggacagtttgcgtctagaggatggtcaagcagtacagttagaagatggtaccacagcatttattcaccacacctccaaagatagttatgaccagagtgcattacaggcggttcagctggaagatggtaccacagcttatatccaccatgcagtgcaagtcccgcagtctgacaccatcttggcaattcaggctgatgggacagtggcaggtctgcacactggggatgctacaattgaccctgacaccatcagtgctttggaacagtatgcagcaaaggtgtccattgatggaagtgaaagtgtagcaggtactggaatgattggagaaaatgagcaagagaaaaaaatgcagattgttttacaaggacatgctacaagagtaactgctaaatctcaacagagtggagagaaggcatttcgatgtgaatatgatggatgtggaaaattatatacaacagctcatcatctcaaggtccatgagaggtcacacacaggagatcggccttatcagtgtgagcatgcaggctgtgggaaggcatttgcaacaggttatggattaaaaagtcacgtcagaactcatacaggagaaaagccatatcggtgttcggaagataattgtactaaatctttcaaaacttcaggagatctacagaaacacatcagaactcatacaggagaaaggccctttaagtgtcccttcgaaggctgcggtcggtcctttacaacatcaaatatcagaaaagtgcacgttaggacacacacaggagaaagaccttattactgcacagagccaggatgtgggagggcatttgccagtgcaacaaattataaaaaccatgtgaggatacacacaggagaaaagccatatgtttgtacagttcctgggtgtgacaaaaggtttacagaatattccagtttgtacaaacatcatgttgtccacactcattccaaaccttacaactgtaaccactgtgggaagacatacaagcagatctccacgctggccatgcacaaacggacagcccacaacgacactgagcccatcgaggaggagcaggaagccttctttgagccgcccccaggtcaaggtgaagatgttcttaaagggtcccagattacgtatgttacaggtgtagaaggggacgacgttgtttctacacaagtagccacagtaacccaatctggactgagtcaacaagttacactcatatcccaggatgggactcagcatgtcaacatatctcaagctgacatgcaggccattggcaacaccatcacaatggtaacgcaggatggcacgcccatcacagtccccgcccatgatgcagtcatctcctcagcaggaacgcactctgttgctatggttactgctgagggtacagaagggcaacaggttgcaattgtagctcaagacttggcagcattccatactgcctcatcagaaatggggcaccagcagcatagccatcacttagtaaccacagaaaccagacctctgaccttagtagcaacatccaatggcacccagattgcagttcagcttggagaacagccatctctggaagaagccatcagaatagcgtctagaatccaacaaggagaaacgccagggttggatgattaatcctcagaacaatggagcaataaagcagaaggagtctttcatcttctggcagcagaaatccatgaagcccgggcccaggaaaattagaagttttccattcctgatacactgtacacatttttatgcgagagtggagaacattttattcttgacacttttgtgtatataacccttggaatagattctcagagtgattcattgtgtacaaggaagtatgaaattagggcaatacagtaaattttcatgttactcttttatcagatcacaaactcctagagtctacatgcaagactagtaaagtcttatggagtcttatgatggatttttaacttcccgtggaaaaaaaaataaaggctgtatctaaaatatcaaaggttctatatgtcacacaatcgtaattccaaaagccattatggataataaagggtgtaaagccttcagatatttcccc

SEQ ID NO: 306218 - DNA, 2955 bp, Homo sapiens
gggcgggcctcagacacactatgcgggttgcggggcctgggggccggacggctgtttcctgtcctggtgcatggtggtcggacgaaggaattgttggaaaattttctcggaggtagaagatgttgttagcccaaataaatcgagattctcagggaatgacagagtttcctggaggagggatggaggcgcaacatgttacgctgtgcttgacagaggcagtcaccgtggcagatggtgacaacttagaaaatatggaaggcgtaagcttgcaagcagtaacacttgcagatggttctactgcttacatacaacacaattctaaagatgcaaaactcatagatggccaggtcattcagttggaagatggttctgcggcctatgttcaacatgtacccatacctaaaagtacaggggacagtttgcgtctagaggatggtcaagcagtacagttagaagatggtaccacagcatttattcaccacacctccaaagatagttatgaccagagtgcattacaggcggttcagctggaagatggtaccacagcttatatccaccatgcagtgcaagtcccgcagtctgacaccatcttggcaattcaggctgatgggacagtggcaggtctgcacactggggatgctacaattgaccctgacaccatcagtgctttggaacagtatgcagcaaaggtgtccattgatggaagtgaaagtgtagcaggtactggaatgattggagaaaatgagcaagagaaaaaaatgcagattgttttacaaggacatgctacaagagtaactgctaaatctcaacagagtggagagaaggcatttcgatgtgaatatgatggatgtggaaaattatatacaacagctcatcatctcaaggtccatgagaggtcacacacaggagatcggccttatcagtgtgagcatgcaggctgtgggaaggcatttgcaacaggttatggattaaaaagtcacgtcagaactcatacaggagaaaagccatatcggtgttcggaagataattgtactaaatctttcaaaacttcaggagatctacagaaacacatcagaactcatacaggagaaaggccctttaagtgtcccttcgaaggctgcggtcggtcctttacaacatcaaatatcagaaaagtgcacgttaggacacacacaggagaaagaccttattactgcacagagccaggatgtgggagggcatttgccagtgcaacaaattataaaaaccatgtgaggatacacacaggagaaaagccatatgtttgtacagttcctgggtgtgacaaaaggtttacagaatattccagtttgtacaaacatcatgttgtccacactcattccaaaccttacaactgtaaccactgtgggaagacatacaagcagatctccacgctggccatgcacaaacggacagcccacaacgacactgagcccatcgaggaggagcaggaagccttctttgagccgcccccaggtcaaggtgaagatgttcttaaagggtcccagattacgtatgttacaggtgtagaaggggacgacgttgtttctacacaagtagccacagtaacccaatctggactgagtcaacaagttacactcatatcccaggatgggactcagcatgtcaacatatctcaagctgacatgcaggccattggcaacaccatcacaatggtaacgcaggatggcacgcccatcacagtccccgcccatgatgcagtcatctcctcagcaggaacgcactctgttgctatggttactgctgagggtacagaagggcaacaggttgcaattgtagctcaagacttggcagcattccatactgcctcatcagaaatggggcaccagcagcatagccatcacttagtaaccacagaaaccagacctctgaccttagtagcaacatccaatggcacccagattgcagttcagcttggagaacagccatctctggaagaagccatcagaatagcgtctagaatccaacaaggagaaacgccagggttggatgattaatcctcagaacaatggagcaataaagcagaaggagtctttcatcttctggcagcagaaatccatgaagcccgggcccaggaaaattagaagttttccattcctgatacactgtacacatttttatgcgagagtggagaacattttattcttgacacttttgtgtatataacccttggaatagattctcagagtgattcattgtgtacaaggaagtatgaaattagggcaatacagtaaattttcatgttactcttttatcagatcacaaactcctagagtctacatgcaagactagtaaagtcttatggagtcttatgatggatttttaacttcccgtggaaaaaaaaataaaggctgtatctaaaatatcaaaggttctatatgtcacacaatcgtaattccaaaagccattatggataataaagggtgtaaagccttcagatatttccccagttagtagagtgtctgcggtttttgttctactatatgcttgtccatttttatttgtatctcatggtttgcagactgtttgaataatttatagtttcccatccctgttaaaaaccagctcttcaagctgaaatgctaattatattggcattacattgaattatgtacaaaattataaaatttggttatttaaaattaaaaagttaaatccagtggttttgttaaagattttgcttagtattcaatttttattactgttttttaaaaataatgaatcatcaaagtttaaccacaggctggtgcccgggataacagtactgtaattggaaatggctttactctgaaaattaggttagtgggttggtgtaaattatttatttttgcttatgtacttttgttttaaagcttatttaccccaaagtttattattaattttgaatacagcaatttttaaaatgttaaaaaaaaa

SEQ ID NO: 306219 - DNA, 2394 bp, Homo sapiens
gggcgggcctcagacacactatgcgggttgcggggcctgggggccggacggctgtttcctgtcctggtgcatggtggtcggacgaaggaattgttggaaaattttctcggaggtagaagatgttgttagcccaaataaatcgagattctcagggaatgacagagtttcctggaggagggatggaggcgcaacatgttacgctgtgcttgacagaggcagtcaccgtggcagatgcaaaactcatagatggccaggtcattcagttggaagatggttctgcggcctatgttcaacatgtacccatacctaaaagtacaggggacagtttgcgtctagaggatggtcaagcagtacagttagaagatggtaccacagcatttattcaccacacctccaaagatagttatgaccagagtgcattacaggcggttcagctggaagatggtaccacagcttatatccaccatgcagtgcaagtcccgcagtctgacaccatcttggcaattcaggctgatgggacagtggcaggtctgcacactggggatgctacaattgaccctgacaccatcagtgctttggaacagtatgcagcaaaggtgtccattgatggaagtgaaagtgtagcaggtactggaatgattggagaaaatgagcaagagaaaaaaatgcagattgttttacaaggacatgctacaagagtaactgctaaatctcaacagagtggagagaaggcatttcgatgtgaatatgatggatgtggaaaattatatacaacagctcatcatctcaaggtccatgagaggtcacacacaggagatcggccttatcagtgtgagcatgcaggctgtgggaaggcatttgcaacaggttatggattaaaaagtcacgtcagaactcatacaggagaaaagccatatcggtgttcggaagataattgtactaaatctttcaaaacttcaggagatctacagaaacacatcagaactcatacaggagaaaggccctttaagtgtcccttcgaaggctgcggtcggtcctttacaacatcaaatatcagaaaagtgcacgttaggacacacacaggagaaagaccttattactgcacagagccaggatgtgggagggcatttgccagtgcaacaaattataaaaaccatgtgaggatacacacaggagaaaagccatatgtttgtacagttcctgggtgtgacaaaaggtttacagaatattccagtttgtacaaacatcatgttgtccacactcattccaaaccttacaactgtaaccactgtgggaagacatacaagcagatctccacgctggccatgcacaaacggacagcccacaacgacactgagcccatcgaggaggagcaggaagccttctttgagccgcccccaggtcaaggtgaagatgttcttaaagggtcccagattacgtatgttacaggtgtagaaggggacgacgttgtttctacacaagtagccacagtaacccaatctggactgagtcaacaagttacactcatatcccaggatgggactcagcatgtcaacatatctcaagctgacatgcaggccattggcaacaccatcacaatggtaacgcaggatggcacgcccatcacagtccccgcccatgatgcagtcatctcctcagcaggaacgcactctgttgctatggttactgctgagggtacagaagggcaacaggttgcaattgtagctcaagacttggcagcattccatactgcctcatcagaaatggggcaccagcagcatagccatcacttagtaaccacagaaaccagacctctgaccttagtagcaacatccaatggcacccagattgcagttcagcttggagaacagccatctctggaagaagccatcagaatagcgtctagaatccaacaaggagaaacgccagggttggatgattaatcctcagaacaatggagcaataaagcagaaggagtctttcatcttctggcagcagaaatccatgaagcccgggcccaggaaaattagaagttttccattcctgatacactgtacacatttttatgcgagagtggagaacattttattcttgacacttttgtgtatataacccttggaatagattctcagagtgattcattgtgtacaaggaagtatgaaattagggcaatacagtaaattttcatgttactcttttatcagatcacaaactcctagagtctacatgcaagactagtaaagtcttatggagtcttatgatggatttttaacttcccgtggaaaaaaaaataaaggctgtatctaaaatatcaaaggttctatatgtcacacaatcgtaattccaaaagccattatggataataaagggtgtaaagccttcagatatttcccc

SEQ ID NO: 306220 - DNA, 3172 bp, Homo sapiens
gggcgggcctcagacacactatgcgggttgcggggcctgggggccggacggctgtttcctgtcctggtgcatggtggtcggacgaaggaattgttggaaaattttctcggaggtagaagatgttgttagcccaaataaatcgagattctcagggaatgacagagtttcctggaggagggatggaggcgcaacatgttacgctgtgcttgacagaggcagtcaccgtggcagatggtgacaacttagaaaatatggaaggcgtaagcttgcaagcagtaacacttgcagatggttctactgcttacatacaacacaattctaaagatgcaaaactcatagatggccaggtcattcagttggaagatggttctgcggcctatgttcaacatgtacccatacctaaaagtacaggggacagtttgcgtctagaggatggtcaagcagtacagttagaagatggtaccacagcatttattcaccacacctccaaagatagttatgaccagagtgcattacaggcggttcagctggaagatggtaccacagcttatatccaccatgcagtgcaagtcccgcagtctgacaccatcttggcaattcaggctgatgggacagtggcaggtctgcacactggggatgctacaattgaccctgacaccatcagtgctttggaacagtatgcagcaaaggtgtccattgatggaagtgaaagtgtagcaggtactggaatgattggagaaaatgagcaagagaaaaaaatgcagattgttttacaaggacatgctacaagagtaactgctaaatctcaacagagtggagagaaggcatttcgatgtgaatatgatggatgtggaaaattatatacaacagctcatcatctcaaggtccatgagaggtcacacacaggagatcggccttatcagtgtgagcatgcaggctgtgggaaggcatttgcaacaggttatggattaaaaagtcacgtcagaactcatacaggagaaaagccatatcggtgttcggaagataattgtactaaatctttcaaaacttcaggagatctacagaaacacatcagaactcatacaggagaaaggccctttaagtgtcccttcgaaggctgcggtcggtcctttacaacatcaaatatcagaaaagtgcacgttaggacacacacaggagaaagaccttattactgcacagagccaggatgtgggagggcatttgccagtgcaacaaattataaaaaccatgtgaggatacacacaggagaaaagccatatgtttgtacagttcctgggtgtgacaaaaggtttacagaatattccagtttgtacaaacatcatgttgtccacactcattccaaaccttacaactgtaaccactgtgggaagacatacaagcagatctccacgctggccatgcacaaacggacagcccacaacgacactgagcccatcgaggaggagcaggaagccttctttgagccgcccccaggtcaaggtgaagatgttcttaaagggtcccagattacgtatgttacaggtgtagaaggggacgacgttgtttctacacaagtagccacagtaacccaatctggactgagtcaacaagttacactcatatcccaggatgggactcagcatgtcaacatatctcaagctgacatgcaggccattggcaacaccatcacaatggtaacgcaggatggcacgcccatcacagtccccgcccatgatgcagtcatctcctcagcaggaacgcactctgttgctatggttactgctgagggtacagaagggcaacaggttgcaattgtagctcaagacttggcagcattccatactgcctcatcagaaatggggcaccagcagcatagccatcacttagtaaccacagaaaccagacctctgaccttagtagcaacatccaatggcacccagattgcagttcagcttggagaacagccatctctggaagaagccatcagaatagcgtctagaatccaacaaggagaaacgccagggttggatgattaatcctcagaacaatggagcaataaagcagaaggagtctttcatcttctggcagcagaaatccatgaagcccgggcccaggaaaattagaagttttccattcctgatacactgtacacatttttatgcgagagtggagaacattttattcttgacacttttgtgtatataacccttggaatagattctcagagtgattcattgtgtacaaggaagtatgaaattagggcaatacagtaaattttcatgttactcttttatcagatcacaaactcctagagtctacatgcaagactagtaaagtcttatggagtcttatgatggatttttaacttcccgtggaaaaaaaaataaaggctgtatctaaaataaaaaaaaaaaaaaaaaaaaaaaaaaaaaaaaaaaaaaaaaaaaaaaaaaaaaaaaaaacaaaaaaaaaaaaaaaaacaggggggggggggcaaaagacccccgagggggacacgaataacgcgaaccacaagtttgttgcacagagggggccccaaaagagaggacgccataaaaacaaaaagagggaggaggcataacacacagaaggagagagagacacagcgaagagagaaaagaggggaaggacgccacacaagggcggggagagcacaacagcgggacacacacccacccgagaaaataataacccccagggaaagaaaaccacacgcggcaaagcgcgtgacaaccagccaaatatcagcaggagaagatcgcctcacggaaaataggaggaaaaaattttagccggagaagggagagctacgcactgcacgatgcggcgaaagaaacgacgacaagaagaagacaactagacgagcagcacggaggtgacaaaacggagaaggagggactggaagaagggaagagcgagactcataagcaggaaagaagcacaaggagaggggaccgagacaaaacaagtcgagcaccaacaagagaaaacaactacacaacaccaaacgaggaaaagaaaccagcccaggaaccaaagaccgaggaaaaccaaacaaataagacacatagactataacagaacacagaaccacgacgaaagagcggagaacagagagatgaagacaaaccaagagagagtctactagaaa

SEQ ID NO: 306221 - DNA, 2285 bp, Homo sapiens
ccgcctacctctgcctccccatgtgctaagattactggcatgagccactgtgcctggcttaagtaatttaagtaatactatttgttttatttagattgttttacaaggacatgctacaagagtaactgctaaatctcaacagagtggagagaaggcatttcgatgtgaatatgatggatgtggaaaattatatacaacagctcatcatctcaaggtccatgagaggtcacacacaggagatcggccttatcagtgtgagcatgcaggctgtgggaaggcatttgcaacaggttatggattaaaaagtcacgtcagaactcatacaggagaaaagccatatcggtgttcggaagataattgtactaaatctttcaaaacttcaggagatctacagaaacacatcagaactcatacaggagaaaggccctttaagtgtcccttcgaaggctgcggtcggtcctttacaacatcaaatatcagaaaagtgcacgttaggacacacacaggagaaagaccttattactgcacagagccaggatgtgggagggcatttgccagtgcaacaaattataaaaaccatgtgaggatacacacaggagaaaagccatatgtttgtacagttcctgggtgtgacaaaaggtttacagaatattccagtttgtacaaacatcatgttgtccacactcattccaaaccttacaactgtaaccactgtgggaagacatacaagcagatctccacgctggccatgcacaaacggacagcccacaacgacactgagcccatcgaggaggagcaggaagccttctttgagccgcccccaggtcaaggtgaagatgttcttaaagggtcccagattacgtatgttacaggtgtagaaggggacgacgttgtttctacacaagtagccacagtaacccaatctggactgagtcaacaagttacactcatatcccaggatgggactcagcatgtcaacatatctcaagctgacatgcaggccattggcaacaccatcacaatggtaacgcaggatggcacgcccatcacagtccccgcccatgatgcagtcatctcctcagcaggaacgcactctgttgctatggttactgctgagggtacagaagggcaacaggttgcaattgtagctcaagacttggcagcattccatactgcctcatcagaaatggggcaccagcagcatagccatcacttagtaaccacagaaaccagacctctgaccttagtagcaacatccaatggcacccagattgcagttcagcttggagaacagccatctctggaagaagccatcagaatagcgtctagaatccaacaaggagaaacgccagggttggatgattaatcctcagaacaatggagcaataaagcagaaggagtctttcatcttctggcagcagaaatccatgaagcccgggcccaggaaaattagaagttttccattcctgatacactgtacacatttttatgcgagagtggagaacattttattcttgacacttttgtgtatataacccttggaatagattctcagagtgattcattgtgtacaaggaagtatgaaattagggcaatacagtaaattttcatgttactcttttatcagatcacaaactcctagagtctacatgcaagactagtaaagtcttatggagtcttatgatggatttttaacttcccgtggaaaaaaaaataaaggctgtatctaaaatatcaaaggttctatatgtcacacaatcgtaattccaaaagccattatggataataaagggtgtaaagccttcagatatttccccagttagtagagtgtctgcggtttttgttctactatatgcttgtccatttttatttgtatctcatggtttgcagactgtttgaataatttatagtttcccatccctgttaaaaaccagctcttcaagctgaaatgctaattatattggcattacattgaattatgtacaaaattataaaatttggttatttaaaattaaaaagttaaatccagtggttttgttaaagattttgcttagtattcaatttttattactgttttttaaaaataatgaatcatcaaagtttaaccacaggctggtgcccgggataacagtactgtaattggaaatggctttactctgaaaattaggttagtgggttggtgtaaattatttatttttgcttatgtacttttgttttaaagcttatttaccccaaagtttattattaattttgaatacagcaatttttaaaatgttaaaaaaaaa

SEQ ID NO: 306222 - DNA, 2016 bp, Homo sapiens
gcacctgcccaggctcttccacagccacggtgtctgtattccgcatttcaggctcctccccatctgtcaacaccaacgcacccccgctgccctcatcatctacacccacctcacccaccaatccttgtcagggaacagtcttcaaatccagtaaaaactggaggaagaggaatgcaaacactctcagaaaatccgcccttcggagcctgctgtgttaattagcaaagctgtttctgaagctttatcacatccgtactggcccgccaggatgtgggagggcatttgccagtgcaacaaattataaaaaccatgtgaggatacacacaggagaaaagccatatgtttgtacagttcctgggtgtgacaaaaggtttacagaatattccagtttgtacaaacatcatgttgtccacactcattccaaaccttacaactgtaaccactgtgggaagacatacaagcagatctccacgctggccatgcacaaacggacagcccacaacgacactgagcccatcgaggaggagcaggaagccttctttgagccgcccccaggtcaaggtgaagatgttcttaaagggtcccagattacgtatgttacaggtgtagaaggggacgacgttgtttctacacaagtagccacagtaacccaatctggactgagtcaacaagttacactcatatcccaggatgggactcagcatgtcaacatatctcaagctgacatgcaggccattggcaacaccatcacaatggtaacgcaggatggcacgcccatcacagtccccgcccatgatgcagtcatctcctcagcaggaacgcactctgttgctatggttactgctgagggtacagaagggcaacaggttgcaattgtagctcaagacttggcagcattccatactgcctcatcagaaatggggcaccagcagcatagccatcacttagtaaccacagaaaccagacctctgaccttagtagcaacatccaatggcacccagattgcagttcagcttggagaacagccatctctggaagaagccatcagaatagcgtctagaatccaacaaggagaaacgccagggttggatgattaatcctcagaacaatggagcaataaagcagaaggagtctttcatcttctggcagcagaaatccatgaagcccgggcccaggaaaattagaagttttccattcctgatacactgtacacatttttatgcgagagtggagaacattttattcttgacacttttgtgtatataacccttggaatagattctcagagtgattcattgtgtacaaggaagtatgaaattagggcaatacagtaaattttcatgttactcttttatcagatcacaaactcctagagtctacatgcaagactagtaaagtcttatggagtcttatgatggatttttaacttcccgtggaaaaaaaaataaaggctgtatctaaaatatcaaaggttctatatgtcacacaatcgtaattccaaaagccattatggataataaagggtgtaaagccttcagatatttccccagttagtagagtgtctgcggtttttgttctactatatgcttgtccatttttatttgtatctcatggtttgcagactgtttgaataatttatagtttcccatccctgttaaaaaccagctcttcaagctgaaatgctaattatattggcattacattgaattatgtacaaaattataaaatttggttatttaaaattaaaaagttaaatccagtggttttgttaaagattttgcttagtattcaatttttattactgttttttaaaaataatgaatcatcaaagtttaaccacaggctggtgcccgggataacagtactgtaattggaaatggctttactctgaaaattaggttagtgggttggtgtaaattatttatttttgcttatgtacttttgttttaaagcttatttaccccaaagtttattattaattttgaatacagcaatttttaaaatgttaaaaaaaaa

SEQ ID NO: 306223 - DNA, 231 bp, Homo sapiens
tgcaagcttctccctgaaccatgtacttaaccagcctaaaccattatcaaaatgtaaaacattttaaagctttattttattcctataggtgtccattgatggaagtgaaagtgtagcaggtactggaatgattggagaaaatgagcaagagaaaaaaatgcaggtatgtaaagctactttttaatataaaaatctagcttagcatttctgtgcccttctgtggatgaaagc

SEQ ID NO: 306224 - DNA, 262 bp, Homo sapiens
gaaggaagacaaggctgtactttgttagcactcatcgtctacaaattaagaattaaaagcacacagaatctaaataaatggattgtcagtagcctacttgagatttcttctaatatccaaagggcttatgtttctttcagtttcattgtcagcataagctttgtgttatgcaaccagaaaatatagctttgaaatctaaaggacataagaattgccttaggagatttgcttccaaaataagaatcttcttgtcataatcatt

SEQ ID NO: 306225 - DNA, 582 bp, Homo sapiens
ggcaagttaagggaatagtggaatgaaggttcatttttcattctcacaaactaatgaaaccctgcttatcttaaaccaacctgctcactggagcagggaggacaggaccagcataaaaggcagggcagagtcgactgttgcttacactttcttctgacataacagtgttcactagcaacctcaaacagacaccatggtgcatctgactcctgaggagaagactgctgtcaatgccctgtggggcaaagtgaacgtggatgcagttggtggtgaggccctgggcagattactggtggtctacccttggacccagaggttctttgagtcctttggggatctgtcctctcctgatgctgttatgggcaaccctaaggtgaaggctcatggcaagaaggtgctaggtgcctttagtgatggcctggctcacctggacaacctcaagggcactttttctcagctgagtgagctgcactgtgacaagctgcacgtggatcctgagaacttcaggctcttgggcaatgtgctggtgtgtgtgctggcccgcaactttggcaaggaattcaccccacaaatgcaggctgc

SEQ ID NO: 306226 - DNA, 629 bp, Homo sapiens
ggcaagttaagggaatagtggaatgaaggttcatttttcattctcacaaactaatgaaaccctgcttatcttaaaccaacctgctcactggagcagggaggacaggaccagcataaaaggcagggcagagtcgactgttgcttacactttcttctgacataacagtgttcactagcaacctcaaacagacaccatggtgcatctgactcctgaggagaagactgctgtcaatgccctgtggggcaaagtgaacgtggatgcagttggtggtgaggccctgggcagattactggtggtctacccttggacccagaggttctttgagtcctttggggatctgtcctctcctgatgctgttatgggcaaccctaaggtgaaggctcatggcaagaaggtgctaggtgcctttagtgatggcctggctcacctggacaacctcaagggcactttttctcagctgagtgagctgcactgtgacaagctgcacgtggatcctgagaacttcagggtgtgtaagaaggttcctgaggctctacagatagggagcacttgtttattttacaaagagtacatgggaaaagagaaaagcaagggaaccgtacaaggcattaatgggtgacacttctacc

SEQ ID NO: 306227 - DNA, 359 bp, Homo sapiens
ggcaagttaagggaatagtggaatgaaggttcatttttcattctcacaaactaatgaaaccctgcttatcttaaaccaacctgctcactggagcagggaggacaggaccagcataaaaggcagggcagagtcgactgttgcttacactttcttctgacataacagtgttcactagcaacctcaaacagacaccatggtgcatctgactcctgaggagaagactgctgtcaatgccctgtggggcaaagtgaacgtggatgcagttggtggtgaggccctgggcagctcttgggcaatgtgctggtgtgtgtgctggcccgcaactttggcaaggaattcaccccacaaatgcaggctgc

SEQ ID NO: 306228 - DNA, 2647 bp, Homo sapiens
aaccaagatggcgatacgcgtgggaccggaaagagtttatagatttcccgtctaccctacctctgaggtgaaggtgggactgccctgtggagcccaccctttccgttatgcgcccgcgcggcgcaatgacgtaacacaggcccgcccactgcccctgttgaattcgtgggtcgtgctgcgtcgacaacggtagtgacgcgtattgcctggaggatggcggacgccggcattcgccgcgtggttcccagcgacctgtatcccctcgtgctcggcttcctgcgcgataaccaactctcagaggtggccaataagttcgccaaagcgacaggagctacacagcaggatgccaatgcctcttccctcttagacatctatagcttctggctcaacaggtctgccaaggtcccagagcgaaagttacaggcaaatggaccagtggctaagaaagctaagaagaaggcctcatccagtgacagtgaggacagcagcgaggaggaggaggaagttcaagggcctccagcaaagaaggctgctgtacctgccaagcgagtcggtctgcctcctgggaaggctgcagccaaagcatcagagagtagcagcagtgaagagtccagtgatgatgatgatgaggaggaccaaaagaaacagcctgtccagaagggagttaagccccaagccaaggcagccaaagctcctcctaagaaggccaagagctctgattctgattctgactcaagctccgaggatgagccaccaaagaaccagaagccaaagataacacctgtgacagttaaagctcagactaaagcccctcccaaaccagctcgagcagcacctaaaatagccaatggtaaagcagccagtagcagcagtagcagcagcagcagcagtagcagtgatgactcagaggaggagaaggcagcagccacccccaagaagactgtacctaaaaagcaagttgtggccaaggccccagtgaaagcagctaccacccctacccggaagagttctagcagtgaggattcctccagtgacgaggaagaggagcaaaaaaaacccatgaaaaataaaccaggtccctacagttcagtccccccgccttctgctcccccaccaaagaagtctctgggaacccagcctcccaagaaggctgtggagaagcagcagcctgtggaaagcagtgaagacagcagtgatgagtctgattcaagttctgaagaagagaagaaacccccaactaaggcagtagtctctaaagcaaccactaaaccacctccagcaaagaaagcagcagagagctcttcagacagctcagactctgacagctctgaggatgatgaagctccttctaagccagctggtaccaccaagaattcttcaaataagccagctgtcaccaccaagtcacctgcagtgaagccagctgcagcccccaagcaacctgtgggcggtggccagaagcttctgacgagaaaggctgacagcagctccagtgaggaagagagcagctccagtgaggaggagaagacaaagaagatggtggccaccactaagcccaaggcgactgccaaagcagctctatctctgcctgccaagcaggctcctcagggtagtagggacagcagctctgattcagacagctccagcagtgaggaggaggaagagaagacatctaagtctgcagttaagaagaagccacagaaggtagcaggaggtgcagccccttccaagccagcctctgcaaagaaaggaaaggctgagagcagcaacagttcttcttctgatgactccagtgaggaagaggaagagaagctcaagggcaagggctctccaagaccacaagcccccaaggccaatggcacctctgcactgactgcccagaatggaaaagcagctaagaacagtgaggaggaggaagaagaaaagaaaaaggcggcagtggtagtttccaaatcaggttcattaaagaagcggaagcagaatgaggctgccaaggaggcagagactcctcaggccaagaagataaagcttcagacccctaacacatttccaaaaaggaagaaaggagaaaaaagggcatcatccccattccgaagggtcagggaggaggaaattgaggtggattcacgagttgcggacaactcctttgatgccaagcgaggtgcagccggagactggggagagcgagccaatcaggttttgaagttcaccaaaggcaagtcctttcggcatgagaaaaccaagaagaagcggggcagctaccggggaggctcaatctctgtccaggtcaattctattaagtttgacagcgagtgacctgaggccatcttcggtgaagcaagggtgatgatcggagactacttactttctccagtggacctgggaaccctcaggtctctaggtgagggtcttgatgaggacagaagtttagagtaggtcctaagactttacagtgtaacatcctctctggtccttttctgtgttcctagttttgtacagacttgtttttgagtgttgagtagcagggacaaaataagggaatgttattttttaagaaaattcattttcattgttgtctccttccttttctgtgaaagtcctcatactgagaaatttgtatattttatattaaatcacttactattga

SEQ ID NO: 306229 - DNA, 679 bp, Homo sapiens
aaccaagatggcgatacgcgtgggaccggaaagagtttatagatttcccgtctaccctacctctgaggtgaaggtgggactgccctgtggagcccaccctttccgttatgcgcccgcgcggcgcaatgacgtaacacaggcccgcccactgcccctgttgaattcgtgggtcgtgctgcgtcgacaacggtagtgacgcgtattgcctggaggatggcggacgccggcattcgccgcgtggttcccagcgacctgtatcccctcgtgctcggcttcctgcgcgataaccaactctcagaggtggccaataagttcgccaaagcgacaggagctacacagcaggatgccaatgcctcttccctcttagacatctatagcttctggctcaacaggtctgccaaggtcccagagcgaaagttacaggcaaatggaccagtggctaagaaagctaagaagaaggcctcatccagtgacagtgaggacagcagcgaggaggaggaggaagttcaagggcctccagcaaagaaggctgctgcacctgccacgcccttcgctctcgcctccgcctacgctccccctctcagccccacccacgccccctttctacccgtctcgcgctccactctctctcagcggtccctacctcttctcaccgcatctcaccgccctttccgccccg

SEQ ID NO: 306230 - DNA, 3917 bp, Homo sapiens
aaccaagatggcgatacgcgtgggaccggaaagagtttatagatttcccgtctaccctacctctgaggtgaaggtgggactgccctgtggagcccaccctttccgttatgcgcccgcgcggcgcaatgacgtaacacaggcccgcccactgcccctgttgaattcgtgggtcgtgctgcgtcgacaacggtagtgacgcgtattgcctggaggatggcggacgccggcattcgccgcgtggttcccagcgacctgtatcccctcgtgctcggcttcctgcgcgataaccaactctcagaggtggccaataagttcgccaaagcgacaggagctacacagcaggatgccaatgcctcttccctcttagacatctatagcttctggctcaacaggtctgccaaggtcccagagcgaaagttacaggcaaatggaccagtggctaagaaagctaagaagaaggcctcatccagtgacagtgaggacagcagcgaggaggaggaggaagttcaagggcctccagcaaagaaggctgctgtacctgccaagcgagtcggtctgcctcctgggaaggctgcagccaaagcatcagagagtagcagcagtgaagagtccagtgatgatgatgatgaggaggaccaaaagaaacagcctgtccagaagggagttaagccccaagccaaggcagccaaagctcctcctaagaaggccaagagctctgattctgattctgactcaagctccgaggatgagccaccaaagaaccagaagccaaagataacacctgtgacagttaaagctcagactaaagcccctcccaaaccagctcgagcagcacctaaaatagccaatggtaaagcagccagtagcagcagtagcagcagcagcagcagtagcagtgatgactcagaggaggagaaggcagcagccacccccaagaagactgtacctaaaaagcaagttgtggccaaggccccagtgaaagcagctaccacccctacccggaagagttctagcagtgaggattcctccagtgacgaggaagaggagcaaaaaaaacccatgaaaaataaaccaggtccctacagttcagtccccccgccttctgctcccccaccaaagaagtctctgggaacccagcctcccaagaaggctgtggagaagcagcagcctgtggaaagcagtgaagacagcagtgatgagtctgattcaagttctgaagaagagaagaaacccccaactaaggcagtagtctctaaagcaaccactaaaccacctccagcaaagaaagcagcagagagctcttcagacagctcagactctgacagctctgaggatgatgaagctccttctaagccagctggtaccaccaagaattcttcaaataagccagctgtcaccaccaagtcacctgcagtgaagccagctgcagcccccaagcaacctgtgggcggtggccagaagcttctgacgagaaaggctgacagcagctccagtgaggaagagagcagctccagtgaggaggagaagacaaagaagatggtggccaccactaagcccaaggcgactgccaaagcagctctatctctgcctgccaagcaggctcctcagggtagtagggacagcagctctgattcagacagctccagcagtgaggaggaggaagagaagacatctaagtctgcagttaagaagaagccacagaaggtagcaggaggtgcagccccttccaagccagcctctgcaaagaaaggaaaggctgagagcagcaacagttcttcttctgatgactccagtgaggaagaggaagagaagctcaagggcaagggctctccaagaccacaagcccccaaggccaatggcacctctgcactgactgcccagaatggaaaagcagctaagaacagtgaggaggaggaagaagaaaagaaaaaggcggcagtggtagtttccaaatcaggttcattaaagaagcggaagcagaatgaggctgccaaggaggcagagactcctcaggccaagaagataaagcttcagacccctaacacatttccaaaaaggaagaaaggagaaaaaagggcatcatccccattccgaagggtcagggaggaggaaattgaggtggattcacgagttgcggacaactcctttgatgccaagcgaggtgcagccggagactggggagagcgagccaatcaggttttgaagttcaccaaaggcaagtcctttcggcatgagaaaaccaagaagaagcggggcagctaccggggaggctcaatctctgtccaggtcaattctattaagtttgacagcgagtgacctgaggccatcttcggtgaagcaagggtgatgatcggagactacttactttctccagtggacctgggaaccctcaggtctctaggtgagggtcttgatgaggacagaagtttagagtaggtcctaagactttacagtgtaacatcctctctggtccttttctgtgttcctagttttgtacagacttgtttttgagtgttgagtagcagggacaaaataagggaatgttattttttaagaaaattcattttcattgttgtctccttccttttctgtgaaagtcctcatactgagaaatttgtatattttatattaaatcacttactattgatttttgttgtgattttcaaaggtggattcccacagataaaatcttggctattgcccaaaacatagtaaagggtcacgtgtgactttttataataggaagaaaattctgcctttgtgagtgcacatgtccacatttcatccctccttccctcaaaaccctagagaggggcattaaagaattgttgatgtatatgcaatgtctgttaagcatgcactatgtatttcatcctcatttattgggtctgggactgaagtttttagccagcatggacctaacctactttttgggataaaattctctgttttgttacaggcaaaattctggtatggcgtgaatgccatgggtcattctgaatatatttttttctgtaattttatcattacacgatgtttgcaatacgtgctttgttttttaatttgaaagcaaacttttctactgttgaaagacattttttgacaacttgacccttcctagtattgagttctaagttgaggactgcatcttctcgttttttacagtatagagaacaaaatgacatgagtttgaaaaatacatatcacttggtattgctgtcttggttgcagtggtgatacagaattggtttcattaattcctacatggttgagaatcactgatcaagaaagtggggggaaaaaaaacaaacgttaaaacctcaatcctcagtaggaaggtagattacattaggtgaaattataggtaatctatgtatgtgctaatggggttggaaagaaccttacagagcatattacctgataaactggagtgggtttgggagaacaaactaataggattattgtgtctcctagttggtacctgggagcaattgacatgcccccttcagaaccttaactgttagtagcagtggctgtaacaacacaaaccagtgaccagagataacagcttttaggccaagctggcctgacggtatggctgcaggaagtgactgagcagtagcggtactcagccagaccaagacggagagggaagagtccacagctttctggaagctaaggcattctggtggtagaaaagtgtgccccaagccttcatggacgagttataggtcttaagattagtctcctcttgtttggattccatacttgctaaataacctgataataacctggttttccatgtaactgcctctaggaagaaaatgtactgttcatgctgacacagatatttcagtctgcatggtaaaagttctaaatcttactacaaaataataaactggctggtttataatgtg

SEQ ID NO: 306231 - DNA, 3947 bp, Homo sapiens
aaccaagatggcgatacgcgtgggaccggaaagagtttatagatttcccgtctaccctacctctgaggtgaaggtgggactgccctgtggagcccaccctttccgttatgcgcccgcgcggcgcaatgacgtaacacaggcccgcccactgcccctgttgaattcgtgggtcgtgctgcgtcgacaacggtagtgacgcgtattgcctggaggatggcggacgccggcattcgccgcgtggttcccagcgacctgtatcccctcgtgctcggcttcctgcgcgataaccaactctcagaggtggccaataagttcgccaaagcgacaggagctacacagcaggatgccaatgcctcttccctcttagacatctatagcttctggctcaacaggtctgccaaggtcccagagcgaaagttacaggcaaatggaccagtggctaagaaagctaagaagaaggcctcatccagtgacagtgaggacagcagcgaggaggaggaggaagttcaagggcctccagcaaagaaggctgctgtacctgccaagcgagtcggtctgcctcctgggaaggctgcagccaaagcatcagagagtagcagcagtgaagagtccagtgatgatgatgatgaggaggaccaaaagaaacagcctgtccagaagggagttaagccccaagccaaggcagccaaagctcctcctaagaaggccaagagctctgattctgattctgactcaagctccgaggatgagccaccaaagaaccagaagccaaagataacacctgtgacagttaaagctcagactaaagcccctcccaaaccagctcgagcagcacctaaaatagccaatggtaaagcagccagtagcagcagtagcagcagcagcagcagtagcagtgatgactcagaggaggagaaggcagcagccacccccaagaaggtctggaccataacttctgtcagggcagagactgtacctaaaaagcaagttgtggccaaggccccagtgaaagcagctaccacccctacccggaagagttctagcagtgaggattcctccagtgacgaggaagaggagcaaaaaaaacccatgaaaaataaaccaggtccctacagttcagtccccccgccttctgctcccccaccaaagaagtctctgggaacccagcctcccaagaaggctgtggagaagcagcagcctgtggaaagcagtgaagacagcagtgatgagtctgattcaagttctgaagaagagaagaaacccccaactaaggcagtagtctctaaagcaaccactaaaccacctccagcaaagaaagcagcagagagctcttcagacagctcagactctgacagctctgaggatgatgaagctccttctaagccagctggtaccaccaagaattcttcaaataagccagctgtcaccaccaagtcacctgcagtgaagccagctgcagcccccaagcaacctgtgggcggtggccagaagcttctgacgagaaaggctgacagcagctccagtgaggaagagagcagctccagtgaggaggagaagacaaagaagatggtggccaccactaagcccaaggcgactgccaaagcagctctatctctgcctgccaagcaggctcctcagggtagtagggacagcagctctgattcagacagctccagcagtgaggaggaggaagagaagacatctaagtctgcagttaagaagaagccacagaaggtagcaggaggtgcagccccttccaagccagcctctgcaaagaaaggaaaggctgagagcagcaacagttcttcttctgatgactccagtgaggaagaggaagagaagctcaagggcaagggctctccaagaccacaagcccccaaggccaatggcacctctgcactgactgcccagaatggaaaagcagctaagaacagtgaggaggaggaagaagaaaagaaaaaggcggcagtggtagtttccaaatcaggttcattaaagaagcggaagcagaatgaggctgccaaggaggcagagactcctcaggccaagaagataaagcttcagacccctaacacatttccaaaaaggaagaaaggagaaaaaagggcatcatccccattccgaagggtcagggaggaggaaattgaggtggattcacgagttgcggacaactcctttgatgccaagcgaggtgcagccggagactggggagagcgagccaatcaggttttgaagttcaccaaaggcaagtcctttcggcatgagaaaaccaagaagaagcggggcagctaccggggaggctcaatctctgtccaggtcaattctattaagtttgacagcgagtgacctgaggccatcttcggtgaagcaagggtgatgatcggagactacttactttctccagtggacctgggaaccctcaggtctctaggtgagggtcttgatgaggacagaagtttagagtaggtcctaagactttacagtgtaacatcctctctggtccttttctgtgttcctagttttgtacagacttgtttttgagtgttgagtagcagggacaaaataagggaatgttattttttaagaaaattcattttcattgttgtctccttccttttctgtgaaagtcctcatactgagaaatttgtatattttatattaaatcacttactattgatttttgttgtgattttcaaaggtggattcccacagataaaatcttggctattgcccaaaacatagtaaagggtcacgtgtgactttttataataggaagaaaattctgcctttgtgagtgcacatgtccacatttcatccctccttccctcaaaaccctagagaggggcattaaagaattgttgatgtatatgcaatgtctgttaagcatgcactatgtatttcatcctcatttattgggtctgggactgaagtttttagccagcatggacctaacctactttttgggataaaattctctgttttgttacaggcaaaattctggtatggcgtgaatgccatgggtcattctgaatatatttttttctgtaattttatcattacacgatgtttgcaatacgtgctttgttttttaatttgaaagcaaacttttctactgttgaaagacattttttgacaacttgacccttcctagtattgagttctaagttgaggactgcatcttctcgttttttacagtatagagaacaaaatgacatgagtttgaaaaatacatatcacttggtattgctgtcttggttgcagtggtgatacagaattggtttcattaattcctacatggttgagaatcactgatcaagaaagtggggggaaaaaaaacaaacgttaaaacctcaatcctcagtaggaaggtagattacattaggtgaaattataggtaatctatgtatgtgctaatggggttggaaagaaccttacagagcatattacctgataaactggagtgggtttgggagaacaaactaataggattattgtgtctcctagttggtacctgggagcaattgacatgcccccttcagaaccttaactgttagtagcagtggctgtaacaacacaaaccagtgaccagagataacagcttttaggccaagctggcctgacggtatggctgcaggaagtgactgagcagtagcggtactcagccagaccaagacggagagggaagagtccacagctttctggaagctaaggcattctggtggtagaaaagtgtgccccaagccttcatggacgagttataggtcttaagattagtctcctcttgtttggattccatacttgctaaataacctgataataacctggttttccatgtaactgcctctaggaagaaaatgtactgttcatgctgacacagatatttcagtctgcatggtaaaagttctaaatcttactacaaaataataaactggctggtttataatgtg

SEQ ID NO: 306232 - DNA, 3873 bp, Homo sapiens
aaccaagatggcgatacgcgtgggaccggaaagagtttatagatttcccgtctaccctacctctgaggtgaaggtgggactgccctgtggagcccaccctttccgttatgcgcccgcgcggcgcaatgacgtaacacaggcccgcccactgcccctgttgaattcgtgggtcgtgctgcgtcgacaacggtagtgacgcgtattgcctggaggatggcggacgccggcattcgccgcgtggttcccagcgacctgtatcccctcgtgctcggcttcctgcgcgataaccaactctcagaggtggccaataagttcgccaaagcgacaggagctacacagcaggatgccaatgcctcttccctcttagacatctatagcttctggctcaacaggtctgccaaggtcccagagcgaaagttacaggcaaatggaccagtggctaagaaagctaagaagaaggcctcatccagtgacagtgaggacagcagcgaggaggaggaggaagttcaagggcctccagcaaagaaggctgctgtacctgccaagcgagtcggtctgcctcctgggaaggctgcagccaaagcatcagagagtagcagcagtgaagagtccagtgatgatgatgatgaggaggaccaaaagaaacagcctgtccagaagggagttaagccccaagccaaggcagccaaagctcctcctaagaaggccaagagctctgattctgattctgactcaagctccgaggatgagccaccaaagaaccagaagccaaagataacacctgtgacagttaaagctcagactaaagcccctcccaaaccagctcgagcagcacctaaaatagccaatggtaaagcagccagtagcagcagtagcagcagcagcagcagtagcagtgatgactcagaggaggagaaggcagcagccacccccaagaagactgtacctaaaaagcaagttgtggccaaggccccagtgaaagcagctaccacccctacccggaagagttctagcagtgaggattcctccagtgacgaggaagaggagcaaaaaaaacccatgaaaaataaaccagaagtctctgggaacccagcctcccaagaaggctgtggagaagcagcagcctgtggaaagcagtgaagacagcagtgatgagtctgattcaagttctgaagaagagaagaaacccccaactaaggcagtagtctctaaagcaaccactaaaccacctccagcaaagaaagcagcagagagctcttcagacagctcagactctgacagctctgaggatgatgaagctccttctaagccagctggtaccaccaagaattcttcaaataagccagctgtcaccaccaagtcacctgcagtgaagccagctgcagcccccaagcaacctgtgggcggtggccagaagcttctgacgagaaaggctgacagcagctccagtgaggaagagagcagctccagtgaggaggagaagacaaagaagatggtggccaccactaagcccaaggcgactgccaaagcagctctatctctgcctgccaagcaggctcctcagggtagtagggacagcagctctgattcagacagctccagcagtgaggaggaggaagagaagacatctaagtctgcagttaagaagaagccacagaaggtagcaggaggtgcagccccttccaagccagcctctgcaaagaaaggaaaggctgagagcagcaacagttcttcttctgatgactccagtgaggaagaggaagagaagctcaagggcaagggctctccaagaccacaagcccccaaggccaatggcacctctgcactgactgcccagaatggaaaagcagctaagaacagtgaggaggaggaagaagaaaagaaaaaggcggcagtggtagtttccaaatcaggttcattaaagaagcggaagcagaatgaggctgccaaggaggcagagactcctcaggccaagaagataaagcttcagacccctaacacatttccaaaaaggaagaaaggagaaaaaagggcatcatccccattccgaagggtcagggaggaggaaattgaggtggattcacgagttgcggacaactcctttgatgccaagcgaggtgcagccggagactggggagagcgagccaatcaggttttgaagttcaccaaaggcaagtcctttcggcatgagaaaaccaagaagaagcggggcagctaccggggaggctcaatctctgtccaggtcaattctattaagtttgacagcgagtgacctgaggccatcttcggtgaagcaagggtgatgatcggagactacttactttctccagtggacctgggaaccctcaggtctctaggtgagggtcttgatgaggacagaagtttagagtaggtcctaagactttacagtgtaacatcctctctggtccttttctgtgttcctagttttgtacagacttgtttttgagtgttgagtagcagggacaaaataagggaatgttattttttaagaaaattcattttcattgttgtctccttccttttctgtgaaagtcctcatactgagaaatttgtatattttatattaaatcacttactattgatttttgttgtgattttcaaaggtggattcccacagataaaatcttggctattgcccaaaacatagtaaagggtcacgtgtgactttttataataggaagaaaattctgcctttgtgagtgcacatgtccacatttcatccctccttccctcaaaaccctagagaggggcattaaagaattgttgatgtatatgcaatgtctgttaagcatgcactatgtatttcatcctcatttattgggtctgggactgaagtttttagccagcatggacctaacctactttttgggataaaattctctgttttgttacaggcaaaattctggtatggcgtgaatgccatgggtcattctgaatatatttttttctgtaattttatcattacacgatgtttgcaatacgtgctttgttttttaatttgaaagcaaacttttctactgttgaaagacattttttgacaacttgacccttcctagtattgagttctaagttgaggactgcatcttctcgttttttacagtatagagaacaaaatgacatgagtttgaaaaatacatatcacttggtattgctgtcttggttgcagtggtgatacagaattggtttcattaattcctacatggttgagaatcactgatcaagaaagtggggggaaaaaaaacaaacgttaaaacctcaatcctcagtaggaaggtagattacattaggtgaaattataggtaatctatgtatgtgctaatggggttggaaagaaccttacagagcatattacctgataaactggagtgggtttgggagaacaaactaataggattattgtgtctcctagttggtacctgggagcaattgacatgcccccttcagaaccttaactgttagtagcagtggctgtaacaacacaaaccagtgaccagagataacagcttttaggccaagctggcctgacggtatggctgcaggaagtgactgagcagtagcggtactcagccagaccaagacggagagggaagagtccacagctttctggaagctaaggcattctggtggtagaaaagtgtgccccaagccttcatggacgagttataggtcttaagattagtctcctcttgtttggattccatacttgctaaataacctgataataacctggttttccatgtaactgcctctaggaagaaaatgtactgttcatgctgacacagatatttcagtctgcatggtaaaagttctaaatcttactacaaaataataaactggctggtttataatgtg

SEQ ID NO: 306233 - DNA, 3427 bp, Homo sapiens
aaccaagatggcgatacgcgtgggaccggaaagagtttatagatttcccgtctaccctacctctgaggtgaaggtgggactgccctgtggagcccaccctttccgttatgcgcccgcgcggcgcaatgacgtaacacaggcccgcccactgcccctgttgaattcgtgggtcgtgctgcgtcgacaacggtagtgacgcgtattgcctggaggatggcggacgccggcattcgccgcgtggttcccagcgacctgtatcccctcgtgctcggcttcctgcgcgataaccaactctcagaggtggccaataagttcgccaaagcgacaggagctctcgagcagcacctaaaatagccaatggtaaagcagccagtagcagcagtagcagcagcagcagcagtagcagtgatgactcagaggaggagaaggcagcagccacccccaagaagactgtacctaaaaagcaagttgtggccaaggccccagtgaaagcagctaccacccctacccggaagagttctagcagtgaggattcctccagtgacgaggaagaggagcaaaaaaaacccatgaaaaataaaccaggtccctacagttcagtccccccgccttctgctcccccaccaaagaagtctctgggaacccagcctcccaagaaggctgtggagaagcagcagcctgtggaaagcagtgaagacagcagtgatgagtctgattcaagttctgaagaagagaagaaacccccaactaaggcagtagtctctaaagcaaccactaaaccacctccagcaaagaaagcagcagagagctcttcagacagctcagactctgacagctctgaggatgatgaagctccttctaagccagctggtaccaccaagaattcttcaaataagccagctgtcaccaccaagtcacctgcagtgaagccagctgcagcccccaagcaacctgtgggcggtggccagaagcttctgacgagaaaggctgacagcagctccagtgaggaagagagcagctccagtgaggaggagaagacaaagaagatggtggccaccactaagcccaaggcgactgccaaagcagctctatctctgcctgccaagcaggctcctcagggtagtagggacagcagctctgattcagacagctccagcagtgaggaggaggaagagaagacatctaagtctgcagttaagaagaagccacagaaggtagcaggaggtgcagccccttccaagccagcctctgcaaagaaaggaaaggctgagagcagcaacagttcttcttctgatgactccagtgaggaagaggaagagaagctcaagggcaagggctctccaagaccacaagcccccaaggccaatggcacctctgcactgactgcccagaatggaaaagcagctaagaacagtgaggaggaggaagaagaaaagaaaaaggcggcagtggtagtttccaaatcaggttcattaaagaagcggaagcagaatgaggctgccaaggaggcagagactcctcaggccaagaagataaagcttcagacccctaacacatttccaaaaaggaagaaaggagaaaaaagggcatcatccccattccgaagggtcagggaggaggaaattgaggtggattcacgagttgcggacaactcctttgatgccaagcgaggtgcagccggagactggggagagcgagccaatcaggttttgaagttcaccaaaggcaagtcctttcggcatgagaaaaccaagaagaagcggggcagctaccggggaggctcaatctctgtccaggtcaattctattaagtttgacagcgagtgacctgaggccatcttcggtgaagcaagggtgatgatcggagactacttactttctccagtggacctgggaaccctcaggtctctaggtgagggtcttgatgaggacagaagtttagagtaggtcctaagactttacagtgtaacatcctctctggtccttttctgtgttcctagttttgtacagacttgtttttgagtgttgagtagcagggacaaaataagggaatgttattttttaagaaaattcattttcattgttgtctccttccttttctgtgaaagtcctcatactgagaaatttgtatattttatattaaatcacttactattgatttttgttgtgattttcaaaggtggattcccacagataaaatcttggctattgcccaaaacatagtaaagggtcacgtgtgactttttataataggaagaaaattctgcctttgtgagtgcacatgtccacatttcatccctccttccctcaaaaccctagagaggggcattaaagaattgttgatgtatatgcaatgtctgttaagcatgcactatgtatttcatcctcatttattgggtctgggactgaagtttttagccagcatggacctaacctactttttgggataaaattctctgttttgttacaggcaaaattctggtatggcgtgaatgccatgggtcattctgaatatatttttttctgtaattttatcattacacgatgtttgcaatacgtgctttgttttttaatttgaaagcaaacttttctactgttgaaagacattttttgacaacttgacccttcctagtattgagttctaagttgaggactgcatcttctcgttttttacagtatagagaacaaaatgacatgagtttgaaaaatacatatcacttggtattgctgtcttggttgcagtggtgatacagaattggtttcattaattcctacatggttgagaatcactgatcaagaaagtggggggaaaaaaaacaaacgttaaaacctcaatcctcagtaggaaggtagattacattaggtgaaattataggtaatctatgtatgtgctaatggggttggaaagaaccttacagagcatattacctgataaactggagtgggtttgggagaacaaactaataggattattgtgtctcctagttggtacctgggagcaattgacatgcccccttcagaaccttaactgttagtagcagtggctgtaacaacacaaaccagtgaccagagataacagcttttaggccaagctggcctgacggtatggctgcaggaagtgactgagcagtagcggtactcagccagaccaagacggagagggaagagtccacagctttctggaagctaaggcattctggtggtagaaaagtgtgccccaagccttcatggacgagttataggtcttaagattagtctcctcttgtttggattccatacttgctaaataacctgataataacctggttttccatgtaactgcctctaggaagaaaatgtactgttcatgctgacacagatatttcagtctgcatggtaaaagttctaaatcttactacaaaataataaactggctggtttataatgtg

SEQ ID NO: 306234 - DNA, 4200 bp, Homo sapiens
actctacgggaacaggtagctgggaccaagatgtgcatcaccacgcccagctgtgttttggttttgttttttatcagagtctggctctgtcgcccaggctggagtgcagtggcacgatctcagctcactgcaacctctgcctctcaggctaaagtgattctcctgcctcagcttcccaagtatgctgggattacaagcatgagccaccgtgactggctgattttttgttttgttttgttttaggactttgatcaatatagattggcaggcagggggttagatggttagatggtgccgcaaacataggagtagcccgttttttacatcagaaattgggaaatccacaaatagaatatttttctcctgatttatgcacgtagcaaaagttttatgaagatgtaacatttataccaaatttagtaattatgtatgtaacaggccacatttaatgaaagcataaccaggataaaataatttccttacccagctctttttcttctacagacacagcaggatgccaatgcctcttccctcttagacatctatagcttctggctcaagtaagcctttcctgttccattttggctattttctcccccaagataggctgggctgtgtttcttggtttgggaagattccagtcccctagaaattggtccaatctacctcagccaggtctgccaaggtcccagagcgaaagttacaggcaaatggaccagtggctaagaaagctaagaagaaggcctcatccagtgacagtgaggacagcagcgaggaggaggaggaagttcaagggcctccagcaaagaaggctgctgtacctgccaagcgagtcggtctgcctcctgggaaggctgcagccaaagcatcagagagtagcagcagtgaagagtccagtgatgatgatgatgaggaggaccaaaagaaacagcctgtccagaagggagttaagccccaagccaaggcagccaaagctcctcctaagaaggccaagagctctgattctgattctgactcaagctccgaggatgagccaccaaagaaccagaagccaaagataacacctgtgacagttaaagctcagactaaagcccctcccaaaccagctcgagcagcacctaaaatagccaatggtaaagcagccagtagcagcagtagcagcagcagcagcagtagcagtgatgactcagaggaggagaaggcagcagccacccccaagaagactgtacctaaaaagcaagttgtggccaaggccccagtgaaagcagctaccacccctacccggaagagttctagcagtgaggattcctccagtgacgaggaagaggagcaaaaaaaacccatgaaaaataaaccaggtccctacagttcagtccccccgccttctgctcccccaccaaagaagtctctgggaacccagcctcccaagaaggctgtggagaagcagcagcctgtggaaagcagtgaagacagcagtgatgagtctgattcaagttctgaagaagagaagaaacccccaactaaggcagtagtctctaaagcaaccactaaaccacctccagcaaagaaagcagcagagagctcttcagacagctcagactctgacagctctgaggatgatgaagctccttctaagccagctggtaccaccaagaattcttcaaataagccagctgtcaccaccaagtcacctgcagtgaagccagctgcagcccccaagcaacctgtgggcggtggccagaagcttctgacgagaaaggctgacagcagctccagtgaggaagagagcagctccagtgaggaggagaagacaaagaagatggtggccaccactaagcccaaggcgactgccaaagcagctctatctctgcctgccaagcaggctcctcagggtagtagggacagcagctctgattcagacagctccagcagtgaggaggaggaagagaagacatctaagtctgcagttaagaagaagccacagaaggtagcaggaggtgcagccccttccaagccagcctctgcaaagaaaggaaaggctgagagcagcaacagttcttcttctgatgactccagtgaggaagaggaagagaagctcaagggcaagggctctccaagaccacaagcccccaaggccaatggcacctctgcactgactgcccagaatggaaaagcagctaagaacagtgaggaggaggaagaagaaaagaaaaaggcggcagtggtagtttccaaatcaggttcattaaagaagcggaagcagaatgaggctgccaaggaggcagagactcctcaggccaagaagataaagcttcagacccctaacacatttccaaaaaggaagaaaggagaaaaaagggcatcatccccattccgaagggtcagggaggaggaaattgaggtggattcacgagttgcggacaactcctttgatgccaagcgaggtgcagccggagactggggagagcgagccaatcaggttttgaagttcaccaaaggcaagtcctttcggcatgagaaaaccaagaagaagcggggcagctaccggggaggctcaatctctgtccaggtcaattctattaagtttgacagcgagtgacctgaggccatcttcggtgaagcaagggtgatgatcggagactacttactttctccagtggacctgggaaccctcaggtctctaggtgagggtcttgatgaggacagaagtttagagtaggtcctaagactttacagtgtaacatcctctctggtccttttctgtgttcctagttttgtacagacttgtttttgagtgttgagtagcagggacaaaataagggaatgttattttttaagaaaattcattttcattgttgtctccttccttttctgtgaaagtcctcatactgagaaatttgtatattttatattaaatcacttactattgatttttgttgtgattttcaaaggtggattcccacagataaaatcttggctattgcccaaaacatagtaaagggtcacgtgtgactttttataataggaagaaaattctgcctttgtgagtgcacatgtccacatttcatccctccttccctcaaaaccctagagaggggcattaaagaattgttgatgtatatgcaatgtctgttaagcatgcactatgtatttcatcctcatttattgggtctgggactgaagtttttagccagcatggacctaacctactttttgggataaaattctctgttttgttacaggcaaaattctggtatggcgtgaatgccatgggtcattctgaatatatttttttctgtaattttatcattacacgatgtttgcaatacgtgctttgttttttaatttgaaagcaaacttttctactgttgaaagacattttttgacaacttgacccttcctagtattgagttctaagttgaggactgcatcttctcgttttttacagtatagagaacaaaatgacatgagtttgaaaaatacatatcacttggtattgctgtcttggttgcagtggtgatacagaattggtttcattaattcctacatggttgagaatcactgatcaagaaagtggggggaaaaaaaacaaacgttaaaacctcaatcctcagtaggaaggtagattacattaggtgaaattataggtaatctatgtatgtgctaatggggttggaaagaaccttacagagcatattacctgataaactggagtgggtttgggagaacaaactaataggattattgtgtctcctagttggtacctgggagcaattgacatgcccccttcagaaccttaactgttagtagcagtggctgtaacaacacaaaccagtgaccagagataacagcttttaggccaagctggcctgacggtatggctgcaggaagtgactgagcagtagcggtactcagccagaccaagacggagagggaagagtccacagctttctggaagctaaggcattctggtggtagaaaagtgtgccccaagccttcatggacgagttataggtcttaagattagtctcctcttgtttggattccatacttgctaaataacctgataataacctggttttccatgtaactgcctctaggaagaaaatgtactgttcatgctgacacagatatttcagtctgcatggtaaaagttctaaatcttactacaaaataataaactggctggtttataatgtg

SEQ ID NO: 306235 - DNA, 3861 bp, Homo sapiens
aaccaagatggcgatacgcgtgggaccggaaagagtttatagatttcccgtctaccctacctctgaggtgaaggtgggactgccctgtggagcccaccctttccgttatgcgcccgcgcggcgcaatgacgtaacacaggcccgcccactgcccctgttgaattcgtgggtcgtgctgcgtcgacaacggtagtgacgcgtattgcctggaggatggcggacgccggcattcgccgcgtggttcccagcgacctgtatcccctcgtgctcggcttcctgcgcgataaccaactctcagaggtggccaataagttcgccaaagcgacaggagctcaggtctgccaaggtcccagagcgaaagttacaggcaaatggaccagtggctaagaaagctaagaagaaggcctcatccagtgacagtgaggacagcagcgaggaggaggaggaagttcaagggcctccagcaaagaaggctgctgtacctgccaagcgagtcggtctgcctcctgggaaggctgcagccaaagcatcagagagtagcagcagtgaagagtccagtgatgatgatgatgaggaggaccaaaagaaacagcctgtccagaagggagttaagccccaagccaaggcagccaaagctcctcctaagaaggccaagagctctgattctgattctgactcaagctccgaggatgagccaccaaagaaccagaagccaaagataacacctgtgacagttaaagctcagactaaagcccctcccaaaccagctcgagcagcacctaaaatagccaatggtaaagcagccagtagcagcagtagcagcagcagcagcagtagcagtgatgactcagaggaggagaaggcagcagccacccccaagaagactgtacctaaaaagcaagttgtggccaaggccccagtgaaagcagctaccacccctacccggaagagttctagcagtgaggattcctccagtgacgaggaagaggagcaaaaaaaacccatgaaaaataaaccaggtccctacagttcagtccccccgccttctgctcccccaccaaagaagtctctgggaacccagcctcccaagaaggctgtggagaagcagcagcctgtggaaagcagtgaagacagcagtgatgagtctgattcaagttctgaagaagagaagaaacccccaactaaggcagtagtctctaaagcaaccactaaaccacctccagcaaagaaagcagcagagagctcttcagacagctcagactctgacagctctgaggatgatgaagctccttctaagccagctggtaccaccaagaattcttcaaataagccagctgtcaccaccaagtcacctgcagtgaagccagctgcagcccccaagcaacctgtgggcggtggccagaagcttctgacgagaaaggctgacagcagctccagtgaggaagagagcagctccagtgaggaggagaagacaaagaagatggtggccaccactaagcccaaggcgactgccaaagcagctctatctctgcctgccaagcaggctcctcagggtagtagggacagcagctctgattcagacagctccagcagtgaggaggaggaagagaagacatctaagtctgcagttaagaagaagccacagaaggtagcaggaggtgcagccccttccaagccagcctctgcaaagaaaggaaaggctgagagcagcaacagttcttcttctgatgactccagtgaggaagaggaagagaagctcaagggcaagggctctccaagaccacaagcccccaaggccaatggcacctctgcactgactgcccagaatggaaaagcagctaagaacagtgaggaggaggaagaagaaaagaaaaaggcggcagtggtagtttccaaatcaggttcattaaagaagcggaagcagaatgaggctgccaaggaggcagagactcctcaggccaagaagataaagcttcagacccctaacacatttccaaaaaggaagaaaggagaaaaaagggcatcatccccattccgaagggtcagggaggaggaaattgaggtggattcacgagttgcggacaactcctttgatgccaagcgaggtgcagccggagactggggagagcgagccaatcaggttttgaagttcaccaaaggcaagtcctttcggcatgagaaaaccaagaagaagcggggcagctaccggggaggctcaatctctgtccaggtcaattctattaagtttgacagcgagtgacctgaggccatcttcggtgaagcaagggtgatgatcggagactacttactttctccagtggacctgggaaccctcaggtctctaggtgagggtcttgatgaggacagaagtttagagtaggtcctaagactttacagtgtaacatcctctctggtccttttctgtgttcctagttttgtacagacttgtttttgagtgttgagtagcagggacaaaataagggaatgttattttttaagaaaattcattttcattgttgtctccttccttttctgtgaaagtcctcatactgagaaatttgtatattttatattaaatcacttactattgatttttgttgtgattttcaaaggtggattcccacagataaaatcttggctattgcccaaaacatagtaaagggtcacgtgtgactttttataataggaagaaaattctgcctttgtgagtgcacatgtccacatttcatccctccttccctcaaaaccctagagaggggcattaaagaattgttgatgtatatgcaatgtctgttaagcatgcactatgtatttcatcctcatttattgggtctgggactgaagtttttagccagcatggacctaacctactttttgggataaaattctctgttttgttacaggcaaaattctggtatggcgtgaatgccatgggtcattctgaatatatttttttctgtaattttatcattacacgatgtttgcaatacgtgctttgttttttaatttgaaagcaaacttttctactgttgaaagacattttttgacaacttgacccttcctagtattgagttctaagttgaggactgcatcttctcgttttttacagtatagagaacaaaatgacatgagtttgaaaaatacatatcacttggtattgctgtcttggttgcagtggtgatacagaattggtttcattaattcctacatggttgagaatcactgatcaagaaagtggggggaaaaaaaacaaacgttaaaacctcaatcctcagtaggaaggtagattacattaggtgaaattataggtaatctatgtatgtgctaatggggttggaaagaaccttacagagcatattacctgataaactggagtgggtttgggagaacaaactaataggattattgtgtctcctagttggtacctgggagcaattgacatgcccccttcagaaccttaactgttagtagcagtggctgtaacaacacaaaccagtgaccagagataacagcttttaggccaagctggcctgacggtatggctgcaggaagtgactgagcagtagcggtactcagccagaccaagacggagagggaagagtccacagctttctggaagctaaggcattctggtggtagaaaagtgtgccccaagccttcatggacgagttataggtcttaagattagtctcctcttgtttggattccatacttgctaaataacctgataataacctggttttccatgtaactgcctctaggaagaaaatgtactgttcatgctgacacagatatttcagtctgcatggtaaaagttctaaatcttactacaaaataataaactggctggtttataatgtg

SEQ ID NO: 306236 - DNA, 3362 bp, Homo sapiens
cgacgactgctttggcctgtggagaagcagcagcctgtggaaagcagtgaagagtccagtgatgatgatgatgaggaggaccaaaagaaacagcctgtccagaagggagttaagccccaagccaaggcagccaaagctcctcctaagaaggccaagagctctgattctgattctgactcaagctccgaggatgagccaccaaagaaccagaagccaaagataacacctgtgacagttaaagctcagactaaagcccctcccaaaccagctcgagcagcacctaaaatagccaatggtaaagcagccagtagcagcagtagcagcagcagcagcagtagcagtgatgactcagaggaggagaaggcagcagccacccccaagaagactgtacctaaaaagcaagttgtggccaaggccccagtgaaagcagctaccacccctacccggaagagttctagcagtgaggattcctccagtgacgaggaagaggagcaaaaaaaacccatgaaaaataaaccaggtccctacagttcagtccccccgccttctgctcccccaccaaagaagtctctgggaacccagcctcccaagaaggctgtggagaagcagcagcctgtggaaagcagtgaagacagcagtgatgagtctgattcaagttctgaagaagagaagaaacccccaactaaggcagtagtctctaaagcaaccactaaaccacctccagcaaagaaagcagcagagagctcttcagacagctcagactctgacagctctgaggatgatgaagctccttctaagccagctggtaccaccaagaattcttcaaataagccagctgtcaccaccaagtcacctgcagtgaagccagctgcagcccccaagcaacctgtgggcggtggccagaagcttctgacgagaaaggctgacagcagctccagtgaggaagagagcagctccagtgaggaggagaagacaaagaagatggtggccaccactaagcccaaggcgactgccaaagcagctctatctctgcctgccaagcaggctcctcagggtagtagggacagcagctctgattcagacagctccagcagtgaggaggaggaagagaagacatctaagtctgcagttaagaagaagccacagaaggtagcaggaggtgcagccccttccaagccagcctctgcaaagaaaggaaaggctgagagcagcaacagttcttcttctgatgactccagtgaggaagaggaagagaagctcaagggcaagggctctccaagaccacaagcccccaaggccaatggcacctctgcactgactgcccagaatggaaaagcagctaagaacagtgaggaggaggaagaagaaaagaaaaaggcggcagtggtagtttccaaatcaggttcattaaagaagcggaagcagaatgaggctgccaaggaggcagagactcctcaggccaagaagataaagcttcagacccctaacacatttccaaaaaggaagaaaggagaaaaaagggcatcatccccattccgaagggtcagggaggaggaaattgaggtggattcacgagttgcggacaactcctttgatgccaagcgaggtgcagccggagactggggagagcgagccaatcaggttttgaagttcaccaaaggcaagtcctttcggcatgagaaaaccaagaagaagcggggcagctaccggggaggctcaatctctgtccaggtcaattctattaagtttgacagcgagtgacctgaggccatcttcggtgaagcaagggtgatgatcggagactacttactttctccagtggacctgggaaccctcaggtctctaggtgagggtcttgatgaggacagaagtttagagtaggtcctaagactttacagtgtaacatcctctctggtccttttctgtgttcctagttttgtacagacttgtttttgagtgttgagtagcagggacaaaataagggaatgttattttttaagaaaattcattttcattgttgtctccttccttttctgtgaaagtcctcatactgagaaatttgtatattttatattaaatcacttactattgatttttgttgtgattttcaaaggtggattcccacagataaaatcttggctattgcccaaaacatagtaaagggtcacgtgtgactttttataataggaagaaaattctgcctttgtgagtgcacatgtccacatttcatccctccttccctcaaaaccctagagaggggcattaaagaattgttgatgtatatgcaatgtctgttaagcatgcactatgtatttcatcctcatttattgggtctgggactgaagtttttagccagcatggacctaacctactttttgggataaaattctctgttttgttacaggcaaaattctggtatggcgtgaatgccatgggtcattctgaatatatttttttctgtaattttatcattacacgatgtttgcaatacgtgctttgttttttaatttgaaagcaaacttttctactgttgaaagacattttttgacaacttgacccttcctagtattgagttctaagttgaggactgcatcttctcgttttttacagtatagagaacaaaatgacatgagtttgaaaaatacatatcacttggtattgctgtcttggttgcagtggtgatacagaattggtttcattaattcctacatggttgagaatcactgatcaagaaagtggggggaaaaaaaacaaacgttaaaacctcaatcctcagtaggaaggtagattacattaggtgaaattataggtaatctatgtatgtgctaatggggttggaaagaaccttacagagcatattacctgataaactggagtgggtttgggagaacaaactaataggattattgtgtctcctagttggtacctgggagcaattgacatgcccccttcagaaccttaactgttagtagcagtggctgtaacaacacaaaccagtgaccagagataacagcttttaggccaagctggcctgacggtatggctgcaggaagtgactgagcagtagcggtactcagccagaccaagacggagagggaagagtccacagctttctggaagctaaggcattctggtggtagaaaagtgtgccccaagccttcatggacgagttataggtcttaagattagtctcctcttgtttggattccatacttgctaaataacctgataataacctggttttccatgtaactgcctctaggaagaaaatgtactgttcatgctgacacagatatttcagtctgcatggtaaaagttctaaatcttactacaaaataataaactggctggtttataatgtg

SEQ ID NO: 306237 - DNA, 3404 bp, Homo sapiens
aaccaagatggcgatacgcgtgggaccggaaagagtttatagatttcccgtctaccctacctctgaggtgaaggtgggactgccctgtggagcccaccctttccgttatgcgcccgcgcggcgcaatgacgtaacacaggcccgcccactgcccctgttgaattcgtgggtcgtgctgcgtcgacaacggtagtgacgcgtattgcctggaggatggcggacgccggcattcgccgcgtggttcccagcgacctgtatcccctcgtgctcggcttcctgcgcgataaccaactctcagaggtggccaataagttcgccaaagcgacaggagctacacagcaggatgccaatgcctcttccctcttagacatctatagcttctggctcaacaggtctgccaaggtcccagagcgaaagttacaggcaaatggaccagtggctaagaaagctaagaagaaggcctcatccagtgacagtgaggacagcagcgaggaggaggaggaagttcaagggcctccagcaaagaaggctgctgtacctgccaagcgagtcggtctgcctcctgggaaggctgcagccaaagcatcagagagtagcagcagtgaagagtccagtgatgatgatgatgaggaggaccaaaagaaacagcctgtccagaagggagttaagccccaagccaaggcagccaaagctcctcctaagaaggccaagagctctgattctgattctgactcaagctccgaggatgagccaccaaagaaccagaagccaaagataacacctgtgacagttaaagctcagaactctgacagctctgaggatgatgaagctccttctaagccagctggtaccaccaagaattcttcaaataagccagctgtcaccaccaagtcacctgcagtgaagccagctgcagcccccaagcaacctgtgggcggtggccagaagcttctgacgagaaaggctgacagcagctccagtgaggaagagagcagctccagtgaggaggagaagacaaagaagatggtggccaccactaagcccaaggcgactgccaaagcagctctatctctgcctgccaagcaggctcctcagggtagtagggacagcagctctgattcagacagctccagcagtgaggaggaggaagagaagacatctaagtctgcagttaagaagaagccacagaaggtagcaggaggtgcagccccttccaagccagcctctgcaaagaaaggaaaggctgagagcagcaacagttcttcttctgatgactccagtgaggaagaggaagagaagctcaagggcaagggctctccaagaccacaagcccccaaggccaatggcacctctgcactgactgcccagaatggaaaagcagctaagaacagtgaggaggaggaagaagaaaagaaaaaggcggcagtggtagtttccaaatcaggttcattaaagaagcggaagcagaatgaggctgccaaggaggcagagactcctcaggccaagaagataaagcttcagacccctaacacatttccaaaaaggaagaaaggagaaaaaagggcatcatccccattccgaagggtcagggaggaggaaattgaggtggattcacgagttgcggacaactcctttgatgccaagcgaggtgcagccggagactggggagagcgagccaatcaggttttgaagttcaccaaaggcaagtcctttcggcatgagaaaaccaagaagaagcggggcagctaccggggaggctcaatctctgtccaggtcaattctattaagtttgacagcgagtgacctgaggccatcttcggtgaagcaagggtgatgatcggagactacttactttctccagtggacctgggaaccctcaggtctctaggtgagggtcttgatgaggacagaagtttagagtaggtcctaagactttacagtgtaacatcctctctggtccttttctgtgttcctagttttgtacagacttgtttttgagtgttgagtagcagggacaaaataagggaatgttattttttaagaaaattcattttcattgttgtctccttccttttctgtgaaagtcctcatactgagaaatttgtatattttatattaaatcacttactattgatttttgttgtgattttcaaaggtggattcccacagataaaatcttggctattgcccaaaacatagtaaagggtcacgtgtgactttttataataggaagaaaattctgcctttgtgagtgcacatgtccacatttcatccctccttccctcaaaaccctagagaggggcattaaagaattgttgatgtatatgcaatgtctgttaagcatgcactatgtatttcatcctcatttattgggtctgggactgaagtttttagccagcatggacctaacctactttttgggataaaattctctgttttgttacaggcaaaattctggtatggcgtgaatgccatgggtcattctgaatatatttttttctgtaattttatcattacacgatgtttgcaatacgtgctttgttttttaatttgaaagcaaacttttctactgttgaaagacattttttgacaacttgacccttcctagtattgagttctaagttgaggactgcatcttctcgttttttacagtatagagaacaaaatgacatgagtttgaaaaatacatatcacttggtattgctgtcttggttgcagtggtgatacagaattggtttcattaattcctacatggttgagaatcactgatcaagaaagtggggggaaaaaaaacaaacgttaaaacctcaatcctcagtaggaaggtagattacattaggtgaaattataggtaatctatgtatgtgctaatggggttggaaagaaccttacagagcatattacctgataaactggagtgggtttgggagaacaaactaataggattattgtgtctcctagttggtacctgggagcaattgacatgcccccttcagaaccttaactgttagtagcagtggctgtaacaacacaaaccagtgaccagagataacagcttttaggccaagctggcctgacggtatggctgcaggaagtgactgagcagtagcggtactcagccagaccaagacggagagggaagagtccacagctttctggaagctaaggcattctggtggtagaaaagtgtgccccaagccttcatggacgagttataggtcttaagattagtctcctcttgtttggattccatacttgctaaataacctgataataacctggttttccatgtaactgcctctaggaagaaaatgtactgttcatgctgacacagatatttcagtctgcatggtaaaagttctaaatcttactacaaaataataaactggctggtttataatgtg

SEQ ID NO: 306238 - DNA, 3482 bp, Homo sapiens
aaccaagatggcgatacgcgtgggaccggaaagagtttatagatttcccgtctaccctacctctgaggtgaaggtgggactgccctgtggagcccaccctttccgttatgcgcccgcgcggcgcaatgacgtaacacaggcccgcccactgcccctgttgaattcgtgggtcgtgctgcgtcgacaacggtagtgacgcgtattgcctggaggatggcggacgccggcattcgccgcgtggttcccagcgacctgtatcccctcgtgctcggcttcctgcgcgataaccaactctcagaggtggccaataagttcgccaaagcgacaggagctaagggagttaagccccaagccaaggcagccaaagctcctcctaagaaggccaagagctctgattctgattctgactcaagctccgaggatgagccaccaaagaaccagaagccaaagataacacctgtgacagttaaagctcagactaaagcccctcccaaaccagctcgagcagcacctaaaatagccaatggtaaagcagccagtagcagcagtagcagcagcagcagcagtagcagtgatgactcagaggaggagaaggcagcagccacccccaagaagactgtacctaaaaagcaagttgtggccaaggccccagtgaaagcagctaccacccctacccggaagagttctagcagtgaggattcctccagtgacgaggaagaggagcaaaaaaaacccatgaaaaataaaccaggtccctacagttcagtccccccgccttctgctcccccaccaaagaagtctctgggaacccagcctcccaagaaggctgtggagaagcagcagcctgtggaaagcagtgaagacagcagtgatgagtctgactctgacagctctgaggatgatgaagctccttctaagccagctggtaccaccaagaattcttcaaataagccagctgtcaccaccaagtcacctgcagtgaagccagctgcagcccccaagcaacctgtgggcggtggccagaagcttctgacgagaaaggctgacagcagctccagtgaggaagagagcagctccagtgaggaggagaagacaaagaagatggtggccaccactaagcccaaggcgactgccaaagcagctctatctctgcctgccaagcaggctcctcagggtagtagggacagcagctctgattcagacagctccagcagtgaggaggaggaagagaagacatctaagtctgcagttaagaagaagccacagaaggtagcaggaggtgcagccccttccaagccagcctctgcaaagaaaggaaaggctgagagcagcaacagttcttcttctgatgactccagtgaggaagaggaagagaagctcaagggcaagggctctccaagaccacaagcccccaaggccaatggcacctctgcactgactgcccagaatggaaaagcagctaagaacagtgaggaggaggaagaagaaaagaaaaaggcggcagtggtagtttccaaatcaggttcattaaagaagcggaagcagaatgaggctgccaaggaggcagagactcctcaggccaagaagataaagcttcagacccctaacacatttccaaaaaggaagaaaggagaaaaaagggcatcatccccattccgaagggtcagggaggaggaaattgaggtggattcacgagttgcggacaactcctttgatgccaagcgaggtgcagccggagactggggagagcgagccaatcaggttttgaagttcaccaaaggcaagtcctttcggcatgagaaaaccaagaagaagcggggcagctaccggggaggctcaatctctgtccaggtcaattctattaagtttgacagcgagtgacctgaggccatcttcggtgaagcaagggtgatgatcggagactacttactttctccagtggacctgggaaccctcaggtctctaggtgagggtcttgatgaggacagaagtttagagtaggtcctaagactttacagtgtaacatcctctctggtccttttctgtgttcctagttttgtacagacttgtttttgagtgttgagtagcagggacaaaataagggaatgttattttttaagaaaattcattttcattgttgtctccttccttttctgtgaaagtcctcatactgagaaatttgtatattttatattaaatcacttactattgatttttgttgtgattttcaaaggtggattcccacagataaaatcttggctattgcccaaaacatagtaaagggtcacgtgtgactttttataataggaagaaaattctgcctttgtgagtgcacatgtccacatttcatccctccttccctcaaaaccctagagaggggcattaaagaattgttgatgtatatgcaatgtctgttaagcatgcactatgtatttcatcctcatttattgggtctgggactgaagtttttagccagcatggacctaacctactttttgggataaaattctctgttttgttacaggcaaaattctggtatggcgtgaatgccatgggtcattctgaatatatttttttctgtaattttatcattacacgatgtttgcaatacgtgctttgttttttaatttgaaagcaaacttttctactgttgaaagacattttttgacaacttgacccttcctagtattgagttctaagttgaggactgcatcttctcgttttttacagtatagagaacaaaatgacatgagtttgaaaaatacatatcacttggtattgctgtcttggttgcagtggtgatacagaattggtttcattaattcctacatggttgagaatcactgatcaagaaagtggggggaaaaaaaacaaacgttaaaacctcaatcctcagtaggaaggtagattacattaggtgaaattataggtaatctatgtatgtgctaatggggttggaaagaaccttacagagcatattacctgataaactggagtgggtttgggagaacaaactaataggattattgtgtctcctagttggtacctgggagcaattgacatgcccccttcagaaccttaactgttagtagcagtggctgtaacaacacaaaccagtgaccagagataacagcttttaggccaagctggcctgacggtatggctgcaggaagtgactgagcagtagcggtactcagccagaccaagacggagagggaagagtccacagctttctggaagctaaggcattctggtggtagaaaagtgtgccccaagccttcatggacgagttataggtcttaagattagtctcctcttgtttggattccatacttgctaaataacctgataataacctggttttccatgtaactgcctctaggaagaaaatgtactgttcatgctgacacagatatttcagtctgcatggtaaaagttctaaatcttactacaaaataataaactggctggtttataatgtg

SEQ ID NO: 306239 - DNA, 4240 bp, Homo sapiens
aaccaagatggcgatacgcgtgggaccggaaagagtttatagatttcccgtctaccctacctctgaggtgaaggtgggactgccctgtggagcccaccctttccgttatgcgcccgcgcggcgcaatgacgtaacacaggcccgcccactgcccctgttgaattcgtgggtcgtgctgcgtcgacaacggtagtgacgcgtattgcctggaggatggcggacgccggcattcgccgcgtggttcccagcgacctgtatcccctcgtgctcggcttcctgcgcgataaccaactctcagaggtggccaataagttcgccaaagcgacaggagctacacagcaggatgccaatgcctcttccctcttagacatctatagcttctggctcaacaggtctgccaaggtcccagagcgaaagttacaggcaaatggaccagtggctaagaaagctaagaagaaggcctcatccagtgacagtgaggacagcagcgaggaggaggaggaagttcaagggcctccagcaaagaaggctgctgtacctgccaagcgagtcggtctgcctcctgggaaggctgcagccaaagcatcagagagtagcagcagtgaagagtccagtgatgatgatgatgaggaggaccaaaagaaacagcctgtccagaagggagttaagccccaagccaaggcagccaaagctcctcctaagaaggccaagagctctgattctgattctgactcaagctccgaggatgagccaccaaagaaccagaagccaaagataacacctgtgacagttaaagctcagactaaagcccctcccaaaccagctcgagcagcacctaaaatagccaatggtaaagcagccagtagcagcagtagcagcagcagcagcagtagcagtgatgactcagaggaggagaaggcagcagccacccccaagaagactgtacctaaaaagcaagttgtggccaaggccccagtgaaagcagctaccacccctacccggaagagttctagcagtgaggattcctccagtgacgaggaagaggagcaaaaaaaacccatgaaaaataaaccaggtccctacagttcagtccccccgccttctgctcccccaccaaagaagtctctgggaacccagcctcccaagaaggctgtggagaagcagcagcctgtggaaagcagtgaagacagcagtgatgagtctgattcaagttctgaagaagagaagaaacccccaactaaggcagtagtctctaaagcaaccactaaaccacctccagcaaagaaagcagcagagagctcttcagacagctcagactctgacagctctgaggatgatgaagctccttctaagccagctggtaccaccaagaattcttcaaataagccagctgtcaccaccaagtcacctgcagtgaagccagctgcagcccccaagcaacctgtgggcggtggccagaagcttctgacgagaaaggctgacagcagctccagtgaggaagagagcagctccagtgaggaggagaagacaaagaagatggtggccaccactaagcccaaggcgactgccaaagcagctctatctctgcctgccaagcaggctcctcagggtagtagggacagcagctctgattcagacagctccagcagtgaggaggaggaagagaagacatctaagtctgcagttaagaagaagccacagaaggtagcaggaggtgcagccccttccaagccagcctctgcaaagaaaggaaaggctgagagcagcaacagttcttcttctgatgactccagtgaggaagaggaagagaagctcaagggcaagggctctccaagaccacaagcccccaaggccaatggcacctctgcactgactgcccagaatggaaaagcagctaagaacagtgaggaggaggaagaagaaaagaaaaaggcggcagtggtagtttccaaatcaggttcattaaagaagcggaagcagaatgaggctgccaaggaggcagagactcctcaggccaagaagataaagcttcagacccctaacacatttccaaaaaggaagaaaggagaaaaaagggcatcatccccattccgaagggtcagggaggaggaaattgaggtggattcacgagttgcggacaactcctttgatgccaagcgaggtgcagccggagactggggagagcgagccaatcaggttttgaagttcaccaaaggcaagtcctttcggcatgagaaaaccaagaagaagcggggcagctaccggggaggctcaatctctgtccaggtcaattctattaagtttgacagcgagtgacctgaggccatcttcggtgaagcaagggtgatgatcggagactacttactttctccagtggacctgggaaccctcaggtctctaggtgagggtcttgatgaggacagaagtttagagtaggtcctaagactttacagtgtaacatcctctctggtccttttctgtgttcctagttttgtacagacttgtttttgagtgttgagtagcagggacaaaataagggaatgttattttttaagaaaattcattttcattgttgtctccttccttttctgtgaaagtcctcatactgagaaatttgtatattttatattaaatcacttactattgatttttgttgtgattttcaaaggtggattcccacagataaaatcttggctattgcccaaaacatagtaaagggtcacgtgtgactttttataataggaagaaaattctgcctttgtgagtgcacatgtccacatttcatccctccttccctcaaaaccctagagaggggcattaaagaattgttgatgtatatgcaatgtctgttaagcatgcactatgtatttcatcctcatttattgggtctgggactgaagtttttagccagcatggacctaacctactttttgggataaaattctctgttttgttacaggcaaaattctggtatggcgtgaatgccatgggtcattctgaatatatttttttctgtaattttatcattacacgatgtttgcaatacgtgctttgttttttaatttgaaagcaaacttttctactgttgaaagacattttttgacaacttgacccttcctagtattgagttctaagttgaggactgcatcttctcgttttttacagtatagagaacaaaatgacatgagtttgaaaaatacatatcacttggtattgctgtcttggttgcagtggtgatacagaattggtttcattaattcctacatggttgagaatcactgatcaagaaagtggggggaaaaaaaacaaacgttaaaacctcaatcctcagtaggaaggtagattacattaggtgaaattataggtaatctatgtatgtgctaatggggttggaaagaaccttacagagcatattacctgataaactggagtgggtttgggagaacaaactaataggattattgtgtctcctagttggtacctgggagcaattgacatgcccccttcagaaccttaactgttagtagcagtggctgtaacaacacaaaccagtgaccagagataacagcttttaggccaagctggcctgacggtatggctgcaggaagtgactgagcagtagcggtactcagccagaccaagacggagagggaagagtccacagctttctggaagctaaggcattctggtggtagaaaagtgtgccccaagccttcatggacgagttataggtcttaagattagtctcctcttgtttggattccatacttgctaaataacctgataataacctggttttccatgtaactgcctctaggaagaaaatgtactgttcatgctgacacagatatttcagtctgcatggtaaaagttctaaatcttactacaaaataataaactggctggtttataatgtgaaaaaaaaaagagaaaaaaaacaagaacaaaaaaaacagcaaaagaaaaagaaaacgacagaaaaaaagaaaagaaaaaaaggcaagagaagagaaggaaagaagaaagacaaaacgacaaagacagaaaacgagcaacaacgacacagagaaagaagagaagacgcaagaaggaagaaaacagaaagaaaaacaaccacgagagagacagaagcaacaagagaaacaaaaaaagggaaacaaacaaaacacggaccacaagacacgcaaaaagaacgaagaggagacaaacacaaaacccaccacggaaagcagagaagacg

SEQ ID NO: 306240 - DNA, 4819 bp, Homo sapiens
aaccaagatggcgatacgcgtgggaccggaaagagtttatagatttcccgtctaccctacctctgaggtgaaggtgggactgccctgtggagcccaccctttccgttatgcgcccgcgcggcgcaatgacgtaacacaggcccgcccactgcccctgttgaattcgtgggtcgtgctgcgtcgacaacggtagtgacgcgtattgcctggaggatggcggacgccggcattcgccgcgtggttcccagcgacctgtatcccctcgtgctcggcttcctgcgcgataaccaactctcagaggtggccaataagttcgccaaagcgacaggagctacacagcaggatgccaatgcctcttccctcttagacatctatagcttctggctcaacaggtctgccaaggtcccagagcgaaagttacaggcaaatggaccagtggctaagaaagctaagaagaaggcctcatccagtgacagtgaggacagcagcgaggaggaggaggaagttcaagggcctccagcaaagaaggctgctgtacctgccaagcgagtcggtctgcctcctgggaaggctgcagccaaagcatcagagagtagcagcagtgaagagtccagtgatgatgatgatgaggaggaccaaaagaaacagcctgtccagaagggagttaagccccaagccaaggcagccaaagctcctcctaagaaggccaagagctctgattctgattctgactcaagctccgaggatgagccaccaaagaaccagaagccaaagataacacctgtgacagttaaagctcagactaaagcccctcccaaaccagctcgagcagcacctaaaatagccaatggtaaagcagccagtagcagcagtagcagcagcagcagcagtagcagtgatgactcagaggaggagaaggcagcagccacccccaagaagactgtacctaaaaagcaagttgtggccaaggccccagtgaaagcagctaccacccctacccggaagagttctagcagtgaggattcctccagtgacgaggaagaggagcaaaaaaaacccatgaaaaataaaccaggtccctacagttcagtccccccgccttctgctcccccaccaaagaagtctctgggaacccagcctcccaagaaggctgtggagaagcagcagcctgtggaaagcagtgaagacagcagtgatgagtctgattcaagttctgaagaagagaagaaacccccaactaaggcagtagtctctaaagcaaccactaaaccacctccagcaaagaaagcagcagagagctcttcagacagctcagactctgacagctctgaggatgatgaagctccttctaagccagctggtaccaccaagaattcttcaaataagccagctgtcaccaccaagtcacctgcagtgaagccagctgcagcccccaagcaacctgtgggcggtggccagaagcttctgacgagaaaggctgacagcagctccagtgaggaagagagcagctccagtgaggaggagaagacaaagaagatggtggccaccactaagcccaaggcgactgccaaagcagctctatctctgcctgccaagcaggctcctcagggtagtagggacagcagctctgattcagacagctccagcagtgaggaggaggaagagaagacatctaagtctgcagttaagaagaagccacagaaggtagcaggaggtgcagccccttccaagccagcctctgcaaagaaaggaaaggctgagagcagcaacagttcttcttctgatgactccagtgaggaagaggaagagaagctcaagggcaagggctctccaagaccacaagcccccaaggccaatggcacctctgcactgactgcccagaatggaaaagcagctaagaacagtgaggaggaggaagaagaaaagaaaaaggcggcagtggtagtttccaaatcaggttcattaaagaagcggaagcagaatgaggctgccaaggaggcagagactcctcaggccaagaagataaagcttcagacccctaacacatttccaaaaaggaagaaaggagaaaaaagggcatcatccccattccgaagggtcagggaggaggaaattgaggtggattcacgagttgcggacaactcctttgatgccaagcgaggtgcagccggagactggggagagcgagccaatcaggttttgaagttcaccaaaggcaagtcctttcggcatgagaaaaccaagaagaagcggggcagctaccggggaggctcaatctctgtccaggtcaattctattaagtttgacagcgagtgacctgaggccatcttcggtgaagcaagggtgatgatcggagactacttactttctccagtggacctgggaaccctcaggtctctaggtgagggtcttgatgaggacagaagtttagagtaggtcctaagactttacagtgtaacatcctctctggtccttttctgtgttcctagttttgtacagacttgtttttgagtgttgagtagcagggacaaaataagggaatgttattttttaagaaaattcattttcattgttgtctccttccttttctgtgaaagtcctcatactgagaaatttgtatattttatattaaatcacttactattgatttttgttgtgattttcaaaggtggattcccacagataaaatcttggctattgcccaaaacatagtaaagggtcacgtgtgactttttataataggaagaaaattctgcctttgtgagtgcacatgtccacatttcatccctccttccctcaaaaccctagagaggggcattaaagaattgttgatgtatatgcaatgtctgttaagcatgcactatgtatttcatcctcatttattgggtctgggactgaagtttttagccagcatggacctaacctactttttgggataaaattctctgttttgttacaggcaaaattctggtatggcgtgaatgccatgggtcattctgaatatatttttttctgtaattttatcattacacgatgtttgcaatacgtgctttgttttttaatttgaaagcaaacttttctactgttgaaagacattttttgacaacttgacccttcctagtattgagttctaagttgaggactgcatcttctcgttttttacagtatagagaacaaaatgacatgagtttgaaaaatacatatcacttggtattgctgtcttggttgcagtggtgatacagaattggtttcattaattcctacatggttgagaatcactgatcaagaaagtggggggaaaaaaaacaaacgttaaaacctcaatcctcagtaggaaggtagattacattaggtgaaattataggtaatctatgtatgtgctaatggggttggaaagaaccttacagagcatattacctgataaactggagtgggtttgggagaacaaactaataggattattgtgtctcctagttggtacctgggagcaattgacatgcccccttcagaaccttaactgttagtagcagtggctgtaacaacacaaaccagtgaccagagataacagcttttaggccaagctggcctgacggtatggctgcaggaagtgactgagcagtagcggtactcagccagaccaagacggagagggaagagtccacagctttctggaagctaaggcattctggtggtagaaaagtgtgccccaagccttcatggacgagttataggtcttaagattagtctcctcttgtttggattccatacttgctaaataacctgataataacctggttttccatgtaactgcctctaggaagaaaatgtactgttcatgctgacacagatatttcagtctgcatggtaaaagttctaaatcttactacaaaataataaactggctggtttataatgtgaaaaaaaaaaagaaaaaaaaaaaaaaaaaaaaaaaaaaaaaaaaaaaaaaaaaaacaaaaaacaaaaaaaaaaagaaaaaaaaaagaagaaaaagaaaaacaaaaagaaaaaacaaaaaaaacaagaacaagagaggaggcagcgcagacagacacacaaaacaggacaaggagaagacgagacagcgaaaaaagccaagcgaagaacaggaaaagaagcagcacacaactacataacaccgactcaaccaaataatgaagagcgcggaccggacgaagcagcaacacaacaatagcagcaaagcaggagagacaaagcaaaacaacaagaaaacagaaaataaaaagaaaagactaaacacacaaaacacaagaaccaaaaaacacaaaagcaaagaaaacaaaaaagaagaaaagaaaagtagacacacaacaaagacaaccaaaaaacaagaaagagaaagaaaagaaaaaaaaaaaaaaaaaaagaacaaagaaaaaaagagacgaagacaaaagcaatccagcagagaaaaaaaaaaataaaaactaaaaaaagagaaagaaaacaaaagagacaaaaaaaaaagagaaaaaaaacaagaacaaaaaaaacagcaaaagaaaaagaaaacgacagaaaaaaagaaaagaaaaaaaggcaagagaagagaaggaaagaagaaagacaaaacgacaaagacagaaaacgagcaacaacgacacagagaaagaagagaagacgcaagaaggaagaaaacagaaagaaaaacaaccacgagagagacagaagcaacaagagaaacaaaaaaagggaaacaaacaaaacacggaccacaagacacgcaaaaagaacgaagaggagacaaacacaaaacccaccacggaaagcagagaagacg

SEQ ID NO: 306241 - DNA, 4847 bp, Homo sapiens
aaccaagatggcgatacgcgtgggaccggaaagagtttatagatttcccgtctaccctacctctgaggtgaaggtgggactgccctgtggagcccaccctttccgttatgcgcccgcgcggcgcaatgacgtaacacaggcccgcccactgcccctgttgaattcgtgggtcgtgctgcgtcgacaacggtagtgacgcgtattgcctggaggatggcggacgccggcattcgccgcgtggttcccagcgacctgtatcccctcgtgctcggcttcctgcgcgataaccaactctcagaggtggccaataagttcgccaaagcgacaggagctacacagcaggatgccaatgcctcttccctcttagacatctatagcttctggctcaacaggtctgccaaggtcccagagcgaaagttacaggcaaatggaccagtggctaagaaagctaagaagaaggcctcatccagtgacagtgaggacagcagcgaggaggaggaggaagttcaagggcctccagcaaagaaggctgctgtacctgccaagcgagtcggtctgcctcctgggaaggctgcagccaaagcatcagagagtagcagcagtgaagagtccagtgatgatgatgatgaggaggaccaaaagaaacagcctgtccagaagggagttaagccccaagccaaggcagccaaagctcctcctaagaaggccaagagctctgattctgattctgactcaagctccgaggatgagccaccaaagaaccagaagccaaagataacacctgtgacagttaaagctcagactaaagcccctcccaaaccagctcgagcagcacctaaaatagccaatggtaaagcagccagtagcagcagtagcagcagcagcagcagtagcagtgatgactcagaggaggagaaggcagcagccacccccaagaagactgtacctaaaaagcaagttgtggccaaggccccagtgaaagcagctaccacccctacccggaagagttctagcagtgaggattcctccagtgacgaggaagaggagcaaaaaaaacccatgaaaaataaaccaggtccctacagttcagtccccccgccttctgctcccccaccaaagaagtctctgggaacccagcctcccaagaaggctgtggagaagcagcagcctgtggaaagcagtgaagacagcagtgatgagtctgattcaagttctgaagaagagaagaaacccccaactaaggcagtagtctctaaagcaaccactaaaccacctccagcaaagaaagcagcagagagctcttcagacagctcagactctgacagctctgaggatgatgaagctccttctaagccagctggtaccaccaagaattcttcaaataagccagctgtcaccaccaagtcacctgcagtgaagccagctgcagcccccaagcaacctgtgggcggtggccagaagcttctgacgagaaaggctgacagcagctccagtgaggaagagagcagctccagtgaggaggagaagacaaagaagatggtggccaccactaagcccaaggcgactgccaaagcagctctatctctgcctgccaagcaggctcctcagggtagtagggacagcagctctgattcagacagctccagcagtgaggaggaggaagagaagacatctaagtctgcagttaagaagaagccacagaaggtagcaggaggtgcagccccttccaagccagcctctgcaaagaaaggaaaggctgagagcagcaacagttcttcttctgatgactccagtgaggaagaggaagagaagctcaagggcaagggctctccaagaccacaagcccccaaggccaatggcacctctgcactgactgcccagaatggaaaagcagctaagaacagtgaggaggaggaagaagaaaagaaaaaggcggcagtggtagtttccaaatcaggttcattaaagaagcggaagcagaatgaggctgccaaggaggcagagactcctcaggccaagaagataaagcttcagacccctaacacatttccaaaaaggaagaaaggagaaaaaagggcatcatccccattccgaagggtcagggaggaggaaattgaggtggattcacgagttgcggacaactcctttgatgccaagcgaggtgcagccggagactggggagagcgagccaatcaggttttgaagttcaccaaaggcaagtcctttcggcatgagaaaaccaagaagaagcggggcagctaccggggaggctcaatctctgtccaggtcaattctattaagtttgacagcgagtgacctgaggccatcttcggtgaagcaagggtgatgatcggagactacttactttctccagtggacctgggaaccctcaggtctctaggtgagggtcttgatgaggacagaagtttagagtaggtcctaagactttacagtgtaacatcctctctggtccttttctgtgttcctagttttgtacagacttgtttttgagtgttgagtagcagggacaaaataagggaatgttattttttaagaaaattcattttcattgttgtctccttccttttctgtgaaagtcctcatactgagaaatttgtatattttatattaaatcacttactattgatttttgttgtgattttcaaaggtggattcccacagataaaatcttggctattgcccaaaacatagtaaagggtcacgtgtgactttttataataggaagaaaattctgcctttgtgagtgcacatgtccacatttcatccctccttccctcaaaaccctagagaggggcattaaagaattgttgatgtatatgcaatgtctgttaagcatgcactatgtatttcatcctcatttattgggtctgggactgaagtttttagccagcatggacctaacctactttttgggataaaattctctgttttgttacaggcaaaattctggtatggcgtgaatgccatgggtcattctgaatatatttttttctgtaattttatcattacacgatgtttgcaatacgtgctttgttttttaatttgaaagcaaacttttctactgttgaaagacattttttgacaacttgacccttcctagtattgagttctaagttgaggactgcatcttctcgttttttacagtatagagaacaaaatgacatgagtttgaaaaatacatatcacttggtattgctgtcttggttgcagtggtgatacagaattggtttcattaattcctacatggttgagaatcactgatcaagaaagtggggggaaaaaaaacaaacgttaaaacctcaatcctcagtaggaaggtagattacattaggtgaaattataggtaatctatgtatgtgctaatggggttggaaagaaccttacagagcatattacctgataaactggagtgggtttgggagaacaaactaataggattattgtgtctcctagttggtacctgggagcaattgacatgcccccttcagaaccttaactgttagtagcagtggctgtaacaacacaaaccagtgaccagagataacagcttttaggccaagctggcctgacggtatggctgcaggaagtgactgagcagtagcggtactcagccagaccaagacggagagggaagagtccacagctttctggaagctaaggcattctggtggtagaaaagtgtgccccaagccttcatggacgagttataggtcttaagattagtctcctcttgtttggattccatacttgctaaataacctgataataacctggttttccatgtaactgcctctaggaagaaaatgtactgttcatgctgacacagatatttcagtctgcatggtaaaagttctaaatcttactacaaaataataaactggctggtttataatgtgtaaaacctgggcctggtttaaacaacacaaaaaaaaaaagaaaaaaaaaaaaaaaaaaaaaaaaaaaaaaaaaaaaaaaaaaacaaaaaacaaaaaaaaaaagaaaaaaaaaagaagaaaaagaaaaacaaaaagaaaaaacaaaaaaaacaagaacaagagaggaggcagcgcagacagacacacaaaacaggacaaggagaagacgagacagcgaaaaaagccaagcgaagaacaggaaaagaagcagcacacaactacataacaccgactcaaccaaataatgaagagcgcggaccggacgaagcagcaacacaacaatagcagcaaagcaggagagacaaagcaaaacaacaagaaaacagaaaataaaaagaaaagactaaacacacaaaacacaagaaccaaaaaacacaaaagcaaagaaaacaaaaaagaagaaaagaaaagtagacacacaacaaagacaaccaaaaaacaagaaagagaaagaaaagaaaaaaaaaaaaaaaaaaagaacaaagaaaaaaagagacgaagacaaaagcaatccagcagagaaaaaaaaaaataaaaactaaaaaaagagaaagaaaacaaaagagacaaaaaaaaaagagaaaaaaaacaagaacaaaaaaaacagcaaaagaaaaagaaaacgacagaaaaaaagaaaagaaaaaaaggcaagagaagagaaggaaagaagaaagacaaaacgacaaagacagaaaacgagcaacaacgacacagagaaagaagagaagacgcaagaaggaagaaaacagaaagaaaaacaaccacgagagagacagaagcaacaagagaaacaaaaaaagggaaacaaacaaaacacggaccacaagacacgcaaaaagaacgaagaggagacaaacacaaaacccaccacggaaagcagagaagacg

SEQ ID NO: 306242 - DNA, 2467 bp, Homo sapiens
ctcagtggccacctccttctcaagcaaagtgggcccacgcagccagagaggacagccttcctgagtaatcctcagcccctgattttgcaaacctgaagcactatcaaaaacagcagagtcttccaagtttatgcagcacttctgacccagacacacctcttggggccccgagcagctctgattcagacagctccagcagtgaggaggaggaagagaagacatctaagtctgcagttaagaagaagccacagaaggtagcaggaggtgcagccccttccaagccagcctctgcaaagaaaggaaaggctgagagcagcaacagttcttcttctgatgactccagtgaggaagaggaagagaagctcaagggcaagggctctccaagaccacaagcccccaaggccaatggcacctctgcactgactgcccagaatggaaaagcagctaagaacagtgaggaggaggaagaagaaaagaaaaaggcggcagtggtagtttccaaatcaggttcattaaagaagcggaagcagaatgaggctgccaaggaggcagagactcctcaggccaagaagataaagcttcagacccctaacacatttccaaaaaggaagaaaggagaaaaaagggcatcatccccattccgaagggtcagggaggaggaaattgaggtggattcacgagttgcggacaactcctttgatgccaagcgaggtgcagccggagactggggagagcgagccaatcaggttttgaagttcaccaaaggcaagtcctttcggcatgagaaaaccaagaagaagcggggcagctaccggggaggctcaatctctgtccaggtcaattctattaagtttgacagcgagtgacctgaggccatcttcggtgaagcaagggtgatgatcggagactacttactttctccagtggacctgggaaccctcaggtctctaggtgagggtcttgatgaggacagaagtttagagtaggtcctaagactttacagtgtaacatcctctctggtccttttctgtgttcctagttttgtacagacttgtttttgagtgttgagtagcagggacaaaataagggaatgttattttttaagaaaattcattttcattgttgtctccttccttttctgtgaaagtcctcatactgagaaatttgtatattttatattaaatcacttactattgatttttgttgtgattttcaaaggtggattcccacagataaaatcttggctattgcccaaaacatagtaaagggtcacgtgtgactttttataataggaagaaaattctgcctttgtgagtgcacatgtccacatttcatccctccttccctcaaaaccctagagaggggcattaaagaattgttgatgtatatgcaatgtctgttaagcatgcactatgtatttcatcctcatttattgggtctgggactgaagtttttagccagcatggacctaacctactttttgggataaaattctctgttttgttacaggcaaaattctggtatggcgtgaatgccatgggtcattctgaatatatttttttctgtaattttatcattacacgatgtttgcaatacgtgctttgttttttaatttgaaagcaaacttttctactgttgaaagacattttttgacaacttgacccttcctagtattgagttctaagttgaggactgcatcttctcgttttttacagtatagagaacaaaatgacatgagtttgaaaaatacatatcacttggtattgctgtcttggttgcagtggtgatacagaattggtttcattaattcctacatggttgagaatcactgatcaagaaagtggggggaaaaaaaacaaacgttaaaacctcaatcctcagtaggaaggtagattacattaggtgaaattataggtaatctatgtatgtgctaatggggttggaaagaaccttacagagcatattacctgataaactggagtgggtttgggagaacaaactaataggattattgtgtctcctagttggtacctgggagcaattgacatgcccccttcagaaccttaactgttagtagcagtggctgtaacaacacaaaccagtgaccagagataacagcttttaggccaagctggcctgacggtatggctgcaggaagtgactgagcagtagcggtactcagccagaccaagacggagagggaagagtccacagctttctggaagctaaggcattctggtggtagaaaagtgtgccccaagccttcatggacgagttataggtcttaagattagtctcctcttgtttggattccatacttgctaaataacctgataataacctggttttccatgtaactgcctctaggaagaaaatgtactgttcatgctgacacagatatttcagtctgcatggtaaaagttctaaatcttactacaaaataataaactggctggtttataatgtg

SEQ ID NO: 306243 - DNA, 3826 bp, Homo sapiens
aaccaagatggcgatacgcgtgggaccggaaagagtttatagatttcccgtctaccctacctctgaggtgaaggtgggactgccctgtggagcccaccctttccgttatgcgcccgcgcggcgcaatgacgtaacacaggcccgcccactgcccctgttgaattcgtgggtcgtgctgcgtcgacaacggtagtgacgcgtattgcctggaggatggcggacgccggcattcgccgcgtggttcccagcgacctgtatcccctcgtgctcggcttcctgcgcgataaccaactctcagaggtggccaataagttcgccaaagcgacaggagctacacagcaggatgccaatgcctcttccctcttagacatctatagcttctggctcaacaggtctgccaaggtcccagagcgaaagttacaggcaaatggaccagtggctaagaaagctaagaagaaggcctcatccagtgacagtgaggacagcagcgaggaggaggaggaagttcaagggcctccagcaaagaaggctgctgtacctgccaagcgagtcggtctgcctcctgggaaggctgcagccaaagcatcagagagtagcagcagtgaagagtccagtgatgatgatgatgaggaggaccaaaagaaacagcctgtccagaagggagttaagccccaagccaaggcagccaaagctcctcctaagaaggccaagagctctgattctgattctgactcaagctccgaggatgagccaccaaagaaccagaagccaaagataacacctgtgacagttaaagctcagactaaagcccctcccaaaccagctcgagcagcacctaaaatagccaatggtaaagcagccagtagcagcagtagcagcagcagcagcagtagcagtgatgactcagaggaggagaaggcagcagccacccccaagaagactgtacctaaaaagcaagttgtggccaaggccccagtgaaagcagctaccacccctacccggaagagttctagcagtgaggattcctccagtgacgaggaagaggagcaaaaaaaacccatgaaaaataaaccaggtccctacagttcagtccccccgccttctgctcccccaccaaagaagtctctgggaacccagcctcccaagaaggctgtggagaagcagcagcctgtggaaagcagtgaagacagcagtgatgagtctgattcaagttctgaagaagagaagaaacccccaactaaggcagtagtctctaaagcaaccactaaaccacctccagcaaagaaagcagcagagagctcttcagacagctcagactctgacagctctgaggatgatgaagctccttctaagccagctggtaccaccaagaattcttcaaataagccagctgtcaccaccaagtcacctgcagtgaagccagctgcagcccccaagcaacctgtgggcggtggccagaagcttctgacgagaaaggctgacagcagctccagtgaggaagagagcagctccagtgaggaggagaagacaaagaagatggtggccaccactaagcccaaggcgactgccaaagcagctctatctctgcctgccaagcaggctcctcagggtagtagggacagcagctctgattcagacagctccagcagtgaggaggaggaagagaagacatctaagtctgcagttaagaagaagccacagaaggtagcaggaggtgcagccccttccaagccagcctctgcaaagaaaggaaaggctgagagcagcaacagttcttcttctgatgactccagtgaggaagaggaagagaagctcaagggcaagggctctccaagaccacaagcccccaaggccaatggcacctctgcactgactgcccagaatggaaaagcagctaagaacagtgaggaggaggaagaagaaaagaaaaaggcggcagtggtagtttccaaatcaggttcattaaagaagcggaagcagaatgaggctgccaaggaggcagagactcctcaggccaagaagataaagcttcagacccctaacacatttccaaaaaggaagaaaggagaaaaaagggcatcatccccattccgaagggtcagggaggaggaaattgaggtggattcacgagttgcggacaactcctttgatgccaagcgaggtgcagccggagactggggagagcgagccaatcaggttttgaagttcaccaaaggcaagtcctttcggcatgagaaaaccaagaagaagcggggcagctaccggggaggctcaatctctgtccaggtcaattctattaagtttgacagcgagtgacctgaggccatcttcggtgaagcaagggtgatgatcggagactacttactttctccagtggacctgggaaccctcaggtctctaggtgagggtcttgatgaggacagaagtttagagtaggtcctaagactttacagtgtaacatcctctctggtccttttctgtgttcctagttttgtacagacttgtttttgagtgttgagtagcagggacaaaataagggaatgttattttttaagaaaattcattttcattgttgtctccttccttttctgtgaaagtcctcatactgagaaatttgtatattttatattaaatcacttactattgatttttgttgtgattttcaaaggtggattcccacagataaaatcttggctattgcccaaaacatagtaaagggtcacgtgtgactttttataataggaagaaaattctgcctttgtgagtgcacatgtccacatttcatccctccttccctcaaaaccctagagaggggcattaaagaattgttgatgtatatgcaatgtctgttaagcatgcactatgtatttcatcctcatttattgggtctgggactgaagtttttagccagcatggacctaacctactttttgggataaaattctctgttttgttacaggcaaaattctggtatggcgtgaatgccatgggtcattctgaatatatttttttctgtaattttatcattacacgatgtttgcaatacgtgctttgttttttaatttgaaagcaaacttttctactgttgaaagacattttttgacaacttgacccttcctagtattgagttctaagttgaggactgcatcttctcgttttttacagtatagagaacaaaatgacatgagtttgaaaaatacatatcacttggtattgctgtcttggttgcagtggtgatacagaattggtttcattaattcctacatggttgagaatcactgatcaagaaagtggggggaaaaaaaacaaacgttaaaacctcaatcctcagtaggaaggtagattacattaggtgaaattataggtaatctatgtatgtgctaatggggttggaaagaaccttacagagcatattacctgataaactggagtgggtttgggagaacaaactaataggattattgtgtctcctagttggtacctgggagcaattgacatgcccccttcagaaccttaactgttagtagcagtggctgtaacaacacaccaagacggagagggaagagtccacagctttctggaagctaaggcattctggtggtagaaaagtgtgccccaagccttcatggacgagttataggtcttaagattagtctcctcttgtttggattccatacttgctaaataacctgataataacctggttttccatgtaactgcctctaggaagaaaatgtactgttcatgctgacacagatatttcagtctgcatggtaaaagttctaaatcttactacaaaataataaactggctggtttataatgtg

SEQ ID NO: 306244 - DNA, 3481 bp, Homo sapiens
aaccaagatggcgatacgcgtgggaccggaaagagtttatagatttcccgtctaccctacctctgaggtgaaggtgggactgccctgtggagcccaccctttccgttatgcgcccgcgcggcgcaatgacgtaacacaggcccgcccactgcccctgttgaattcgtgggtcgtgctgcgtcgacaacggtagtgacgcgtattgcctggaggatggcggacgccggcattcgccgcgtggttcccagcgacctgtatcccctcgtgctcggcttcctgcgcgataaccaactctcagaggtggccaataagttcgccaaagcgacaggagctacacagcaggatgccaatgcctcttccctcttagacatctatagcttctggctcaacaggtctgccaaggtcccagagcgaaagttacaggcaaatggaccagtggctaagaaagctaagaagaaggcctcatccagtgacagtgaggacagcagcgaggaggaggaggaagttcaagggcctccagcaaagaaggctgctgtacctgccaagcgagtcggtctgcctcctgggaaggctgcagccaaagcatcagagagtagcagcagtgaagagtccagtgatgatgatgatgaggaggaccaaaagaaacagcctgtccagaagggagttaagccccaagccaaggcagccaaagctcctcctaagaaggccaagagctctgattctgattctgactcaagctccgaggatgagccaccaaagaaccagaagccaaagataacacctgtgacagttaaagctcagactaaagcccctcccaaaccagctcgagcagcacctaaaatagccaatggtaaagcagccagtagcagcagtagcagcagcagcagcagtagcagtgatgactcagaggaggagaaggcagcagccacccccaagaagactgtacctaaaaagcaagttgtggccaaggccccagtgaaagcagctaccacccctacccggaagagttctagcagtgaggattcctccagtgacgaggaagaggagcaaaaaaaacccatgaaaaataaaccaggtccctacagttcagtccccccgccttctgctcccccaccaaagaagtctctgggaacccagcctcccaagaaggctgtggagaagcagcagcctgtggaaagcagtgaagacagcagtgatgagtctgattcaagttctgaagaagagaagaaacccccaactaaggcagtagtctctaaagcaaccactaaaccacctccagcaaagaaagcagcagagagctcttcagacagctcagactctgacagctctgaggatgatgaagctccttctaagccagctggtaccaccaagaattcttcaaataagccagctgtcaccaccaagtcacctgcagtgaagccagctgcagcccccaagcaacctgtgggcggtggccagaagcttctgacgagaaaggctgacagcagctccagtgaggaagagagcagctccagtgaggaggagaagacaaagaagatggtggccaccactaagcccaaggcgactgccaaagcagctctatctctgcctgccaagcaggctcctcagggtagtagggacagcagctctgattcagacagctccagcagtgaggaggaggaagagaagacatctaagtctgcagttaagaagaagccacagaaggtagcaggaggtgcagccccttccaagccagcctctgcaaagaaaggaaaggctgagagcagcaacagttcttcttctgatgactccagtgaggaagaggaagagaagctcaagggcaagggctctccaagaccacaagcccccaaggccaatggcacctctgcactgactgcccagaatggaaaagcagctaagaacagtgaggaggaggaagaagaaaagaaaaaggcggcagtggtagtttccaaatcaggttcattaaagaagcggaagcagaatgaggctgccaaggaggcagagactcctcaggccaagaagataaagcttcagacccctaacacatttccaaaaaggaagaaaggagaaaaaagggcatcatccccattccgaagggtcagggaggaggaaattgaggtggattcacgagttgcggacaactcctttgatgccaagcgaggtgcagccggagactggggagagcgagccaatcaggttttgaagttcaccaaaggcaagtcctttcggcatgagaaaaccaagaagaagcggggcagctaccggggaggctcaatctctgtccaggtcaattctattaagtttgacagcgagtgacctgaggccatcttcggtgaagcaagggtgatgatcggagactacttactttctccagtggacctgggaaccctcaggtctctaggtgagggtcttgatgaggacagaagtttagagtaggtcctaagactttacagtgtaacatcctctctggtccttttctgtgttcctagttttgtacagacttgtttttgagtgttgagtagcagggacaaaataagggaatgttattttttaagaaaattcattttcattgttgtctccttccttttctgtgaaagtcctcatactgagaaatttgtatattttatattaaatcacttactattgatttttgttgtgattttcaaaggtggattcccacagataaaatcttggctattgcccaaaacatagtaaagggtcacgtgtgactttttataataggaagaaaattctgcctttgtgagtgcacatgtccacatttcatccctccttccctcaaaaccctagagaggggcattaaagaattgttgatgtatatgcaatgtctgttaagcatgcactatgtatttcatcctcatttattgggtctgggactgaagtttttagccagcatggacctaacctactttttgggataaaattctctgttttgttacaggcaaaattctggtatggcgtgaatgccatgggtcattctgaatatatttttttctgtaattttatcattacacgatgtttgcaatacgtgctttgttttttaatttgaaagcaaacttttctactgttgaaagacattttttgacaacttgacccttcctagtattgagttctaagttgaggactgcatcttctcgttttttacagtatagagaacaaaatgacatgagtttgaaaaatacatatcacttggtattgctgtcttggttgcagtggtgatacagaattggtttcattaattcctacatggttgagaatcactgatcaagaaagtggggggaaaaaaaacaaacgttaaaacctcaatcctcagtaggaaggtagattacattaggtgaaattataggtaatctatgtatgtgctaatggggttggaaagaaccttacagagcatattacctgataaactggatagggcttgtgttttagggtatcgttcggagcccccttggtgccgagctcg

SEQ ID NO: 306245 - DNA, 2381 bp, Homo sapiens
attaacaagaaattctgcagcatatgtttcaagggaagcactagggggagctccattttagacaggagaaaagcatgagaagtcttacatatatcatgtagtgatgtcacataggcagttggattatagcatatgactatatgtcatttactccatatagtaaccagtaacctccacagtatggaagttagcaaagaggactaggttggaaatataactggggagttgtcagttcatgggtgctatttaaagctacaagactgcatgagctcaccaaaggaatgagttagacaatgtagaaaagaggtttaaggacagacttttggagtactccaatgtcaagagaatggaaaagcagctaagaacagtgaggaggaggaagaagaaaagaaaaaggcggcagtggtagtttccaaatcaggttcattaaagaagcggaagcagaatgaggctgccaaggaggcagagactcctcaggccaagaagataaagcttcagacccctaacacatttccaaaaaggaagaaaggagaaaaaagggcatcatccccattccgaagggtcagggaggaggaaattgaggtggattcacgagttgcggacaactcctttgatgccaagcgaggtgcagccggagactggggagagcgagccaatcaggttttgaagttcaccaaaggcaagtcctttcggcatgagaaaaccaagaagaagcggggcagctaccggggaggctcaatctctgtccaggtcaattctattaagtttgacagcgagtgacctgaggccatcttcggtgaagcaagggtgatgatcggagactacttactttctccagtggacctgggaaccctcaggtctctaggtgagggtcttgatgaggacagaagtttagagtaggtcctaagactttacagtgtaacatcctctctggtccttttctgtgttcctagttttgtacagacttgtttttgagtgttgagtagcagggacaaaataagggaatgttattttttaagaaaattcattttcattgttgtctccttccttttctgtgaaagtcctcatactgagaaatttgtatattttatattaaatcacttactattgatttttgttgtgattttcaaaggtggattcccacagataaaatcttggctattgcccaaaacatagtaaagggtcacgtgtgactttttataataggaagaaaattctgcctttgtgagtgcacatgtccacatttcatccctccttccctcaaaaccctagagaggggcattaaagaattgttgatgtatatgcaatgtctgttaagcatgcactatgtatttcatcctcatttattgggtctgggactgaagtttttagccagcatggacctaacctactttttgggataaaattctctgttttgttacaggcaaaattctggtatggcgtgaatgccatgggtcattctgaatatatttttttctgtaattttatcattacacgatgtttgcaatacgtgctttgttttttaatttgaaagcaaacttttctactgttgaaagacattttttgacaacttgacccttcctagtattgagttctaagttgaggactgcatcttctcgttttttacagtatagagaacaaaatgacatgagtttgaaaaatacatatcacttggtattgctgtcttggttgcagtggtgatacagaattggtttcattaattcctacatggttgagaatcactgatcaagaaagtggggggaaaaaaaacaaacgttaaaacctcaatcctcagtaggaaggtagattacattaggtgaaattataggtaatctatgtatgtgctaatggggttggaaagaaccttacagagcatattacctgataaactggagtgggtttgggagaacaaactaataggattattgtgtctcctagttggtacctgggagcaattgacatgcccccttcagaaccttaactgttagtagcagtggctgtaacaacacaaaccagtgaccagagataacagcttttaggccaagctggcctgacggtatggctgcaggaagtgactgagcagtagcggtactcagccagaccaagacggagagggaagagtccacagctttctggaagctaaggcattctggtggtagaaaagtgtgccccaagccttcatggacgagttataggtcttaagattagtctcctcttgtttggattccatacttgctaaataacctgataataacctggttttccatgtaactgcctctaggaagaaaatgtactgttcatgctgacacagatatttcagtctgcatggtaaaagttctaaatcttactacaaaataataaactggctggtttataatgtg

SEQ ID NO: 306246 - DNA, 3570 bp, Homo sapiens
aaccaagatggcgatacgcgtgggaccggaaagagtttatagatttcccgtctaccctacctctgaggtgaaggtgggactgccctgtggagcccaccctttccgttatgcgcccgcgcggcgcaatgacgtaacacaggcccgcccactgcccctgttgaattcgtgggtcgtgctgcgtcgacaacggtagtgacgcgtattgcctggaggatggcggacgccggcattcgccgcgtggttcccagcgacctgtatcccctcgtgctcggcttcctgcgcgataaccaactctcagaggtggccaataagttcgccaaagcgacaggagctacacagcaggatgccaatgcctcttccctcttagacatctatagcttctggctcaacaggtctgccaaggtcccagagcgaaagttacaggcaaatggaccagtggctaagaaagctaagaagaaggcctcatccagtgacagtgaggacagcagcgaggaggaggaggaagttcaagggcctccagcaaagaaggctgctgtacctgccaagcgagtcggtctgcctcctgggaaggctgcagccaaagcatcagagagtagcagcagtgaagagtccagtgatgatgatgatgaggaggaccaaaagaaacagcctgtccagaagggagttaagccccaagccaaggcagccaaagctcctcctaagaaggccaagagctctgattctgattctgactcaagctccgaggatgagccaccaaagaaccagaagccaaagataacacctgtgacagttaaagctcagactaaagcccctcccaaaccagctcgagcagcacctaaaatagccaatggtaaagcagccagtagcagcagtagcagcagcagcagcagtagcagtgatgactcagaggaggagaaggcagcagccacccccaagaagactgtacctaaaaagcaagttgtggccaaggccccagtgaaagcagctaccacccctacccggaagagttctagcagtgaggattcctccagtgacgaggaagaggagcaaaaaaaacccatgaaaaataaaccaggtccctacagttcagtccccccgccttctgctcccccaccaaagaagtctctgggaacccagcctcccaagaaggctgtggagaagcagcagcctgtggaaagcagtgaagacagcagtgatgagtctgattcaagttctgaagaagagaagaaacccccaactaaggcagtagtctctaaagcaaccactaaaccacctccagcaaagaaagcagcagagagctcttcagacagctcagactctgacagctctgaggatgatgaagctccttctaagccagctggtaccaccaagaattcttcaaataagccagctgtcaccaccaagtcacctgcagtgaagccagctgcagcccccaagcaacctgtgggcggtggccagaagcttctgacgagaaaggctgacagcagctccagtgaggaagagagcagctccagtgaggaggagaagacaaagaagatggtggccaccactaagcccaaggcgactgccaaagcagctctatctctgcctgccaagcaggctcctcagggtagtagggacagcagctctgattcagacagctccagcagtgaggaggaggaagagaagacatctaagtctgcagttaagaagaagccacagaaggtagcaggaggtgcagccccttccaagccagcctctgcaaagaaaggaaaggctgagagcagcaacagttcttcttctgatgactccagtgaggaagaggaagagaagctcaagggcaagggctctccaagaccacaagcccccaaggccaatggcacctctgcactgactgcccagaatggaaaagcagctaagaacagtgaggaggaggaagaagaaaagaaaaaggcggcagtggtagtttccaaatcaggttcattaaagaagcggaagcagaatgaggctgccaaggaggcagagactcctcaggccaagaagataaagcttcagacccctaacacatttccaaaaaggaagaaaggagaaaaaagggcatcatccccattccgaagggtcagggaggaggaaattgaggtggattcacgagttgcggacaactcctttgatgccaagcgaggtgcagccggagactggggagagcgagccaatcaggttttgaagttcaccaaaggcaagtcctttcggcatgagaaaaccaagaagaagcggggcagctaccggggaggctcaatctctgtccaggtcaattctattaagtttgacagcgagtgacctgaggccatcttcggtgaagcaagggtgatgatcggagactacttactttctccagtggacctgggaaccctcaggtctctaggtgagggtcttgatgaggacagaagtttagagtaggtcctaagactttacagtgtaacatcctctctggtccttttctgtgttcctagttttgtacagacttgtttttgagtgttgagtagcagggacaaaataagggaatgttattttttaagaaaattcattttcattgttgtctccttccttttctgtgaaagtcctcatactgagaaatttgtatattttatattaaatcacttactattgatttttgttgtgattttcaaaggtggattcccacagataaaatcttggctattgcccaaaacatagtaaagggtcacgtgtgactttttataataggaagaaaattctgcctttgtgagtgcacatgtccacatttcatccctccttccctcaaaaccctagagaggggcattaaagaattgttgatgtatatgcaatgtctgttaagcatgcactatgtatttcatcctcatttattgggtctgggactgaagtttttagccagcatggacctaacctactttttgggataaaattctctgttttgttacaggcaaaattctggtatggcgtgaatgccatgggtcattctgaatatatttttttctgtaattttatcattacacgatgtttgcaatacgtgctttgttttttaatttgaaagcaaacttttctactgttgaaagacattttttgacaacttgacccttcctagtattgagttctaagttgaggactgcatcttctcgttttttacagtatagagaacaaaatgacatgagtttgaaaaatacatatcacttggtattgctgtcttggttgcagtggtgatacagaattggtttcattaattcctacatggttgagaatcactgatcaagaaagtgggggtgaaattataggtaatctatgtatgtgctaatggggttggaaagaaccttacagagcatattacctgataaactggagtgggtttgggagaacaaactaataggattattgtgtctcctagttggtacctgggagcaattgacatgcccccttcagaaccttaactgttagtagcagtggctgtaacaacacgccaaacacacccctgtccccagacagcatttatggcacactctcctctccggtttcttcccggacttagccccgggcttc

SEQ ID NO: 306247 - DNA, 4047 bp, Homo sapiens
aaccaagatggcgatacgcgtgggaccggaaagagtttatagatttcccgtctaccctacctctgaggtgaaggtgggactgccctgtggagcccaccctttccgttatgcgcccgcgcggcgcaatgacgtaacacaggcccgcccactgcccctgttgaattcgtgggtcgtgctgcgtcgacaacggtagtgacgcgtattgcctggaggatggcggacgccggcattcgccgcgtggttcccagcgacctgtatcccctcgtgctcggcttcctgcgcgataaccaactctcagaggtggccaataagttcgccaaagcgacaggagctacacagcaggatgccaatgcctcttccctcttagacatctatagcttctggctcaacaggtctgccaaggtcccagagcgaaagttacaggcaaatggaccagtggctaagaaagctaagaagaaggcctcatccagtgacagtgaggacagcagcgaggaggaggaggaagttcaagggcctccagcaaagaaggctgctgtacctgccaagcgagtcggtctgcctcctgggaaggctgcagccaaagcatcagagagtagcagcagtgaagagtccagtgatgatgatgatgaggaggaccaaaagaaacagcctgtccagaagggagttaagccccaagccaaggcagccaaagctcctcctaagaaggccaagagctctgattctgattctgactcaagctccgaggatgagccaccaaagaaccagaagccaaagataacacctgtgacagttaaagctcagactaaagcccctcccaaaccagctcgagcagcacctaaaatagccaatggtaaagcagccagtagcagcagtagcagcagcagcagcagtagcagtgatgactcagaggaggagaaggcagcagccacccccaagaagactgtacctaaaaagcaagttgtggccaaggccccagtgaaagcagctaccacccctacccggaagagttctagcagtgaggattcctccagtgacgaggaagaggagcaaaaaaaacccatgaaaaataaaccaggtccctacagttcagtccccccgccttctgctcccccaccaaagaagtctctgggaacccagcctcccaagaaggctgtggagaagcagcagcctgtggaaagcagtgaagacagcagtgatgagtctgattcaagttctgaagaagagaagaaacccccaactaaggcagtagtctctaaagcaaccactaaaccacctccagcaaagaaagcagcagagagctcttcagacagctcagactctgacagctctgaggatgatgaagctccttctaagccagctggtaccaccaagaattcttcaaataagccagctgtcaccaccaagtcacctgcagtgaagccagctgcagcccccaagcaacctgtgggcggtggccagaagcttctgacgagaaaggctgacagcagctccagtgaggaagagagcagctccagtgaggaggagaagacaaagaagatggtggccaccactaagcccaaggcgactgccaaagcagctctatctctgcctgccaagcaggctcctcagggtagtagggacagcagctctgattcagacagctccagcagtgaggaggaggaagagaagacatctaagtctgcagttaagaagaagccacagaaggtagcaggaggtgcagccccttccaagccagcctctgcaaagaaaggaaaggctgagagcagcaacagttcttcttctgatgactccagtgaggaagaggaagagaagctcaagggcaagggctctccaagaccacaagcccccaaggccaatggcacctctgcactgactgcccagaatggaaaagcagctaagaacagtgaggaggaggaagaagaaaagaaaaaggcggcagtggtagtttccaaatcaggttcattaaagaagcggaagcagaatgaggctgccaaggaggcagagactcctcaggccaagaagataaagcttcagacccctaacacatttccaaaaaggaagaaaggagaaaaaagggcatcatccccattccgaagggtcagggaggaggaaattgaggtggattcacgagttgcggacaactcctttgatgccaagcgaggtgcagccggagactggggagagcgagccaatcaggttttgaagttcaccaaaggcaagtcctttcggcatgagaaaaccaagaagaagcggggcagctaccggggaggctcaatctctgtccaggtcaattctattaagtttgacagcgagtgacctgaggccatcttcggtgaagcaagggtgatgatcggagactacttactttctccagtggacctgggaaccctcaggtctctaggtgagggtcttgatgaggacagaagtttagagtaggtcctaagactttacagtgtaacatcctctctggtccttttctgtgttcctagttttgtacagacttgtttttgagtgttgagtagcagggacaaaataagggaatgttattttttaagaaaattcattttcattgttgtctccttccttttctgtgaaagtcctcatactgagaaatttgtatattttatattaaatcacttactattgatttttgttgtgattttcaaaggtggattcccacagataaaatcttggctattgcccaaaacatagtaaagggtcacgtgtgactttttataataggaagaaaattctgcctttgtgagtgcacatgtccacatttcatccctccttccctcaaaaccctagagaggggcattaaagaattgttgatgtaaaaaaaaaaaagaaaaaaaaaaaaaaaaaaaaaaaaaaaaaaaaaaaaaaaaaaacaaaaaacaaaaaaaaaaagaaaaaaaaaagaagagaggggggggcgcccctcacactcttctgggggggggcacacatctgcgccgccccccagtattacgaaaaaggcgggcccccccagaagggaggcgataatacacaaccgggccggacggcggcgcgcggcaacaacaaccaacagaagacacagggcggaaaaaccgggccgcgcgggcgccctctgtgaggggaaacaggcacaaaaatcacggaggggggagcgggagaacagggggacacaaaaaaacaaaacgagaaaaaaaaaaacccagagaacaaaagacaaaaaaaaaaaaggaggaaaagaggcggagaccaaacgcacgaggtgacacccccgccgagacgcaacaagcaccgcggcaagagtacgacacacagacgcagacgagaaaaccatactcccacgcagggagcgcagcaagaagaaaccgcagaccgaaaccccccgaccgtgagcggaggagaggaggaggggcgaaagagagccgggacgcggagggggagagcggaggcgagagcgcagggacgcggaggagagggagcgaagaagcaagagacgagagagaagacagaagcggcgaggaggcggacgcggagcagaagcagagagggagaccaggcgggagcgcaacggacggagacagaagaagagagcgcagagagacgaagagagaagcgacagggcggagcacagcgcacacgaccgccacgcgagcgcagcgcagagggcgacgaccccgagccagcagagagggagaagaagaagcgacgcacgccgaccgcacgacacacaagcagcacaagacaggcgaacagccgcacgcacagaaccaacagacaaacgaccacagaggacgaacgcaggaggagacagcccaggaccaaggagcacacctgaaccagtacgacacagccccaagacacacgccccacaccacgaccaaccgacaccgacaccagaccacgccgacccccacgcccccacacgcacccagcaccagcacgcccacgccacctgaccaccagcagccggaccgcgcacgcaccaccccagcgcacaccacgcacgactacgcacacgcgaagcgcaagcagcgaacccacccaccacca

SEQ ID NO: 306248 - DNA, 1293 bp, Homo sapiens
aaccaagatggcgatacgcgtgggaccggaaagagtttatagatttcccgtctaccctacctctgaggtgaaggtgggactgccctgtggagcccaccctttccgttatgcgcccgcgcggcgcaatgacgtaacacaggcccgcccactgcccctgttgaattcgtgggtcgtgctgcgtcgacaacggtagtgacgcgtattgcctggaggatggcggacgccggcattcgccgcgtggttcccagcgacctgtatcccctcgtgctcggcttcctgcgcgataaccaactctcagaggtggccaataagttcgccaaagcgacaggagctacacagcaggatgccaatgcctcttccctcttagacatctatagcttctggctcaacaggtctgccaaggtcccagagcgaaagttacaggcaaatggaccagtggctaagaaagctaagaagaaggcctcatccagtgacagtgaggacagcagcgaggaggaggaggaagttcaagggcctccagcaaagaaggctgctgtacctgccaagcgagtcggtctgcctcctgggaaggctgcagccaaagcatcagagagtagcagcagtgaagagtccagtgatgatgatgatgaggaggaccaaaagaaacagcctgtccagaagggagttaagccccaagccaaggcagccaaagctcctcctaagaaggccaagagctctgattctgattctgactcaagctccgaggatgagccaccaaagaaccagaagccaaagataacacctgtgacagttaaagctcagactaaagcccctcccaaaccagctcgagcagcacctaaaatagccaatggtaaagcagccagtagcagcagtagcagcagcagcagcagtagcagtgatgactcagaggaggagaaggcagcagccacccccaagaagactgtacctaaaaagcaagttgtggccaaggccccagtgaaagcagctaccacccctacccggaagagttctagcagtgaggattcctccagtgacgaggaagaggagcaaaaaaaacccatgaaaaataaaccaggtccctacagttcagtccccccgccttctgctcccccaccaaagaagtctctgggaacccagcctcccaagaaggctgtggagaagcagcagcctgtggaaagcagtgaagacagcagtgatgagtctgactttctcttctacacgtcctttcctgaagtgtcgagtccagtcctttgttgctgttgctgtgctggtgctggttgctgttggcatctt

SEQ ID NO: 306249 - DNA, 1141 bp, Homo sapiens
aaccaagatggcgatacgcgtgggaccggaaagagtttatagatttcccgtctaccctacctctgaggtgaaggtgggactgccctgtggagcccaccctttccgttatgcgcccgcgcggcgcaatgacgtaacacaggcccgcccactgcccctgttgaattcgtgggtcgtgctgcgtcgacaacggtagtgacgcgtattgcctggaggatggcggacgccggcattcgccgcgtggttcccagcgacctgtatcccctcgtgctcggcttcctgcgcgataaccaactctcagaggtggccaataagttcgccaaagcgacaggagctacacagcaggatgccaatgcctcttccctcttagacatctatagcttctggctcaacaggtctgccaaggtcccagagcgaaagttacaggcaaatggaccagtggctaagaaagctaagaagaaggcctcatccagtgacagtgaggacagcagcgaggaggaggaggaagttcaagggcctccagcaaagaaggctgctgtacctgccaagcgagtcggtctgcctcctgggaaggctgcagccaaagcatcagagagtagcagcagtgaagagtccagtgatgatgatgatgaggaggaccaaaagaaacagcctgtccagaagggagttaagccccaagccaaggcagccaaagctcctcctaagaaggccaagagctctgattctgattctgactcaagctccgaggatgagccaccaaagaaccagaagccaaagataacacctgtgacagttaaagctcagactaaagcccctcccaaaccagctcgagcagcacctaaaatagccaatggtaaagcagccagtagcagcagtagcagcagcagcagcagtagcagtgatgactcagaggaggagaaggcagcagccacccccaagaagactgtacctaaaaagcaagttgtggccaaggccccagtgaaagcagctaccacccctacccggaagagttctagcagtgaggattcctccagtgacgaggaagaggagcaaaaaaaacccatgaaaaataaaccagcctgaaaataacagggccaaagttcagccccgcttttgtccccaaaattctgggacagctccaagg

SEQ ID NO: 306250 - DNA, 1060 bp, Homo sapiens
  misc_feature (11)..(11): n is a, c, g, or t
  misc_feature (65)..(65): n is a, c, g, or t
  misc_feature (90)..(90): n is a, c, g, or t
  misc_feature (99)..(99): n is a, c, g, or t
  misc_feature (101)..(101): n is a, c, g, or t
  misc_feature (105)..(105): n is a, c, g, or t
  misc_feature (108)..(108): n is a, c, g, or t
  misc_feature (119)..(119): n is a, c, g, or t
  misc_feature (121)..(121): n is a, c, g, or t
  misc_feature (125)..(125): n is a, c, g, or t
  misc_feature (128)..(128): n is a, c, g, or t
  misc_feature (153)..(153): n is a, c, g, or t
  misc_feature (157)..(158): n is a, c, g, or t
  misc_feature (170)..(170): n is a, c, g, or t
  misc_feature (173)..(173): n is a, c, g, or t
  misc_feature (202)..(202): n is a, c, g, or t
  misc_feature (220)..(220): n is a, c, g, or t
  misc_feature (226)..(226): n is a, c, g, or t
  misc_feature (243)..(243): n is a, c, g, or t
  misc_feature (257)..(257): n is a, c, g, or t
  misc_feature (278)..(278): n is a, c, g, or t
  misc_feature (284)..(284): n is a, c, g, or t
  misc_feature (297)..(297): n is a, c, g, or t
  misc_feature (304)..(304): n is a, c, g, or t
  misc_feature (309)..(309): n is a, c, g, or t
  misc_feature (311)..(311): n is a, c, g, or t
  misc_feature (314)..(314): n is a, c, g, or t
  misc_feature (325)..(325): n is a, c, g, or t
  misc_feature (330)..(330): n is a, c, g, or t
  misc_feature (336)..(336): n is a, c, g, or t
  misc_feature (340)..(340): n is a, c, g, or t
  misc_feature (342)..(342): n is a, c, g, or t
  misc_feature (348)..(348): n is a, c, g, or t
  misc_feature (356)..(356): n is a, c, g, or t
  misc_feature (362)..(362): n is a, c, g, or t
  misc_feature (378)..(378): n is a, c, g, or t
  misc_feature (412)..(412): n is a, c, g, or t
  misc_feature (418)..(418): n is a, c, g, or t
  misc_feature (422)..(422): n is a, c, g, or t
  misc_feature (427)..(427): n is a, c, g, or t
  misc_feature (439)..(439): n is a, c, g, or t
  misc_feature (455)..(455): n is a, c, g, or t
  misc_feature (464)..(464): n is a, c, g, or t
  misc_feature (467)..(467): n is a, c, g, or t
  misc_feature (473)..(473): n is a, c, g, or t
  misc_feature (476)..(476): n is a, c, g, or t
  misc_feature (496)..(496): n is a, c, g, or t
  misc_feature (501)..(501): n is a, c, g, or t
  misc_feature (511)..(512): n is a, c, g, or t
  misc_feature (540)..(540): n is a, c, g, or t
  misc_feature (595)..(595): n is a, c, g, or t
  misc_feature (609)..(609): n is a, c, g, or t
  misc_feature (614)..(614): n is a, c, g, or t
  misc_feature (617)..(617): n is a, c, g, or t
  misc_feature (626)..(626): n is a, c, g, or t
  misc_feature (635)..(635): n is a, c, g, or t
tttgaaaaggncaaaacctttttgctagctgtttgaaaaagaacattttttttgaaccaaccttngacccccttcccctagttatttgangtttgctanangttngangcaacctgccntncttnctncgttttttttaccacgtattacgangaanncaaaaattgacncanttacgttttgaaaaaaactaccactactncacccttgggtactttgnctgttnctgtgggtttggcacgntgggtgaataccangacacttgggttttgcacttnaacttncccttaccactgngtttgangaaantncancttgacttcanagganacacgntggngngggganaaaaaaanaaccanaacctgttctaaaaanccgcttcacactcccttcacgttagggagagggntacganttancactntagggttgaaanatttattagggttaantcttattgntantggtgnctnaatttgggggtttgtgaaantgaancgcttaacannatgcaattatttacacttgattaaaacntgtgacgtggggttttggggagaaacaaaacctaaattagggatttattttgttntctcccttatgttnggtancgnttgggaggnaatttacantgcgcgcgcgcgtccagaaccttaactgttagtagcagtggctgtaacaacacaaaccagtgaccagagataacagcttttaggccaagctggcctgacggtatggctgcaggaagtgactgagcagtagcggtactcagccagaccaagacggagagggaagagtccacagctttctggaagctaaggcattctggtggtagaaaagtgtgccccaagccttcatggacgagttataggtcttaagattagtctcctcttgtttggattccatacttgctaaataacctgataataacctggttttccatgtaactgcctctaggaagaaaatgtactgttcatgctgacacagatatttcagtctgcatggtaaaagttctaaatcttactacaaaataataaactggctggtttataatgtg

SEQ ID NO: 306251 - DNA, 1195 bp, Homo sapiens
aaccaagatggcgatacgcgtgggaccggaaagagtttatagatttcccgtctaccctacctctgaggtgaaggtgggactgccctgtggagcccaccctttccgttatgcgcccgcgcggcgcaatgacgtaacacaggcccgcccactgcccctgttgaattcgtgggtcgtgctgcgtcgacaacggtagtgacgcgtattgcctggaggatggcggacgccggcattcgccgcgtggttcccagcgacctgtatcccctcgtgctcggcttcctgcgcgataaccaactctcagaggtggccaataagttcgccaaagcgacaggagctacacagcaggatgccaatgcctcttccctcttagacatctatagcttctggctcaaaagggagttaagccccaagccaaggcagccaaagctcctcctaagaaggccaagagctctgattctgattctgactcaagctccgaggatgagccaccaaagaaccagaagccaaagataacacctgtgacagttaaagctcagactaaagcccctcccaaaccagctcgagcagcacctaaaatagccaatggtaaagcagcctgctgctgctgccgccgccgccgccaggctgctgccttgcaactgaatggagcagttcccttgggggccctgaatccagcagctctgactgctctgagtccagccctgaaccttgcctcccagtgtttccagctctccagcctctttaccccccagaccatgtaaatcagtggcacagtatactgcctccttgtgcctctggatcctgccacttcacatctactcttccatggccccatttctccattttgtggaccaagccatcctgagggcatggacattgtctctgaggaaattggggccacccttaagataccaagaaaagctcctgcccatggtccccactggaaatgggactctgctgagcaaagccaccagcttgaagagaacagaaatccacacctggcatttgaattacctgtttcttccatgtgtattccgtctcctgagattaccttctttgccccttccaaacaccttagtggattccctccattttctccccattgggaaaggccctaaggggctttaactggaaggaaactgacctctctcccttaccggtaccttaaaccttattctgggagggaaacccttgacct

SEQ ID NO: 306252 - DNA, 888 bp, Homo sapiens
ccgcggcaaacatggcggtggactcggcgatggagctgttatttttagatacttttaaacacccgagcgctgaggtaaggcttggcgacttgattctgacgctgcttcttgacttgggatctttacaaaaaaaccgttaggcgttctccacttttccttctgcagattgcttctttaatttctcgcttacacacagacaccctcccccgagctgtgtgagcatcgcgtctgagggagggctgcagcagccccttcatttccttgctttaacttgggccctccgtgtctttggtcgagttggcttttctgcttgcatggctttattttttatttttcctgtcaggtttgggccttgagaaggatcagggttctcaggtttacctcagatggcgtttgggaggggtcttggtttgacagtagtgtttgacagtagtgccggagtctgagcagtttacgttggcttcgtggtttccgaatcacgatgtttctaaatcctttctctttggcctcttttctgtcgggaattatgttccccagttgtgacacttacttggtttaggattacggtgctctccgatttggcctgaaactttaatacttgtctctcggagagatttcacacattaggaatgagatgcattcacggagaatacttgcgaagaggggagagttgagagaattatagttaaactcatcagcagacatctcctttgaggttggaggtggaatgttgtggagtaatatttctgtacaaaactacttgagcgccccttaatgtacaattggccctgcaatatgtagattaaacatagctggttaactaaagattcctgaaagcagaccaaaaatgaacttgaatgaagtctacggagaaattgttaaaaaaaa

SEQ ID NO: 306253 - DNA, 386 bp, Homo sapiens
  misc_feature (85)..(85): n is a, c, g, or t
  misc_feature (93)..(93): n is a, c, g, or t
aaaaattttaaatattgtgggccccatgtaattgtaggtgcctgtaaccccccaaaaaaaccccaaaaggggttttttttttttngggggaanccatggctgtaccaaaagaaacaaaatactcctctcctttgtattagaaatctgaactttgcatttcagctttggacctactgacactattttattatacaaattatttaaagcctaaaataaggaatatcctaatactattattttgggaatcagaaacatctaataaagctggactttatacatagaaataaagcttacaactttgagaaagtagccatattttccccaagatacgtcttaacacactgagtctatataagtggcgtaaaatacagagttatcttaatcag

SEQ ID NO: 306254 - DNA, 5636 bp, Homo sapiens
  misc_feature (2015)..(2015): n is a, c, g, or t
ccgcggcaaacatggcggtggactcggcgatggagctgttatttttagatacttttaaacacccgagcgctgagcaaagttctcatatagatgtggttcgttttccatgtgtggtttatatcaatgaagtccgagtcatacccccaggagtaagagcccatagcagtctgccagacaatagagcatatggagagacatctccccatacatttcaattagacttattcttcaacaatgtaagcaaaccaagtgcccctgttttcgataggttgggaagcctggaatatgatgagaatacttccatcatctttagacctaactcaaaggtgaatactgatggtctggtgctaagaggctggtataactgtctgacactggcaatatatggatcagtggatagagtgataagtcatgacagagactctccaccaccaccacctccaccgccaccacctccccagccacaaccaagtttgaaaaggaatccaaaacatgctgatggggagaaagaagatcagtttaatggaagccctccaagaccacagccaaggggaccaagaactcctccaggaccccctccacctgatgatgatgaagatgatcctgtgcctctgccagtgtctggtgacaaggaagaggatgctcctcatagagaagattactttgagcccatttctcctgatcggaattctgttccccaggaagggcaatattctgatgaaggagaagtagaagaggaacaacaagaagaaggagaagaagatgaagatgatgtggatgtagaggaagaagaggatgaggatgaggatgatcgacgaacagtagacagtattcctgaggaggaagaggaagatgaagaggaagaaggtgaagaggatgaagaaggtgaaggggatgatggttatgaacaaatttccagtgatgaagatggaattgctgacttggaacgtgaaacatttaagtatccaaactttgatgttgaatacactgctgaagacttagcttcagttcctcctatgacatatgatccatatgacagggagcttgtaccactcttatacttcagttgtccatacaagactacttttgaaattgaaatcagtagaatgaaggatcaaggtccagataaagaaaattcaggggcaatcgaagcctcagtgaagttaacagaactcttagatttgtatagagaagatagaggtgcaaaatgggtaacagctttagaagaaattccaagtttaataataaaagggttaagctatttgcaattgaaaaacacaaaacaagactcccttggccagttggtagactggaccatgcaagctttaaatttacaagtagcgcttcgccaacctatcgccttaaatgttcgacagctcaaagctgggaccaaattagtgtcctcactagcagaatgtggggctcaaggagttacaggactgctacaagcaggagtgatcagtggattatttgaacttctgtttgctgatcacgtatcatcttctcttaagttaaatgcttttaaagctttggacagtgtcattagtatgacagaaggaatggaagcttttttaagaggtaggcagaatgaaaaaagtggttatcaaaagcttctggaactcatacttttagatcagactgtgagggttgttactgctggttcagctattctccaaaaatgccatttctatgaagtcttgtcagagattaaaagacttggtgaccatttagcagagaagacttcatctcttcctaaccacagtgaacctgatcacgacacagatgctggacttgagagaacaaacccagaatatgaaaatgaggtggaagcttctatggatatggatcttttggaatcctcaaatataagtgaaggggaaatagaaaggcttattaacctcctagaagaagtttttcatttaatggaaactgcccctcatacaatgatccaacaacctgttaagtctttcccaacgatggcacgaattactggacctccagagagggatgatccntaccctgttctctttagatatcttcacagtcatcacttcttggagttggttaccttgcttctgtcaattccagtaacaagtgctcaccctggtgtgctgcaagccacaaaagatgttttgaagtttcttgcacagtcacagaagggtcttcttttttttatgtcggaatatgaagcaacaaatttattgatccgagctctgtgtcacttttatgatcaagatgaggaggaaggtctccaatctgatggtgttattgatgatgcatttgccttgtggctacaggactcaacacagacattgcaatgtattacagaactgttcagccattttcagcgttgtacagccagtgaagaaacagaccattcagatctcttgggaaccctgcacaatctttatttgattacttttaatcctgtgggaagatcagctgttggccatgtttttagtctggagaaaaatctccaaagtcttattactctaatggagtactattccaaagaagccttgggtgattccaaatctaagaagtcagtagcttataattacgcatgcatacttattttggtggtggttcagtcttccagtgatgttcaaatgctagaacaacatgcagcatctctcttgaagctttgtaaagcagatgaaaataatgctaaattgcaagaacttggcaagtggcttgaacctctgaaaaaccttagatttgaaattaactgcatcccaaacttaattgagtatgttaagcagaatatcgataacttgatgaccccagaaggagttggccttaccactgccttacgtgttctctgtaatgttgcatgcccaccacctcctgttgaaggtcaacagaaagatctgaaatggaatcttgccgttattcagcttttttctgctgaaggaatggacacgtttattcgagttctgcaaaaattgaacagtattctgactcagccttggaggctccatgtcaacatggggactacccttcacagagttactactatttcaatggctcgctgcacactcactcttcttaaaactatgttaacggaactcctgagaggtggatcctttgagtttaaggacatgcgtgttccttcagcgcttgttactttacatatgctcctgtgctctatccccctctcaggtcgtttggatagtgatgaacagaaaattcagaatgatatcattgatattttactgacttttacacaaggagttaatgaaaaactcacaatctcagaagagactctggccaataatacttggtctttaatgttaaaagaagttctttcttcaatcttgaaggttcctgaaggatttttttctggactcatactcctttcagagctgctgcctcttccattgcccatgcaaacaactcaggttattgagccacatgatatatcagtggcactcaacacccgaaaattgtggagcatgcaccttcatgttcaagcaaagttgctccaagaaatagttcgctctttctctggcacaacctgccagcccattcaacatatgttacggcgtatttgtgttcaattgtgtgaccttgcctcaccaactgcacttctgattatgagaactgtgttggatttgattgtagaagacttgcaaagcacttcagaagataaagaaaaacagtatactagccaaaccaccaggttgcttgctcttcttgatgctctggcttcacacaaagcttgtaaattagctattttgcatctaattaatggaactattaaaggtgatgaaagatatgcagagatattccaggatcttttagctttggtgcggtctcctggagacagtgttattcgccaacagtgtgttgaatatgtcacatccattttgcagtctctctgtgatcaggacattgcacttatcttaccaagctcttctgaaggttctatttctgaactggagcagctctccaattctctaccaaataaagaattgatgacctcaatctgtgactgtctgttggctacgctagctaactctgagagcagttacaactgtttactgacatgtgtcagaacaatgatgtttcttgcagagcatgattatggattatttcatttaaaaagttctttaaggaaaaacagtagtgctctgcatagtttactgaaacgagtggtcagcacatttagtaaggacacaggagagcttgcatcttcatttttagaatttatgagacaaattcttaactctgacacaattggatgctgtggagatgataatggtctcatggaagtagagggagctcatacatcacggacgatgagtattaatgctgcagagttaaaacagcttctacaaagcaaagaagaaagtccagaaaatttgttccttgaactagagaagcttgttttggaacattcaaaagatgatgacaatctggattctttgttggacagtgtagttggacttaagcagatgctggagtcatcaggtgaccctttacctctcagtgaccaggatgtagaaccagtactttcagctccagaatctcttcagaatctgtttaacaataggactgcctatgtgcttgctgatgtcatggatgatcagttgaaatctatgtggttcactccatttcaggctgaagagatagatacagatctggatttggtaaaggttgacttaattgaactctctgaaaaatgctgtagtgactttgatttgcactcagaattagagcgctcatttttgtcagaaccatcatctccaggaagaaccaagactactaaaggattcaaacttgggaagcacaagcatgagacctttataacgtcaagtggaaaatctgaatacattgaacctgccaaaagagctcatgttgtgccaccaccaagaggaaggggcaggggaggatttggacagggtatacgacctcatgatatttttcgtcagagaaaacagaacacaagtagaccaccatctatgcatgtggatgactttgttgctgctgaaagtaaagaagtggttcctcaagatggaatacctccaccaaaacggccactcaaagtatcacagaagatttcttcccgtggtgggttttcaggcaatagaggaggacggggtgctttccacagtcagaataggtttttcacaccacctgcttcaaaaggaaactacagtcgtcgggaaggaacaagaggctccagttggagtgctcagaatactcctcgaggaaattacaatgaaagtcgtggaggccagagcaattttaacagaggccctcttccaccattacgaccccttagttctacaggttaccgcccaagtcctcgggaccgtgcttctagaggtcgtgggggacttggaccttcctgggctagtgcaaatagcggcagtggaggctcaagaggaaagtttgttagtggaggcagtggtagaggtcgtcatgtacgctcctttacacgataaaaatccttttgggaacatcttaactgtatatgaacatttcacgaggacaataaaaataagacattgaaggaccaatttagacttagcagttatctggagacatctgagagaatatttttatctgaagaaagcagaatttgtttgatacctaacaagatttcaataaaaatccaaactttgtatgta

SEQ ID NO: 306255 - DNA, 5467 bp, Homo sapiens
  misc_feature (1846)..(1846): n is a, c, g, or t
ccgcggcaaacatggcggtggactcggcgatggagctgttatttttagatacttttaaacacccgagcgctgagcaaagttctcatatagatgtggttcgttttccatgtgtggtttatatcaatgaagtccgagtcatacccccaggagtaagagcccatagcagtctgccagacaatagagcatatggagagacatctccccatacatttcaattagacttattcttcaacaatgtaagcaaaccaagtgcccctgttttcgataggttgggaagcctggaatatgatgagaatacttccatcatctttagacctaactcaaagctgatggggagaaagaagatcagtttaatggaagccctccaagaccacagccaaggggaccaagaactcctccaggaccccctccacctgatgatgatgaagatgatcctgtgcctctgccagtgtctggtgacaaggaagaggatgctcctcatagagaagattactttgagcccatttctcctgatcggaattctgttccccaggaagggcaatattctgatgaaggagaagtagaagaggaacaacaagaagaaggagaagaagatgaagatgatgtggatgtagaggaagaagaggatgaggatgaggatgatcgacgaacagtagacagtattcctgaggaggaagaggaagatgaagaggaagaaggtgaagaggatgaagaaggtgaaggggatgatggttatgaacaaatttccagtgatgaagatggaattgctgacttggaacgtgaaacatttaagtatccaaactttgatgttgaatacactgctgaagacttagcttcagttcctcctatgacatatgatccatatgacagggagcttgtaccactcttatacttcagttgtccatacaagactacttttgaaattgaaatcagtagaatgaaggatcaaggtccagataaagaaaattcaggggcaatcgaagcctcagtgaagttaacagaactcttagatttgtatagagaagatagaggtgcaaaatgggtaacagctttagaagaaattccaagtttaataataaaagggttaagctatttgcaattgaaaaacacaaaacaagactcccttggccagttggtagactggaccatgcaagctttaaatttacaagtagcgcttcgccaacctatcgccttaaatgttcgacagctcaaagctgggaccaaattagtgtcctcactagcagaatgtggggctcaaggagttacaggactgctacaagcaggagtgatcagtggattatttgaacttctgtttgctgatcacgtatcatcttctcttaagttaaatgcttttaaagctttggacagtgtcattagtatgacagaaggaatggaagcttttttaagaggtaggcagaatgaaaaaagtggttatcaaaagcttctggaactcatacttttagatcagactgtgagggttgttactgctggttcagctattctccaaaaatgccatttctatgaagtcttgtcagagattaaaagacttggtgaccatttagcagagaagacttcatctcttcctaaccacagtgaacctgatcacgacacagatgctggacttgagagaacaaacccagaatatgaaaatgaggtggaagcttctatggatatggatcttttggaatcctcaaatataagtgaaggggaaatagaaaggcttattaacctcctagaagaagtttttcatttaatggaaactgcccctcatacaatgatccaacaacctgttaagtctttcccaacgatggcacgaattactggacctccagagagggatgatccntaccctgttctctttagatatcttcacagtcatcacttcttggagttggttaccttgcttctgtcaattccagtaacaagtgctcaccctggtgtgctgcaagccacaaaagatgttttgaagtttcttgcacagtcacagaagggtcttcttttttttatgtcggaatatgaagcaacaaatttattgatccgagctctgtgtcacttttatgatcaagatgaggaggaaggtctccaatctgatggtgttattgatgatgcatttgccttgtggctacaggactcaacacagacattgcaatgtattacagaactgttcagccattttcagcgttgtacagccagtgaagaaacagaccattcagatctcttgggaaccctgcacaatctttatttgattacttttaatcctgtgggaagatcagctgttggccatgtttttagtctggagaaaaatctccaaagtcttattactctaatggagtactattccaaagaagccttgggtgattccaaatctaagaagtcagtagcttataattacgcatgcatacttattttggtggtggttcagtcttccagtgatgttcaaatgctagaacaacatgcagcatctctcttgaagctttgtaaagcagatgaaaataatgctaaattgcaagaacttggcaagtggcttgaacctctgaaaaaccttagatttgaaattaactgcatcccaaacttaattgagtatgttaagcagaatatcgataacttgatgaccccagaaggagttggccttaccactgccttacgtgttctctgtaatgttgcatgcccaccacctcctgttgaaggtcaacagaaagatctgaaatggaatcttgccgttattcagcttttttctgctgaaggaatggacacgtttattcgagttctgcaaaaattgaacagtattctgactcagccttggaggctccatgtcaacatggggactacccttcacagagttactactatttcaatggctcgctgcacactcactcttcttaaaactatgttaacggaactcctgagaggtggatcctttgagtttaaggacatgcgtgttccttcagcgcttgttactttacatatgctcctgtgctctatccccctctcaggtcgtttggatagtgatgaacagaaaattcagaatgatatcattgatattttactgacttttacacaaggagttaatgaaaaactcacaatctcagaagagactctggccaataatacttggtctttaatgttaaaagaagttctttcttcaatcttgaaggttcctgaaggatttttttctggactcatactcctttcagagctgctgcctcttccattgcccatgcaaacaactcaggttattgagccacatgatatatcagtggcactcaacacccgaaaattgtggagcatgcaccttcatgttcaagcaaagttgctccaagaaatagttcgctctttctctggcacaacctgccagcccattcaacatatgttacggcgtatttgtgttcaattgtgtgaccttgcctcaccaactgcacttctgattatgagaactgtgttggatttgattgtagaagacttgcaaagcacttcagaagataaagaaaaacagtatactagccaaaccaccaggttgcttgctcttcttgatgctctggcttcacacaaagcttgtaaattagctattttgcatctaattaatggaactattaaaggtgatgaaagatatgcagagatattccaggatcttttagctttggtgcggtctcctggagacagtgttattcgccaacagtgtgttgaatatgtcacatccattttgcagtctctctgtgatcaggacattgcacttatcttaccaagctcttctgaaggttctatttctgaactggagcagctctccaattctctaccaaataaagaattgatgacctcaatctgtgactgtctgttggctacgctagctaactctgagagcagttacaactgtttactgacatgtgtcagaacaatgatgtttcttgcagagcatgattatggattatttcatttaaaaagttctttaaggaaaaacagtagtgctctgcatagtttactgaaacgagtggtcagcacatttagtaaggacacaggagagcttgcatcttcatttttagaatttatgagacaaattcttaactctgacacaattggatgctgtggagatgataatggtctcatggaagtagagggagctcatacatcacggacgatgagtattaatgctgcagagttaaaacagcttctacaaagcaaagaagaaagtccagaaaatttgttccttgaactagagaagcttgttttggaacattcaaaagatgatgacaatctggattctttgttggacagtgtagttggacttaagcagatgctggagtcatcaggtgaccctttacctctcagtgaccaggatgtagaaccagtactttcagctccagaatctcttcagaatctgtttaacaataggactgcctatgtgcttgctgatgtcatggatgatcagttgaaatctatgtggttcactccatttcaggctgaagagatagatacagatctggatttggtaaaggttgacttaattgaactctctgaaaaatgctgtagtgactttgatttgcactcagaattagagcgctcatttttgtcagaaccatcatctccaggaagaaccaagactactaaaggattcaaacttgggaagcacaagcatgagacctttataacgtcaagtggaaaatctgaatacattgaacctgccaaaagagctcatgttgtgccaccaccaagaggaaggggcaggggaggatttggacagggtatacgacctcatgatatttttcgtcagagaaaacagaacacaagtagaccaccatctatgcatgtggatgactttgttgctgctgaaagtaaagaagtggttcctcaagatggaatacctccaccaaaacggccactcaaagtatcacagaagatttcttcccgtggtgggttttcaggcaatagaggaggacggggtgctttccacagtcagaataggtttttcacaccacctgcttcaaaaggaaactacagtcgtcgggaaggaacaagaggctccagttggagtgctcagaatactcctcgaggaaattacaatgaaagtcgtggaggccagagcaattttaacagaggccctcttccaccattacgaccccttagttctacaggttaccgcccaagtcctcgggaccgtgcttctagaggtcgtgggggacttggaccttcctgggctagtgcaaatagcggcagtggaggctcaagaggaaagtttgttagtggaggcagtggtagaggtcgtcatgtacgctcctttacacgataaaaatccttttgggaacatcttaactgtatatgaacatttcacgaggacaataaaaataagacattgaaggaccaatttagacttagcagttatctggagacatctgagagaatatttttatctgaagaaagcagaatttgtttgatacctaacaagatttcaataaaaatccaaactttgtatgta

SEQ ID NO: 306256 - DNA, 5582 bp, Homo sapiens
  misc_feature (2015)..(2015): n is a, c, g, or t
ccgcggcaaacatggcggtggactcggcgatggagctgttatttttagatacttttaaacacccgagcgctgagcaaagttctcatatagatgtggttcgttttccatgtgtggtttatatcaatgaagtccgagtcatacccccaggagtaagagcccatagcagtctgccagacaatagagcatatggagagacatctccccatacatttcaattagacttattcttcaacaatgtaagcaaaccaagtgcccctgttttcgataggttgggaagcctggaatatgatgagaatacttccatcatctttagacctaactcaaaggtgaatactgatggtctggtgctaagaggctggtataactgtctgacactggcaatatatggatcagtggatagagtgataagtcatgacagagactctccaccaccaccacctccaccgccaccacctccccagccacaaccaagtttgaaaaggaatccaaaacatgctgatggggagaaagaagatcagtttaatggaagccctccaagaccacagccaaggggaccaagaactcctccaggaccccctccacctgatgatgatgaagatgatcctgtgcctctgccagtgtctggtgacaaggaagaggatgctcctcatagagaagattactttgagcccatttctcctgatcggaattctgttccccaggaagggcaatattctgatgaaggagaagtagaagaggaacaacaagaagaaggagaagaagatgaagatgatgtggatgtagaggaagaagaggatgaggatgaggatgatcgacgaacagtagacagtattcctgaggaggaagaggaagatgaagaggaagaaggtgaagaggatgaagaaggtgaaggggatgatggttatgaacaaatttccagtgatgaagatggaattgctgacttggaacgtgaaacatttaagtatccaaactttgatgttgaatacactgctgaagacttagcttcagttcctcctatgacatatgatccatatgacagggagcttgtaccactcttatacttcagttgtccatacaagactacttttgaaattgaaatcagtagaatgaaggatcaaggtccagataaagaaaattcaggggcaatcgaagcctcagtgaagttaacagaactcttagatttgtatagagaagatagaggtgcaaaatgggtaacagctttagaagaaattccaagtttaataataaaagggttaagctatttgcaattgaaaaacacaaaacaagactcccttggccagttggtagactggaccatgcaagctttaaatttacaagtagcgcttcgccaacctatcgccttaaatgttcgacagctcaaagctgggaccaaattagtgtcctcactagcagaatgtggggctcaaggagttacaggactgctacaagcaggagtgatcagtggattatttgaacttctgtttgctgatcacgtatcatcttctcttaagttaaatgcttttaaagctttggacagtgtcattagtatgacagaaggaatggaagcttttttaagaggtaggcagaatgaaaaaagtggttatcaaaagcttctggaactcatacttttagatcagactgtgagggttgttactgctggttcagctattctccaaaaatgccatttctatgaagtcttgtcagagattaaaagacttggtgaccatttagcagagaagacttcatctcttcctaaccacagtgaacctgatcacgacacagatgctggacttgagagaacaaacccagaatatgaaaatgaggtggaagcttctatggatatggatcttttggaatcctcaaatataagtgaaggggaaatagaaaggcttattaacctcctagaagaagtttttcatttaatggaaactgcccctcatacaatgatccaacaacctgttaagtctttcccaacgatggcacgaattactggacctccagagagggatgatccntaccctgttctctttagatatcttcacagtcatcacttcttggagttggttaccttgcttctgtcaattccagtaacaagtgctcaccctggtgtgctgcaagccacgtcggaatatgaagcaacaaatttattgatccgagctctgtgtcacttttatgatcaagatgaggaggaaggtctccaatctgatggtgttattgatgatgcatttgccttgtggctacaggactcaacacagacattgcaatgtattacagaactgttcagccattttcagcgttgtacagccagtgaagaaacagaccattcagatctcttgggaaccctgcacaatctttatttgattacttttaatcctgtgggaagatcagctgttggccatgtttttagtctggagaaaaatctccaaagtcttattactctaatggagtactattccaaagaagccttgggtgattccaaatctaagaagtcagtagcttataattacgcatgcatacttattttggtggtggttcagtcttccagtgatgttcaaatgctagaacaacatgcagcatctctcttgaagctttgtaaagcagatgaaaataatgctaaattgcaagaacttggcaagtggcttgaacctctgaaaaaccttagatttgaaattaactgcatcccaaacttaattgagtatgttaagcagaatatcgataacttgatgaccccagaaggagttggccttaccactgccttacgtgttctctgtaatgttgcatgcccaccacctcctgttgaaggtcaacagaaagatctgaaatggaatcttgccgttattcagcttttttctgctgaaggaatggacacgtttattcgagttctgcaaaaattgaacagtattctgactcagccttggaggctccatgtcaacatggggactacccttcacagagttactactatttcaatggctcgctgcacactcactcttcttaaaactatgttaacggaactcctgagaggtggatcctttgagtttaaggacatgcgtgttccttcagcgcttgttactttacatatgctcctgtgctctatccccctctcaggtcgtttggatagtgatgaacagaaaattcagaatgatatcattgatattttactgacttttacacaaggagttaatgaaaaactcacaatctcagaagagactctggccaataatacttggtctttaatgttaaaagaagttctttcttcaatcttgaaggttcctgaaggatttttttctggactcatactcctttcagagctgctgcctcttccattgcccatgcaaacaactcaggttattgagccacatgatatatcagtggcactcaacacccgaaaattgtggagcatgcaccttcatgttcaagcaaagttgctccaagaaatagttcgctctttctctggcacaacctgccagcccattcaacatatgttacggcgtatttgtgttcaattgtgtgaccttgcctcaccaactgcacttctgattatgagaactgtgttggatttgattgtagaagacttgcaaagcacttcagaagataaagaaaaacagtatactagccaaaccaccaggttgcttgctcttcttgatgctctggcttcacacaaagcttgtaaattagctattttgcatctaattaatggaactattaaaggtgatgaaagatatgcagagatattccaggatcttttagctttggtgcggtctcctggagacagtgttattcgccaacagtgtgttgaatatgtcacatccattttgcagtctctctgtgatcaggacattgcacttatcttaccaagctcttctgaaggttctatttctgaactggagcagctctccaattctctaccaaataaagaattgatgacctcaatctgtgactgtctgttggctacgctagctaactctgagagcagttacaactgtttactgacatgtgtcagaacaatgatgtttcttgcagagcatgattatggattatttcatttaaaaagttctttaaggaaaaacagtagtgctctgcatagtttactgaaacgagtggtcagcacatttagtaaggacacaggagagcttgcatcttcatttttagaatttatgagacaaattcttaactctgacacaattggatgctgtggagatgataatggtctcatggaagtagagggagctcatacatcacggacgatgagtattaatgctgcagagttaaaacagcttctacaaagcaaagaagaaagtccagaaaatttgttccttgaactagagaagcttgttttggaacattcaaaagatgatgacaatctggattctttgttggacagtgtagttggacttaagcagatgctggagtcatcaggtgaccctttacctctcagtgaccaggatgtagaaccagtactttcagctccagaatctcttcagaatctgtttaacaataggactgcctatgtgcttgctgatgtcatggatgatcagttgaaatctatgtggttcactccatttcaggctgaagagatagatacagatctggatttggtaaaggttgacttaattgaactctctgaaaaatgctgtagtgactttgatttgcactcagaattagagcgctcatttttgtcagaaccatcatctccaggaagaaccaagactactaaaggattcaaacttgggaagcacaagcatgagacctttataacgtcaagtggaaaatctgaatacattgaacctgccaaaagagctcatgttgtgccaccaccaagaggaaggggcaggggaggatttggacagggtatacgacctcatgatatttttcgtcagagaaaacagaacacaagtagaccaccatctatgcatgtggatgactttgttgctgctgaaagtaaagaagtggttcctcaagatggaatacctccaccaaaacggccactcaaagtatcacagaagatttcttcccgtggtgggttttcaggcaatagaggaggacggggtgctttccacagtcagaataggtttttcacaccacctgcttcaaaaggaaactacagtcgtcgggaaggaacaagaggctccagttggagtgctcagaatactcctcgaggaaattacaatgaaagtcgtggaggccagagcaattttaacagaggccctcttccaccattacgaccccttagttctacaggttaccgcccaagtcctcgggaccgtgcttctagaggtcgtgggggacttggaccttcctgggctagtgcaaatagcggcagtggaggctcaagaggaaagtttgttagtggaggcagtggtagaggtcgtcatgtacgctcctttacacgataaaaatccttttgggaacatcttaactgtatatgaacatttcacgaggacaataaaaataagacattgaaggaccaatttagacttagcagttatctggagacatctgagagaatatttttatctgaagaaagcagaatttgtttgatacctaacaagatttcaataaaaatccaaactttgtatgta

SEQ ID NO: 306257 - DNA, 6463 bp, Homo sapiens
  misc_feature (2015)..(2015): n is a, c, g, or t
ccgcggcaaacatggcggtggactcggcgatggagctgttatttttagatacttttaaacacccgagcgctgagcaaagttctcatatagatgtggttcgttttccatgtgtggtttatatcaatgaagtccgagtcatacccccaggagtaagagcccatagcagtctgccagacaatagagcatatggagagacatctccccatacatttcaattagacttattcttcaacaatgtaagcaaaccaagtgcccctgttttcgataggttgggaagcctggaatatgatgagaatacttccatcatctttagacctaactcaaaggtgaatactgatggtctggtgctaagaggctggtataactgtctgacactggcaatatatggatcagtggatagagtgataagtcatgacagagactctccaccaccaccacctccaccgccaccacctccccagccacaaccaagtttgaaaaggaatccaaaacatgctgatggggagaaagaagatcagtttaatggaagccctccaagaccacagccaaggggaccaagaactcctccaggaccccctccacctgatgatgatgaagatgatcctgtgcctctgccagtgtctggtgacaaggaagaggatgctcctcatagagaagattactttgagcccatttctcctgatcggaattctgttccccaggaagggcaatattctgatgaaggagaagtagaagaggaacaacaagaagaaggagaagaagatgaagatgatgtggatgtagaggaagaagaggatgaggatgaggatgatcgacgaacagtagacagtattcctgaggaggaagaggaagatgaagaggaagaaggtgaagaggatgaagaaggtgaaggggatgatggttatgaacaaatttccagtgatgaagatggaattgctgacttggaacgtgaaacatttaagtatccaaactttgatgttgaatacactgctgaagacttagcttcagttcctcctatgacatatgatccatatgacagggagcttgtaccactcttatacttcagttgtccatacaagactacttttgaaattgaaatcagtagaatgaaggatcaaggtccagataaagaaaattcaggggcaatcgaagcctcagtgaagttaacagaactcttagatttgtatagagaagatagaggtgcaaaatgggtaacagctttagaagaaattccaagtttaataataaaagggttaagctatttgcaattgaaaaacacaaaacaagactcccttggccagttggtagactggaccatgcaagctttaaatttacaagtagcgcttcgccaacctatcgccttaaatgttcgacagctcaaagctgggaccaaattagtgtcctcactagcagaatgtggggctcaaggagttacaggactgctacaagcaggagtgatcagtggattatttgaacttctgtttgctgatcacgtatcatcttctcttaagttaaatgcttttaaagctttggacagtgtcattagtatgacagaaggaatggaagcttttttaagaggtaggcagaatgaaaaaagtggttatcaaaagcttctggaactcatacttttagatcagactgtgagggttgttactgctggttcagctattctccaaaaatgccatttctatgaagtcttgtcagagattaaaagacttggtgaccatttagcagagaagacttcatctcttcctaaccacagtgaacctgatcacgacacagatgctggacttgagagaacaaacccagaatatgaaaatgaggtggaagcttctatggatatggatcttttggaatcctcaaatataagtgaaggggaaatagaaaggcttattaacctcctagaagaagtttttcatttaatggaaactgcccctcatacaatgatccaacaacctgttaagtctttcccaacgatggcacgaattactggacctccagagagggatgatccntaccctgttctctttagatatcttcacagtcatcacttcttggagttggttaccttgcttctgtcaattccagtaacaagtgctcaccctggtgtgctgcaagccacaaaagatgttttgaagtttcttgcacagtcacagaagggtcttcttttttttatgtcggaatatgaagcaacaaatttattgatccgagctctgtgtcacttttatgatcaagatgaggaggaaggtctccaatctgatggtgttattgatgatgcatttgccttgtggctacaggactcaacacagacattgcaatgtattacagaactgttcagccattttcagcgttgtacagccagtgaagaaacagaccattcagatctcttgggaaccctgcacaatctttatttgattacttttaatcctgtgggaagatcagctgttggccatgtttttagtctggagaaaaatctccaaagtcttattactctaatggagtactattccaaagaagccttgggtgattccaaatctaagaagtcagtagcttataattacgcatgcatacttattttggtggtggttcagtcttccagtgatgttcaaatgctagaacaacatgcagcatctctcttgaagctttgtaaagcagatgaaaataatgctaaattgcaagaacttggcaagtggcttgaacctctgaaaaaccttagatttgaaattaactgcatcccaaacttaattgagtatgttaagcagaatatcgataacttgatgaccccagaaggagttggccttaccactgccttacgtgttctctgtaatgttgcatgcccaccacctcctgttgaaggtcaacagaaagatctgaaatggaatcttgccgttattcagcttttttctgctgaaggaatggacacgtttattcgagttctgcaaaaattgaacagtattctgactcagccttggaggctccatgtcaacatggggactacccttcacagagttactactatttcaatggctcgctgcacactcactcttcttaaaactatgttaacggaactcctgagaggtggatcctttgagtttaaggacatgcgtgttccttcagcgcttgttactttacatatgctcctgtgctctatccccctctcaggtcgtttggatagtgatgaacagaaaattcagaatgatatcattgatattttactgacttttacacaaggagttaatgaaaaactcacaatctcagaagagactctggccaataatacttggtctttaatgttaaaagaagttctttcttcaatcttgaaggttcctgaaggatttttttctggactcatactcctttcagagctgctgcctcttccattgcccatgcaaacaactcaggttattgagccacatgatatatcagtggcactcaacacccgaaaattgtggagcatgcaccttcatgttcaagcaaagttgctccaagaaatagttcgctctttctctggcacaacctgccagcccattcaacatatgttacggcgtatttgtgttcaattgtgtgaccttgcctcaccaactgcacttctgattatgagaactgtgttggatttgattgtagaagacttgcaaagcacttcagaagataaagaaaaacagtatactagccaaaccaccaggttgcttgctcttcttgatgctctggcttcacacaaagcttgtaaattagctattttgcatctaattaatggaactattaaaggtgatgaaagatatgcagagatattccaggatcttttagctttggtgcggtctcctggagacagtgttattcgccaacagtgtgttgaatatgtcacatccattttgcagtctctctgtgatcaggacattgcacttatcttaccaagctcttctgaaggttctatttctgaactggagcagctctccaattctctaccaaataaagaattgatgacctcaatctgtgactgtctgttggctacgctagctaactctgagagcagttacaactgtttactgacatgtgtcagaacaatgatgtttcttgcagagcatgattatggattatttcatttaaaaagttctttaaggaaaaacagtagtgctctgcatagtttactgaaacgagtggtcagcacatttagtaaggacacaggagagcttgcatcttcatttttagaatttatgagacaaattcttaactctgacacaattggatgctgtggagatgataatggtctcatggaagtagagggagctcatacatcacggacgatgagtattaatgctgcagagttaaaacagcttctacaaagcaaagaagaaagtccagaaaatttgttccttgaactagagaagcttgttttggaacattcaaaagatgatgacaatctggattctttgttggacagtgtagttggacttaagcagatgctggagtcatcaggtgaccctttacctctcagtgaccaggatgtagaaccagtactttcagctccagaatctcttcagaatctgtttaacaataggactgcctatgtgcttgctgatgtcatggatgatcagttgaaatctatgtggttcactccatttcaggctgaagagatagatacagatctggatttggtaaaggttgacttaattgaactctctgaaaaatgctgtagtgactttgatttgcactcagaattagagcgctcatttttgtcagaaccatcatctccaggaagaaccaagactactaaaggattcaaacttgggaagcacaagcatgagacctttataacgtcaagtggaaaatctgaatacattgaacctgccaaaagagctcatgttgtgccaccaccaagaggaaggggcaggggaggatttggacagggtatacgacctcatgatatttttcgtcagagaaaacagaacacaagtagaccaccatctatgcatgtggatgactttgttgctgctgaaagtaaagaagtggttcctcaagatggaatacctccaccaaaacggccactcaaagtatcacagaagatttcttcccgtggtgggttttcaggcaatagaggaggacggggtgctttccacagtcagaataggtttttcacaccacctgcttcaaaaggaaactacagtcgtcgggaaggaacaagaggctccagttggagtgctcagaatactcctcgaggaaattacaatgaaagtcgtggaggccagagcaattttaacagaggccctcttccaccattacgaccccttagttctacaggttaccgcccaagtcctcgggaccgtgcttctagaggtcgtgggggacttggaccttcctgggctagtgcaaatagcggcagtggaggctcaagaggaaagtttgttagtggaggcagtggtagaggtcgtcatgtacgctcctttacacgataaaaatccttttgggaacatcttaactgtatatgaacatttcacgaggacaataaaaataagacattgaaggaccaatttagacttagcagttatctggagacatctgagagaatatttttatctgaagaaagcagaatttgtttgatacctaacaagatttcaataaaaatccaaactttgtatgtacgtttgtatatattttcccttttttgtatgactatttatttagaaaatttctaggtgaaaaactaaatgatgttttgtatttttcttgcctatagcacagatattctcaaactttctcagctcatgacactatttagtgcctcagtacttttttcacagcatacctggtccaaaagaaatatctaatacttgtgtttattaagcagttagatccaacagcttaataagaatgtacatcatcaccactagtaactgtggacactgcatgtctcaaaccttggaatcagtatcattttcttttcctctctgcttcttgcacagtactttttatcaaactgctgaaaacccagttttgtaaagatatgttgttatagaaaggaatataatgctatttaatgttgaaaatgtaaactacctcaaagtagtagtttatgtgatgtccaacaggtgttgctatgtttttctcaaaaattttaaaatattgtgtggcacccatgttaatttgctaaggtgccctgctacacagtttgggaaccatggctgtaccaaaagaaacaaaatactcctctcctttgtattagaaatctgaactttgcatttcagctttggacctactgacactattttattatacaaattatttaaagcctaaaataaggaatatcctaatactattattttgggaatcagaaacatctaataaagctggactttatacatagaaataaagcttacaactttgagaaagtagccatattttccccaagatacgtcttaacacactgagtctatataagtggcgtaaaatacagagttatcttaatcag

SEQ ID NO: 306258 - DNA, 5586 bp, Homo sapiens
  misc_feature (2015)..(2015): n is a, c, g, or t
ccgcggcaaacatggcggtggactcggcgatggagctgttatttttagatacttttaaacacccgagcgctgagcaaagttctcatatagatgtggttcgttttccatgtgtggtttatatcaatgaagtccgagtcatacccccaggagtaagagcccatagcagtctgccagacaatagagcatatggagagacatctccccatacatttcaattagacttattcttcaacaatgtaagcaaaccaagtgcccctgttttcgataggttgggaagcctggaatatgatgagaatacttccatcatctttagacctaactcaaaggtgaatactgatggtctggtgctaagaggctggtataactgtctgacactggcaatatatggatcagtggatagagtgataagtcatgacagagactctccaccaccaccacctccaccgccaccacctccccagccacaaccaagtttgaaaaggaatccaaaacatgctgatggggagaaagaagatcagtttaatggaagccctccaagaccacagccaaggggaccaagaactcctccaggaccccctccacctgatgatgatgaagatgatcctgtgcctctgccagtgtctggtgacaaggaagaggatgctcctcatagagaagattactttgagcccatttctcctgatcggaattctgttccccaggaagggcaatattctgatgaaggagaagtagaagaggaacaacaagaagaaggagaagaagatgaagatgatgtggatgtagaggaagaagaggatgaggatgaggatgatcgacgaacagtagacagtattcctgaggaggaagaggaagatgaagaggaagaaggtgaagaggatgaagaaggtgaaggggatgatggttatgaacaaatttccagtgatgaagatggaattgctgacttggaacgtgaaacatttaagtatccaaactttgatgttgaatacactgctgaagacttagcttcagttcctcctatgacatatgatccatatgacagggagcttgtaccactcttatacttcagttgtccatacaagactacttttgaaattgaaatcagtagaatgaaggatcaaggtccagataaagaaaattcaggggcaatcgaagcctcagtgaagttaacagaactcttagatttgtatagagaagatagaggtgcaaaatgggtaacagctttagaagaaattccaagtttaataataaaagggttaagctatttgcaattgaaaaacacaaaacaagactcccttggccagttggtagactggaccatgcaagctttaaatttacaagtagcgcttcgccaacctatcgccttaaatgttcgacagctcaaagctgggaccaaattagtgtcctcactagcagaatgtggggctcaaggagttacaggactgctacaagcaggagtgatcagtggattatttgaacttctgtttgctgatcacgtatcatcttctcttaagttaaatgcttttaaagctttggacagtgtcattagtatgacagaaggaatggaagcttttttaagaggtaggcagaatgaaaaaagtggttatcaaaagcttctggaactcatacttttagatcagactgtgagggttgttactgctggttcagctattctccaaaaatgccatttctatgaagtcttgtcagagattaaaagacttggtgaccatttagcagagaagacttcatctcttcctaaccacagtgaacctgatcacgacacagatgctggacttgagagaacaaacccagaatatgaaaatgaggtggaagcttctatggatatggatcttttggaatcctcaaatataagtgaaggggaaatagaaaggcttattaacctcctagaagaagtttttcatttaatggaaactgcccctcatacaatgatccaacaacctgttaagtctttcccaacgatggcacgaattactggacctccagagagggatgatccntaccctgttctctttagatatcttcacagtcatcacttcttggagttggttaccttgcttctgtcaattccagtaacaagtgctcaccctggtgtgctgcaagccacaaaagatgttttgaagtttcttgcacagtcacagaagggtcttcttttttttatgtcggaatatgaagcaacaaatttattgatccgagctctgtgtcacttttatgatcaagatgaggaggaaggtctccaatctgatggtgttattgatgatgcatttgccttgtggctacaggactcaacacagacattgcaatgtattacagaactgttcagccattttcagcgttgtacagccagtgaagaaacagaccattcagatctcttgggaaccctgcacaatctttatttgattacttttaatcctgtgggaagatcagctgttggccatgtttttagtctggagaaaaatctccaaagtcttattactctaatggagtactattccaaagaagccttgggtgattccaaatctaagaagtcagtagcttataattacgcatgcatacttattttggtggtggttcagtcttccagtgatgttcaaatgctagaacaacatgcagcatctctcttgaagctttgtaaagcagatgaaaataatgctaaattgcaagaacttggcaagtggcttgaacctctgaaaaaccttagatttgaaattaactgcatcccaaacttaattgagtatgttaagcagaatatcgataacttgatgaccccagaaggagttggccttaccactgccttacgtgttctctgtaatgttgcatgcccaccacctcctgttgaaggtcaacagaaagatctgaaatggaatcttgccgttattcagcttttttctgctgaaggaatggacacgtttattcgagttctgcaaaaattgaacagtattctgactcagccttggaggctccatgtcaacatggggactacccttcacagagttactactatttcaatggctcgctgcacactcactcttcttaaaactatgttaacggaactcctgagaggtggatcctttgagtttaaggacatgcgtgttccttcagcgcttgttactttacatatgctcctgtgctctatccccctctcaggtcgtttggatagtgatgaacagaaaattcagaatgatatcattgatattttactgacttttacacaaggagttaatgaaaaactcacaatctcagaagagactctggccaataatacttggtctttaatgttaaaagaagttctttcttcaatcttgaaggttcctgaaggatttttttctggactcatactcctttcagagctgctgcctcttccattgcccatgcaaacaactcaggttattgagccacatgatatatcagtggcactcaacacccgaaaattgtggagcatgcaccttcatgttcaagcaaagttgctccaagaaatagttcgctctttctctggcacaacctgccagcccattcaacatatgttacggcgtatttgtgttcaattgtgtgaccttgcctcaccaactgcacttctgattatgagaactgtgttggatttgattgtagaagacttgcaaagcacttcagaagataaagaaaaacagtatactagccaaaccaccaggttgcttgctcttcttgatgctctggcttcacacaaagcttgtaaattagctattttgcatctaattaatggaactattaaaggtgatgaaagatatgcagagatattccaggatcttttagctttggtgcggtctcctggagacagtgttattcgccaacagtgtgttgaatatgtcacatccattttgcagtctctctgtgatcaggacattgcacttatcttaccaagctcttctgaaggttctatttctgaactggagcagctctccaattctctaccaaataaagaattgatgacctcaatctgtgactgtctgttggctacgctagctaactctgagagcagttacaactgtttactgacatgtgtcagaacaatgatgtttcttgcagagcatgattatggattatttcatttaaaaagttctttaaggaaaaacagtagtgctctgcatagtttactgaaacgagtggtcagcacatttagtaaggacacaggagagcttgcatcttcatttttagaatttatgagacaaattcttaactctgacacaattggatgctgtggagatgataatggtctcatggaagtagagggagctcatacatcacggacgatgagtattaatgctgcagagttaaaacagcttctacaaagcaaagaagaaagtccagaaaatttgttccttgaactagagaagcttgttttggaacattcaaaagatgatgacaatctggattctttgttggacagtgtagttggacttaagcagatgctggagtcatcaggtgaccctttacctctcagtgaccaggatgtagaaccagtactttcagctccagaatctcttcagaatctgtttaacaataggactgcctatgtgcttgctgatgtcatggatgatcagttgaaatctatgtggttcactccatttcaggctgaagagatagatacagatctggatttggtaaaggttgacttaattgaactctctgaaaaatgctgtagtgactttgatttgcactcagaattagagcgctcatttttgtcagaaccatcatctccaggaagaaccaagactactaaaggattcaaacttgggaagcacaagcatgagacctttataacgtcaagtggaaaatctgaatacattgaacctgccaaaagagctcatgttgtgccaccaccaagaggaaggggcaggggaggatttggacagggtatacgacctcatgatatttttcgtcagagaaaacagaacacaagtagaccaccatctatgcatgtggatgactttgttgctgctgaaagtaaagaagtggttcctcaagatggaatacctccaccaaaacggccactcaaagtatcacagaagatttcttcccgtggtgggttttcaggcaatagaggaggacggggtgctttccacagtcagaataggtttttcacaccacctgcttcaaaagaatactcctcgaggaaattacaatgaaagtcgtggaggccagagcaattttaacagaggccctcttccaccattacgaccccttagttctacaggttaccgcccaagtcctcgggaccgtgcttctagaggtcgtgggggacttggaccttcctgggctagtgcaaatagcggcagtggaggctcaagaggaaagtttgttagtggaggcagtggtagaggtcgtcatgtacgctcctttacacgataaaaatccttttgggaacatcttaactgtatatgaacatttcacgaggacaataaaaataagacattgaaggaccaatttagacttagcagttatctggagacatctgagagaatatttttatctgaagaaagcagaatttgtttgatacctaacaagatttcaataaaaatccaaactttgtatgta

SEQ ID NO: 306259 - DNA, 4473 bp, Homo sapiens
  misc_feature (2015)..(2015): n is a, c, g, or t
ccgcggcaaacatggcggtggactcggcgatggagctgttatttttagatacttttaaacacccgagcgctgagcaaagttctcatatagatgtggttcgttttccatgtgtggtttatatcaatgaagtccgagtcatacccccaggagtaagagcccatagcagtctgccagacaatagagcatatggagagacatctccccatacatttcaattagacttattcttcaacaatgtaagcaaaccaagtgcccctgttttcgataggttgggaagcctggaatatgatgagaatacttccatcatctttagacctaactcaaaggtgaatactgatggtctggtgctaagaggctggtataactgtctgacactggcaatatatggatcagtggatagagtgataagtcatgacagagactctccaccaccaccacctccaccgccaccacctccccagccacaaccaagtttgaaaaggaatccaaaacatgctgatggggagaaagaagatcagtttaatggaagccctccaagaccacagccaaggggaccaagaactcctccaggaccccctccacctgatgatgatgaagatgatcctgtgcctctgccagtgtctggtgacaaggaagaggatgctcctcatagagaagattactttgagcccatttctcctgatcggaattctgttccccaggaagggcaatattctgatgaaggagaagtagaagaggaacaacaagaagaaggagaagaagatgaagatgatgtggatgtagaggaagaagaggatgaggatgaggatgatcgacgaacagtagacagtattcctgaggaggaagaggaagatgaagaggaagaaggtgaagaggatgaagaaggtgaaggggatgatggttatgaacaaatttccagtgatgaagatggaattgctgacttggaacgtgaaacatttaagtatccaaactttgatgttgaatacactgctgaagacttagcttcagttcctcctatgacatatgatccatatgacagggagcttgtaccactcttatacttcagttgtccatacaagactacttttgaaattgaaatcagtagaatgaaggatcaaggtccagataaagaaaattcaggggcaatcgaagcctcagtgaagttaacagaactcttagatttgtatagagaagatagaggtgcaaaatgggtaacagctttagaagaaattccaagtttaataataaaagggttaagctatttgcaattgaaaaacacaaaacaagactcccttggccagttggtagactggaccatgcaagctttaaatttacaagtagcgcttcgccaacctatcgccttaaatgttcgacagctcaaagctgggaccaaattagtgtcctcactagcagaatgtggggctcaaggagttacaggactgctacaagcaggagtgatcagtggattatttgaacttctgtttgctgatcacgtatcatcttctcttaagttaaatgcttttaaagctttggacagtgtcattagtatgacagaaggaatggaagcttttttaagaggtaggcagaatgaaaaaagtggttatcaaaagcttctggaactcatacttttagatcagactgtgagggttgttactgctggttcagctattctccaaaaatgccatttctatgaagtcttgtcagagattaaaagacttggtgaccatttagcagagaagacttcatctcttcctaaccacagtgaacctgatcacgacacagatgctggacttgagagaacaaacccagaatatgaaaatgaggtggaagcttctatggatatggatcttttggaatcctcaaatataagtgaaggggaaatagaaaggcttattaacctcctagaagaagtttttcatttaatggaaactgcccctcatacaatgatccaacaacctgttaagtctttcccaacgatggcacgaattactggacctccagagagggatgatccntaccctgttctctttagatatcttcacagtcatcacttcttggagttggttaccttgcttctgtcaattccagtaacaagtgctcaccctggtgtgctgcaagccacaaaagatgttttgaagtttcttgcacagtcacagaagggtcttcttttttttatgtcggaatatgaagcaacaaatttattgatccgagctctgtgtcacttttatgatcaagatgaggaggaaggtctccaatctgatggtgttattgatgatgcatttgccttgtggctacaggactcaacacagacattgcaatgtattacagaactgttcagccattttcagcgttgtacagccagtgaagaaacagaccattcagatctcttgggaaccctgcacaatctttatttgattacttttaatcctgtgggaagatcagctgttggccatgtttttagtctggagaaaaatctccaaagtcttattactctaatggagtactattccaaagaagccttgggtgattccaaatctaagaagtcagtagcttataattacgcatgcatacttattttggtggtggttcagtcttccagtgatgttcaaatgctagaacaacatgcagcatctctcttgaagctttgtaaagcagatgaaaataatgctaaattgcaagaacttggcaagtggcttgaacctctgaaaaaccttagatttgaaattaactgcatcccaaacttaattgagtatgttaagcagaatatcgataacttgatgaccccagaaggagttggccttaccactgccttacgtgttctctgtaatgttgcatgcccaccacctcctgttgaaggtcaacagaaagatctgaaatggaatcttgccgttattcagcttttttctgctgaaggaatggacacgtttattcgagttctgcaaaaattgaacagtattctgactcagccttggaggctccatgtcaacatggggactacccttcacagagttactactatttcaatggctcgctgcacactcactcttcttaaaactatgttaacggaactcctgagaggtggatcctttgagtttaaggacatgcgtgttccttcagcgcttgttactttacatatgctcctgtgctctatccccctctcaggtcgtttggatagtgatgaacagaaaattcagaatgatatcattgatattttactgacttttacacaaggagttaatgaaaaactcacaatctcagaagagactctggccaataatacttggtctttaatgttaaaagaagttctttcttcaatcttgaaggttcctgaaggatttttttctggactcatactcctttcagagctgctgcctcttccattgcccatgcaaacaactcaggttattgagccacatgatatatcagtggcactcaacacccgaaaattgtggagcatgcaccttcatgttcaagcaaagttgctccaagaaatagttcgctctttctctggcacaacctgccagcccattcaacatatgttacggcgtatttgtgttcaattgtgtgaccttgcctcaccaactgcacttctgattatgagaactgtgttggatttgattgtagaagacttgcaaagcacttcagaagataaagaaaaacagtatactagccaaaccaccaggttgcttgctcttcttgatgctctggcttcacacaaagcttgtaaattagctattttgcatctaattaatggaactattaaaggtgatgaaagatatgcagagatattccaggatcttttagctttggtgcggtctcctggagacagtgttattcgccaacagtgtgttgaatatgtcacatccattttgcagtctctctgtgatcaggacattgcacttatcttaccaagctcttctgaaggttctatttctgaactggagcagctctccaattctctaccaaataaagaattgatgacctcaatctgtgactgtctgttggctacgctagctaactctgagagcagttacaactgtttactgacatgtgtcagaacaatgatgtttcttgcagagcatgattatggattatttcatttaaaaagttctttaaggaaaaacagtagtgctctgcatagtttactgaaacgagtggtcagcacatttagtaaggacacaggagagcttgcatcttcatttttagaatttatgagacaaattcttaactctgacacaattggatgctgtggagatgataatggtctcatggaagtagagggagctcatacatcacggacgatgagtattaatgctgcagagttaaaacagcttctacaaagcaaagaagaaagtccagaaaatttgttccttgaactagagaagcttgttttggaacattcaaaagatgatgacaatctggattctttgttggacagtgtagaaagtgaacgggatcctctagacccccgca

SEQ ID NO: 306260 - DNA, 4072 bp, Homo sapiens
  misc_feature (2015)..(2015): n is a, c, g, or t
ccgcggcaaacatggcggtggactcggcgatggagctgttatttttagatacttttaaacacccgagcgctgagcaaagttctcatatagatgtggttcgttttccatgtgtggtttatatcaatgaagtccgagtcatacccccaggagtaagagcccatagcagtctgccagacaatagagcatatggagagacatctccccatacatttcaattagacttattcttcaacaatgtaagcaaaccaagtgcccctgttttcgataggttgggaagcctggaatatgatgagaatacttccatcatctttagacctaactcaaaggtgaatactgatggtctggtgctaagaggctggtataactgtctgacactggcaatatatggatcagtggatagagtgataagtcatgacagagactctccaccaccaccacctccaccgccaccacctccccagccacaaccaagtttgaaaaggaatccaaaacatgctgatggggagaaagaagatcagtttaatggaagccctccaagaccacagccaaggggaccaagaactcctccaggaccccctccacctgatgatgatgaagatgatcctgtgcctctgccagtgtctggtgacaaggaagaggatgctcctcatagagaagattactttgagcccatttctcctgatcggaattctgttccccaggaagggcaatattctgatgaaggagaagtagaagaggaacaacaagaagaaggagaagaagatgaagatgatgtggatgtagaggaagaagaggatgaggatgaggatgatcgacgaacagtagacagtattcctgaggaggaagaggaagatgaagaggaagaaggtgaagaggatgaagaaggtgaaggggatgatggttatgaacaaatttccagtgatgaagatggaattgctgacttggaacgtgaaacatttaagtatccaaactttgatgttgaatacactgctgaagacttagcttcagttcctcctatgacatatgatccatatgacagggagcttgtaccactcttatacttcagttgtccatacaagactacttttgaaattgaaatcagtagaatgaaggatcaaggtccagataaagaaaattcaggggcaatcgaagcctcagtgaagttaacagaactcttagatttgtatagagaagatagaggtgcaaaatgggtaacagctttagaagaaattccaagtttaataataaaagggttaagctatttgcaattgaaaaacacaaaacaagactcccttggccagttggtagactggaccatgcaagctttaaatttacaagtagcgcttcgccaacctatcgccttaaatgttcgacagctcaaagctgggaccaaattagtgtcctcactagcagaatgtggggctcaaggagttacaggactgctacaagcaggagtgatcagtggattatttgaacttctgtttgctgatcacgtatcatcttctcttaagttaaatgcttttaaagctttggacagtgtcattagtatgacagaaggaatggaagcttttttaagaggtaggcagaatgaaaaaagtggttatcaaaagcttctggaactcatacttttagatcagactgtgagggttgttactgctggttcagctattctccaaaaatgccatttctatgaagtcttgtcagagattaaaagacttggtgaccatttagcagagaagacttcatctcttcctaaccacagtgaacctgatcacgacacagatgctggacttgagagaacaaacccagaatatgaaaatgaggtggaagcttctatggatatggatcttttggaatcctcaaatataagtgaaggggaaatagaaaggcttattaacctcctagaagaagtttttcatttaatggaaactgcccctcatacaatgatccaacaacctgttaagtctttcccaacgatggcacgaattactggacctccagagagggatgatccntaccctgttctctttagatatcttcacagtcatcacttcttggagttggttaccttgcttctgtcaattccagtaacaagtgctcaccctggtgtgctgcaagccacaaaagatgttttgaagtttcttgcacagtcacagaagggtcttcttttttttatgtcggaatatgaagcaacaaatttattgatccgagctctgtgtcacttttatgatcaagatgaggaggaaggtctccaatctgatggtgttattgatgatgcatttgccttgtggctacaggactcaacacagacattgcaatgtattacagaactgttcagccattttcagcgttgtacagccagtgaagaaacagaccattcagatctcttgggaaccctgcacaatctttatttgattacttttaatcctgtgggaagatcagctgttggccatgtttttagtctggagaaaaatctccaaagtcttattactctaatggagtactattccaaagaagccttgggtgattccaaatctaagaagtcagtagcttataattacgcatgcatacttattttggtggtggttcagtcttccagtgatgttcaaatgctagaacaacatgcagcatctctcttgaagctttgtaaagcagatgaaaataatgctaaattgcaagaacttggcaagtggcttgaacctctgaaaaaccttagatttgaaattaactgcatcccaaacttaattgagtatgttaagcagaatatcgataacttgatgaccccagaaggagttggccttaccactgccttacgtgttctctgtaatgttgcatgcccaccacctcctgttgaaggtcaacagaaagatctgaaatggaatcttgccgttattcagcttttttctgctgaaggaatggacacgtttattcgagttctgcaaaaattgaacagtattctgactcagccttggaggctccatgtcaacatggggactacccttcacagagttactactatttcaatggctcgctgcacactcactcttcttaaaactatgttaacggaactcctgagaggtggatcctttgagtttaaggacatgcgtgttccttcagcgcttgttactttacatatgctcctgtgctctatccccctctcaggtcgtttggatagtgatgaacagaaaattcagaatgatatcattgatattttactgacttttacacaaggagttaatgaaaaactcacaatctcagaagagactctggccaataatacttggtctttaatgttaaaagaagttctttcttcaatcttgaaggttcctgaaggatttttttctggactcatactcctttcagagctgctgcctcttccattgcccatgcaaacaactcaggttattgagccacatgatatatcagtggcactcaacacccgaaaattgtggagcatgcaccttcatgttcaagcaaagttgctccaagaaatagttcgctctttctctggcacaacctgccagcccattcaacatatgttacggcgtatttgtgttcaattgtgtgaccttgcctcaccaactgcacttctgattatgagaactgtgttggatttgattgtagaagacttgcaaaggtattttcattttgcattaaaaattttttcctcaaattatttttgacacatatattttttcccttacaatttggaaactagggtttggaatgcccagataacatatatacatgtaaatatacacatatacctacatatgcacacatatgaatatatgaatacttgtagacttttaaaattagaaagctttatttcatcatttcatgtgcaagatatcttgaaggtcttgatttgggattttcaaatggtgaatcctaaagaagtactctgatttaagaaaatatattattagaaacctgaatttataaaatttttgcagtcattgtaaaattccagagaatttgtcattatacccaaggaattaaatgttttatgcaaaatttgtgtaagttgatgtgtattgagaaataaatactagttaaacaatgccttaag

SEQ ID NO: 306261 - DNA, 4056 bp, Homo sapiens
  misc_feature (2015)..(2015): n is a, c, g, or t
ccgcggcaaacatggcggtggactcggcgatggagctgttatttttagatacttttaaacacccgagcgctgagcaaagttctcatatagatgtggttcgttttccatgtgtggtttatatcaatgaagtccgagtcatacccccaggagtaagagcccatagcagtctgccagacaatagagcatatggagagacatctccccatacatttcaattagacttattcttcaacaatgtaagcaaaccaagtgcccctgttttcgataggttgggaagcctggaatatgatgagaatacttccatcatctttagacctaactcaaaggtgaatactgatggtctggtgctaagaggctggtataactgtctgacactggcaatatatggatcagtggatagagtgataagtcatgacagagactctccaccaccaccacctccaccgccaccacctccccagccacaaccaagtttgaaaaggaatccaaaacatgctgatggggagaaagaagatcagtttaatggaagccctccaagaccacagccaaggggaccaagaactcctccaggaccccctccacctgatgatgatgaagatgatcctgtgcctctgccagtgtctggtgacaaggaagaggatgctcctcatagagaagattactttgagcccatttctcctgatcggaattctgttccccaggaagggcaatattctgatgaaggagaagtagaagaggaacaacaagaagaaggagaagaagatgaagatgatgtggatgtagaggaagaagaggatgaggatgaggatgatcgacgaacagtagacagtattcctgaggaggaagaggaagatgaagaggaagaaggtgaagaggatgaagaaggtgaaggggatgatggttatgaacaaatttccagtgatgaagatggaattgctgacttggaacgtgaaacatttaagtatccaaactttgatgttgaatacactgctgaagacttagcttcagttcctcctatgacatatgatccatatgacagggagcttgtaccactcttatacttcagttgtccatacaagactacttttgaaattgaaatcagtagaatgaaggatcaaggtccagataaagaaaattcaggggcaatcgaagcctcagtgaagttaacagaactcttagatttgtatagagaagatagaggtgcaaaatgggtaacagctttagaagaaattccaagtttaataataaaagggttaagctatttgcaattgaaaaacacaaaacaagactcccttggccagttggtagactggaccatgcaagctttaaatttacaagtagcgcttcgccaacctatcgccttaaatgttcgacagctcaaagctgggaccaaattagtgtcctcactagcagaatgtggggctcaaggagttacaggactgctacaagcaggagtgatcagtggattatttgaacttctgtttgctgatcacgtatcatcttctcttaagttaaatgcttttaaagctttggacagtgtcattagtatgacagaaggaatggaagcttttttaagaggtaggcagaatgaaaaaagtggttatcaaaagcttctggaactcatacttttagatcagactgtgagggttgttactgctggttcagctattctccaaaaatgccatttctatgaagtcttgtcagagattaaaagacttggtgaccatttagcagagaagacttcatctcttcctaaccacagtgaacctgatcacgacacagatgctggacttgagagaacaaacccagaatatgaaaatgaggtggaagcttctatggatatggatcttttggaatcctcaaatataagtgaaggggaaatagaaaggcttattaacctcctagaagaagtttttcatttaatggaaactgcccctcatacaatgatccaacaacctgttaagtctttcccaacgatggcacgaattactggacctccagagagggatgatccntaccctgttctctttagatatcttcacagtcatcacttcttggagttggttaccttgcttctgtcaattccagtaacaagtgctcaccctggtgtgctgcaagccacaaaagatgttttgaagtttcttgcacagtcacagaagggtcttcttttttttatgtcggaatatgaagcaacaaatttattgatccgagctctgtgtcacttttatgatcaagatgaggaggaaggtctccaatctgatggtgttattgatgatgcatttgccttgtggctacaggactcaacacagacattgcaatgtattacagaactgttcagccattttcagcgttgtacagccagtgaagaaacagaccattcagatctcttgggaaccctgcacaatctttatttgattacttttaatcctgtgggaagatcagctgttggccatgtttttagtctggagaaaaatctccaaagtcttattactctaatggagtactattccaaagaagccttgggtgattccaaatctaagaagtcagtagcttataattacgcatgcatacttattttggtggtggttcagtcttccagtgatgttcaaatgctagaacaacatgcagcatctctcttgaagctttgtaaagcagatgaaaataatgctaaattgcaagaacttggcaagtggcttgaacctctgaaaaaccttagatttgaaattaactgcatcccaaacttaattgagtatgttaagcagaatatcgataacttgatgaccccagaaggagttggccttaccactgccttacgtgttctctgtaatgttgcatgcccaccacctcctgttgaaggtcaacagaaagatctgaaatggaatcttgccgttattcagcttttttctgctgaaggaatggacacgtttattcgagttctgcaaaaattgaacagtattctgactcagccttggaggctccatgtcaacatggggactacccttcacagagttactactatttcaatggctcgctgcacactcactcttcttaaaactatgttaacggaactcctgagaggtggatcctttgagtttaaggacatgcgtgttccttcagcgcttgttactttacatatgctcctgtgctctatccccctctcaggtcgtttggatagtgatgaacagaaaattcagaatgatatcattgatattttactgacttttacacaaggagttaatgaaaaactcacaatctcagaagagactctggccaataatacttggtctttaatgttaaaagaagttctttcttcaatcttgaaggttcctgaaggatttttttctggactcatactcctttcagagctgctgcctcttccattgcccatgcaaacaactcaggttattgagccacatgatatatcagtggcactcaacacccgaaaattgtggagcatgcaccttcatgttcaagcaaagttgctccaagaaatagttcgctctttctctggcacaacctgccagcccattcaacatatgttacggcgtatttgtgttcaattgtgtgaccttgcctcaccaactgcacttctgattatgagaactgtgttggatttgattgtagaagacttgcaaagttaaaaattttttcctcaaattatttttgacacatatattttttcccttacaatttggaaactagggtttggaatgcccagataacatatatacatgtaaatatacacatatacctacatatgcacacatatgaatatatgaatacttgtagacttttaaaattagaaagctttatttcatcatttcatgtgcaagatatcttgaaggtcttgatttgggattttcaaatggtgaatcctaaagaagtactctgatttaagaaaatatattattagaaacctgaatttataaaatttttgcagtcattgtaaaattccagagaatttgtcattatacccaaggaattaaatgttttatgcaaaatttgtgtaagttgatgtgtattgagaaataaatactagttaaacaatgccttaag

SEQ ID NO: 306262 - DNA, 310 bp, Homo sapiens
tagtctacatttttgtatgactgtaatgcagtggttctctactctggctgtacattagaattacctggtgtgcttttaaaaatttattgatgtccatactcaccccaaagcaattaatccagaatctgggattgattttttttaatcacattttggggacaatacattaaactcaaactttgtggtttattgaatcaaaacaaaaatctagcatttgattatattaaaatatttgaatctagagagacgtcttcatgaactgtgatgttcagtgtttgagcttacatatttatttctactctcttgacag

SEQ ID NO: 306263 - DNA, 495 bp, Homo sapiens
cctgacgttggccccgaggaacctgcatatacagacagtcagcccattatatatatgcagattttgcatccctcaaataccatattttagatctctctttgctttaaaaaaatcacatgtaagtggacccacacagttcaaagccatgttgttcgggggtcatctgtaatttgaaagttctttttctgtctcccataaaacactagctgatggggagaaagaagatcagtttaatggaagccctccaagaccacagccaaggggaccaagaactcctccaggaccccctccacctgatgatgatgaagatgatcctgtgcctctgccaggtataaataaaaccagtgctaaggttttcccccctagttaatagtacatttttgtttttgttttgagatggtctcactctgttgcccagggtggagtacagtggctcactgcagtcttgaccacctgggcttaagtgatcctctcacctcagcctcctaagtagct

SEQ ID NO: 306264 - DNA, 5524 bp, Homo sapiens
  misc_feature (2015)..(2015): n is a, c, g, or t
ccgcggcaaacatggcggtggactcggcgatggagctgttatttttagatacttttaaacacccgagcgctgagcaaagttctcatatagatgtggttcgttttccatgtgtggtttatatcaatgaagtccgagtcatacccccaggagtaagagcccatagcagtctgccagacaatagagcatatggagagacatctccccatacatttcaattagacttattcttcaacaatgtaagcaaaccaagtgcccctgttttcgataggttgggaagcctggaatatgatgagaatacttccatcatctttagacctaactcaaaggtgaatactgatggtctggtgctaagaggctggtataactgtctgacactggcaatatatggatcagtggatagagtgataagtcatgacagagactctccaccaccaccacctccaccgccaccacctccccagccacaaccaagtttgaaaaggaatccaaaacatgctgatggggagaaagaagatcagtttaatggaagccctccaagaccacagccaaggggaccaagaactcctccaggaccccctccacctgatgatgatgaagatgatcctgtgcctctgccagtgtctggtgacaaggaagaggatgctcctcatagagaagattactttgagcccatttctcctgatcggaattctgttccccaggaagggcaatattctgatgaaggagaagtagaagaggaacaacaagaagaaggagaagaagatgaagatgatgtggatgtagaggaagaagaggatgaggatgaggatgatcgacgaacagtagacagtattcctgaggaggaagaggaagatgaagaggaagaaggtgaagaggatgaagaaggtgaaggggatgatggttatgaacaaatttccagtgatgaagatggaattgctgacttggaacgtgaaacatttaagtatccaaactttgatgttgaatacactgctgaagacttagcttcagttcctcctatgacatatgatccatatgacagggagcttgtaccactcttatacttcagttgtccatacaagactacttttgaaattgaaatcagtagaatgaaggatcaaggtccagataaagaaaattcaggggcaatcgaagcctcagtgaagttaacagaactcttagatttgtatagagaagatagaggtgcaaaatgggtaacagctttagaagaaattccaagtttaataataaaagggttaagctatttgcaattgaaaaacacaaaacaagactcccttggccagttggtagactggaccatgcaagctttaaatttacaagtagcgcttcgccaacctatcgccttaaatgttcgacagctcaaagctgggaccaaattagtgtcctcactagcagaatgtggggctcaaggagttacaggactgctacaagcaggagtgatcagtggattatttgaacttctgtttgctgatcacgtatcatcttctcttaagttaaatgcttttaaagctttggacagtgtcattagtatgacagaaggaatggaagcttttttaagaggtaggcagaatgaaaaaagtggttatcaaaagcttctggaactcatacttttagatcagactgtgagggttgttactgctggttcagctattctccaaaaatgccatttctatgaagtcttgtcagagattaaaagacttggtgaccatttagcagagaagacttcatctcttcctaaccacagtgaacctgatcacgacacagatgctggacttgagagaacaaacccagaatatgaaaatgaggtggaagcttctatggatatggatcttttggaatcctcaaatataagtgaaggggaaatagaaaggcttattaacctcctagaagaagtttttcatttaatggaaactgcccctcatacaatgatccaacaacctgttaagtctttcccaacgatggcacgaattactggacctccagagagggatgatccntaccctgttctctttagatatcttcacagtcatcacttcttggagttggttaccttgcttctgtcaattccagtaacaagtgctcaccctggtgtgctgcaagccacaaaagatgttttgaagtttcttgcacagtcacagaagggtcttcttttttttatgtcggaatatgaagcaacaaatttattgatccgagctctgtgtcacttttatgatcaagatgaggaggaaggtctccaatctgatggtgttattgatgatgcatttgccttgtggctacaggactcaacacagacattgcaatgtattacagaactgttcagccattttcagcgttgtacagccagtgaagaaacagaccattcagatctcttgggaaccctgcacaatctttatttgattacttttaatcctgtgggaagatcagctgttggccatgtttttagtctggagaaaaatctccaaagtcttattactctaatggagtactattccaaagaagccttgggtgattccaaatctaagaagtcagtagcttataattacgcatgcatacttattttggtggtggttcagtcttccagtgatgttcaaatgctagaacaacatgcagcatctctcttgaagctttgtaaagcagatgaaaataatgctaaattgcaagaacttggcaagtggcttgaacctctgaaaaaccttagatttgaaattaactgcatcccaaacttaattgagtatgttaagcagaatatcgataacttgatgaccccagaaggagttggccttaccactgccttacgtgttctctgtaatgttgcatgcccaccacctcctgttgaaggtcaacagaaagatctgaaatggaatcttgccgttattcagcttttttctgctgaaggaatggacacgtttattcgagttctgcaaaaattgaacagtattctgactcagccttggaggctccatgtcaacatggggactacccttcacagagttactactatttcaatggctcgctgcacactcactcttcttaaaactatgttaacggaactcctgagaggtggatcctttgagtttaaggacatgcgtgttccttcagcgcttgttactttacatatgctcctgtgctctatccccctctcaggtcgtttggatagtgatgaacagaaaattcagaatgatatcattgatattttactgacttttacacaaggagttaatgaaaaactcacaatctcagaagagactctggccaataatacttggtctttaatgttaaaagaagttctttcttcaatcttgaaggttcctgaaggatttttttctggactcatactcctttcagagctgctgcctcttccattgcccatgcaaacaactcaggttattgagccacatgatatatcagtggcactcaacacccgaaaattgtggagcatgcaccttcatgttcaagcaaagttgctccaagaaatagttcgctctttctctggcacaacctgccagcccattcaacatatgttacggcgtatttgtgttcaattgtgtgaccttgcctcaccaactgcacttctgattatgagaactgtgttggatttgattgtagaagacttgcaaagcacttcagaagataaagaaaaacagtatactagccaaaccaccaggttgcttgctcttcttgatgctctggcttcacacaaagcttgtaaattagctattttgcatctaattaatggaactattaaaggtgatgaaagatatgcagagatattccaggatcttttagctttggtgcggtctcctggagacagtgttattcgccaacagtgtgttgaatatgtcacatccattttgcagtctctctgtgatcaggacattgcacttatcttaccaagctcttctgaaggttctatttctgaactggagcagctctccaattctctaccaaataaagaattgatgacctcaatctgtgactgtctgttggctacgctagctaactctgagagcagttacaactgtttactgacatgtgtcagaacaatgatgtttcttgcagagcatgattatggattatttcatttaaaaagttctttaaggaaaaacagtagtgctctgcatagtttactgaaacgagtggtcagcacatttagtaaggacacaggagagcttgcatcttcatttttagaatttatgagacaaattcttaactctgacacaattggatgctgtggagatgataatggtctcatggaagtagagggagctcatacatcacggacgatgagtattaatgctgcagagttaaaacagcttctacaaagcaaagaagaaagtccagaaaatttgttccttgaactagagaagcttgttttggaacattcaaaagatgatgacaatctggattctttgttggacagtgtagttggacttaagcagatgctggagtcatcaggtgaccctttacctctcagtgaccaggatgtagaaccagtactttcagctccagaatctcttcagaatctgtttaacaataggactgcctatgtgcttgctgatgtcatggatgatcagttgaaatctatgtggttcactccatttcaggctgaagagatagatacagatctggatttggtaaaggttgacttaattgaactctctgaaaaatgctgtagtgactttgatttgcactcagaattagagcgctcatttttgtcagaaccatcatctccaggaagaaccaagactactaaaggattcaaacttgggaagcacaagcatgagacctttataacgtcaagtggaaaatctgaatacattgaacctgccaaaagagctcatgttgtgccaccaccaagaggaaggggcaggggaggatttggacagggtatacgacctcatgatatttttcgtcagagaaaacagaacacaagtagaccaccatctatgcatgtggatgactttgttgctgctgaaagtaaagaagtggttcctcaagatggaatacctccaccaaaacggccactcaaagtatcacagaaggaacaagaggctccagttggagtgctcagaatactcctcgaggaaattacaatgaaagtcgtggaggccagagcaattttaacagaggccctcttccaccattacgaccccttagttctacaggttaccgcccaagtcctcgggaccgtgcttctagaggtcgtgggggacttggaccttcctgggctagtgcaaatagcggcagtggaggctcaagaggaaagtttgttagtggaggcagtggtagaggtcgtcatgtacgctcctttacacgataaaaatccttttgggaacatcttaactgtatatgaacatttcacgaggacaataaaaataagacattgaaggaccaatttagacttagcagttatctggagacatctgagagaatatttttatctgaagaaagcagaatttgtttgatacctaacaagatttcaataaaaatccaaactttgtatgta

SEQ ID NO: 306265 - DNA, 5571 bp, Homo sapiens
  misc_feature (1950)..(1950): n is a, c, g, or t
tccagcctgggcgacaagagcaagactccgtctcaaaaaaaaaaaaaaaaaaaagaaaagaagaaaaagtaaagaagggcaagaggaagagactagagttgttgggtgcatatgattgaatttggagagacatctccccatacatttcaattagacttattcttcaacaatgtaagcaaaccaagtgcccctgttttcgataggttgggaagcctggaatatgatgagaatacttccatcatctttagacctaactcaaaggtgaatactgatggtctggtgctaagaggctggtataactgtctgacactggcaatatatggatcagtggatagagtgataagtcatgacagagactctccaccaccaccacctccaccgccaccacctccccagccacaaccaagtttgaaaaggaatccaaaacatgctgatggggagaaagaagatcagtttaatggaagccctccaagaccacagccaaggggaccaagaactcctccaggaccccctccacctgatgatgatgaagatgatcctgtgcctctgccagtgtctggtgacaaggaagaggatgctcctcatagagaagattactttgagcccatttctcctgatcggaattctgttccccaggaagggcaatattctgatgaaggagaagtagaagaggaacaacaagaagaaggagaagaagatgaagatgatgtggatgtagaggaagaagaggatgaggatgaggatgatcgacgaacagtagacagtattcctgaggaggaagaggaagatgaagaggaagaaggtgaagaggatgaagaaggtgaaggggatgatggttatgaacaaatttccagtgatgaagatggaattgctgacttggaacgtgaaacatttaagtatccaaactttgatgttgaatacactgctgaagacttagcttcagttcctcctatgacatatgatccatatgacagggagcttgtaccactcttatacttcagttgtccatacaagactacttttgaaattgaaatcagtagaatgaaggatcaaggtccagataaagaaaattcaggggcaatcgaagcctcagtgaagttaacagaactcttagatttgtatagagaagatagaggtgcaaaatgggtaacagctttagaagaaattccaagtttaataataaaagggttaagctatttgcaattgaaaaacacaaaacaagactcccttggccagttggtagactggaccatgcaagctttaaatttacaagtagcgcttcgccaacctatcgccttaaatgttcgacagctcaaagctgggaccaaattagtgtcctcactagcagaatgtggggctcaaggagttacaggactgctacaagcaggagtgatcagtggattatttgaacttctgtttgctgatcacgtatcatcttctcttaagttaaatgcttttaaagctttggacagtgtcattagtatgacagaaggaatggaagcttttttaagaggtaggcagaatgaaaaaagtggttatcaaaagcttctggaactcatacttttagatcagactgtgagggttgttactgctggttcagctattctccaaaaatgccatttctatgaagtcttgtcagagattaaaagacttggtgaccatttagcagagaagacttcatctcttcctaaccacagtgaacctgatcacgacacagatgctggacttgagagaacaaacccagaatatgaaaatgaggtggaagcttctatggatatggatcttttggaatcctcaaatataagtgaaggggaaatagaaaggcttattaacctcctagaagaagtttttcatttaatggaaactgcccctcatacaatgatccaacaacctgttaagtctttcccaacgatggcacgaattactggacctccagagagggatgatccntaccctgttctctttagatatcttcacagtcatcacttcttggagttggttaccttgcttctgtcaattccagtaacaagtgctcaccctggtgtgctgcaagccacaaaagatgttttgaagtttcttgcacagtcacagaagggtcttcttttttttatgtcggaatatgaagcaacaaatttattgatccgagctctgtgtcacttttatgatcaagatgaggaggaaggtctccaatctgatggtgttattgatgatgcatttgccttgtggctacaggactcaacacagacattgcaatgtattacagaactgttcagccattttcagcgttgtacagccagtgaagaaacagaccattcagatctcttgggaaccctgcacaatctttatttgattacttttaatcctgtgggaagatcagctgttggccatgtttttagtctggagaaaaatctccaaagtcttattactctaatggagtactattccaaagaagccttgggtgattccaaatctaagaagtcagtagcttataattacgcatgcatacttattttggtggtggttcagtcttccagtgatgttcaaatgctagaacaacatgcagcatctctcttgaagctttgtaaagcagatgaaaataatgctaaattgcaagaacttggcaagtggcttgaacctctgaaaaaccttagatttgaaattaactgcatcccaaacttaattgagtatgttaagcagaatatcgataacttgatgaccccagaaggagttggccttaccactgccttacgtgttctctgtaatgttgcatgcccaccacctcctgttgaaggtcaacagaaagatctgaaatggaatcttgccgttattcagcttttttctgctgaaggaatggacacgtttattcgagttctgcaaaaattgaacagtattctgactcagccttggaggctccatgtcaacatggggactacccttcacagagttactactatttcaatggctcgctgcacactcactcttcttaaaactatgttaacggaactcctgagaggtggatcctttgagtttaaggacatgcgtgttccttcagcgcttgttactttacatatgctcctgtgctctatccccctctcaggtcgtttggatagtgatgaacagaaaattcagaatgatatcattgatattttactgacttttacacaaggagttaatgaaaaactcacaatctcagaagagactctggccaataatacttggtctttaatgttaaaagaagttctttcttcaatcttgaaggttcctgaaggatttttttctggactcatactcctttcagagctgctgcctcttccattgcccatgcaaacaactcaggttattgagccacatgatatatcagtggcactcaacacccgaaaattgtggagcatgcaccttcatgttcaagcaaagttgctccaagaaatagttcgctctttctctggcacaacctgccagcccattcaacatatgttacggcgtatttgtgttcaattgtgtgaccttgcctcaccaactgcacttctgattatgagaactgtgttggatttgattgtagaagacttgcaaagcacttcagaagataaagaaaaacagtatactagccaaaccaccaggttgcttgctcttcttgatgctctggcttcacacaaagcttgtaaattagctattttgcatctaattaatggaactattaaaggtgatgaaagatatgcagagatattccaggatcttttagctttggtgcggtctcctggagacagtgttattcgccaacagtgtgttgaatatgtcacatccattttgcagtctctctgtgatcaggacattgcacttatcttaccaagctcttctgaaggttctatttctgaactggagcagctctccaattctctaccaaataaagaattgatgacctcaatctgtgactgtctgttggctacgctagctaactctgagagcagttacaactgtttactgacatgtgtcagaacaatgatgtttcttgcagagcatgattatggattatttcatttaaaaagttctttaaggaaaaacagtagtgctctgcatagtttactgaaacgagtggtcagcacatttagtaaggacacaggagagcttgcatcttcatttttagaatttatgagacaaattcttaactctgacacaattggatgctgtggagatgataatggtctcatggaagtagagggagctcatacatcacggacgatgagtattaatgctgcagagttaaaacagcttctacaaagcaaagaagaaagtccagaaaatttgttccttgaactagagaagcttgttttggaacattcaaaagatgatgacaatctggattctttgttggacagtgtagttggacttaagcagatgctggagtcatcaggtgaccctttacctctcagtgaccaggatgtagaaccagtactttcagctccagaatctcttcagaatctgtttaacaataggactgcctatgtgcttgctgatgtcatggatgatcagttgaaatctatgtggttcactccatttcaggctgaagagatagatacagatctggatttggtaaaggttgacttaattgaactctctgaaaaatgctgtagtgactttgatttgcactcagaattagagcgctcatttttgtcagaaccatcatctccaggaagaaccaagactactaaaggattcaaacttgggaagcacaagcatgagacctttataacgtcaagtggaaaatctgaatacattgaacctgccaaaagagctcatgttgtgccaccaccaagaggaaggggcaggggaggatttggacagggtatacgacctcatgatatttttcgtcagagaaaacagaacacaagtagaccaccatctatgcatgtggatgactttgttgctgctgaaagtaaagaagtggttcctcaagatggaatacctccaccaaaacggccactcaaagtatcacagaagatttcttcccgtggtgggttttcaggcaatagaggaggacggggtgctttccacagtcagaataggtttttcacaccacctgcttcaaaaggaaactacagtcgtcgggaaggaacaagaggctccagttggagtgctcagaatactcctcgaggaaattacaatgaaagtcgtggaggccagagcaattttaacagaggccctcttccaccattacgaccccttagttctacaggttaccgcccaagtcctcgggaccgtgcttctagaggtcgtgggggacttggaccttcctgggctagtgcaaatagcggcagtggaggctcaagaggaaagtttgttagtggaggcagtggtagaggtcgtcatgtacgctcctttacacgataaaaatccttttgggaacatcttaactgtatatgaacatttcacgaggacaataaaaataagacattgaaggaccaatttagacttagcagttatctggagacatctgagagaatatttttatctgaagaaagcagaatttgtttgatacctaacaagatttcaataaaaatccaaactttgtatgta

SEQ ID NO: 306266 - DNA, 5582 bp, Homo sapiens
  misc_feature (2015)..(2015): n is a, c, g, or t
ccgcggcaaacatggcggtggactcggcgatggagctgttatttttagatacttttaaacacccgagcgctgagcaaagttctcatatagatgtggttcgttttccatgtgtggtttatatcaatgaagtccgagtcatacccccaggagtaagagcccatagcagtctgccagacaatagagcatatggagagacatctccccatacatttcaattagacttattcttcaacaatgtaagcaaaccaagtgcccctgttttcgataggttgggaagcctggaatatgatgagaatacttccatcatctttagacctaactcaaaggtgaatactgatggtctggtgctaagaggctggtataactgtctgacactggcaatatatggatcagtggatagagtgataagtcatgacagagactctccaccaccaccacctccaccgccaccacctccccagccacaaccaagtttgaaaaggaatccaaaacatgctgatggggagaaagaagatcagtttaatggaagccctccaagaccacagccaaggggaccaagaactcctccaggaccccctccacctgatgatgatgaagatgatcctgtgcctctgccagtgtctggtgacaaggaagaggatgctcctcatagagaagattactttgagcccatttctcctgatcggaattctgttccccaggaagggcaatattctgatgaaggagaagtagaagaggaacaacaagaagaaggagaagaagatgaagatgatgtggatgtagaggaagaagaggatgaggatgaggatgatcgacgaacagtagacagtattcctgaggaggaagaggaagatgaagaggaagaaggtgaagaggatgaagaaggtgaaggggatgatggttatgaacaaatttccagtgatgaagatggaattgctgacttggaacgtgaaacatttaagtatccaaactttgatgttgaatacactgctgaagacttagcttcagttcctcctatgacatatgatccatatgacagggagcttgtaccactcttatacttcagttgtccatacaagactacttttgaaattgaaatcagtagaatgaaggatcaaggtccagataaagaaaattcaggggcaatcgaagcctcagtgaagttaacagaactcttagatttgtatagagaagatagaggtgcaaaatgggtaacagctttagaagaaattccaagtttaataataaaagggttaagctatttgcaattgaaaaacacaaaacaagactcccttggccagttggtagactggaccatgcaagctttaaatttacaagtagcgcttcgccaacctatcgccttaaatgttcgacagctcaaagctgggaccaaattagtgtcctcactagcagaatgtggggctcaaggagttacaggactgctacaagcaggagtgatcagtggattatttgaacttctgtttgctgatcacgtatcatcttctcttaagttaaatgcttttaaagctttggacagtgtcattagtatgacagaaggaatggaagcttttttaagaggtaggcagaatgaaaaaagtggttatcaaaagcttctggaactcatacttttagatcagactgtgagggttgttactgctggttcagctattctccaaaaatgccatttctatgaagtcttgtcagagattaaaagacttggtgaccatttagcagagaagacttcatctcttcctaaccacagtgaacctgatcacgacacagatgctggacttgagagaacaaacccagaatatgaaaatgaggtggaagcttctatggatatggatcttttggaatcctcaaatataagtgaaggggaaatagaaaggcttattaacctcctagaagaagtttttcatttaatggaaactgcccctcatacaatgatccaacaacctgttaagtctttcccaacgatggcacgaattactggacctccagagagggatgatccntaccctgttctctttagatatcttcacagtcatcacttcttggagttggttaccttgcttctgtcaattccagtaacaagtgctcaccctggtgtgctgcaagccacaaaagatgttttgaagtttcttgcacagtcacagaagggtcttcttttttttatgtcggaatatgaagcaacaaatttattgatccgagctctgtgtcacttttatgatcaagatgaggaggaaggtctccaatctgatggtgttattgatgatgcatttgccttgtggctacaggactcaacacagacattgcaatgtattacagaactgttcagccattttcagcgttgtacagccagtgaagaaacagaccattcagatctcttgggaaccctgcacaatctttatttgattacttttaatcctgtgggaagatcagctgttggccatgtttttagtctggagaaaaatctccaaagtcttattactctaatggagtactattccaaagaagccttgggtgattccaaatctaagaagtcagtagcttataattacgcatgcatacttattttggtggtggttcagtcttccagtgatgttcaaatgctagaacaacatgcagcatctctcttgaagctttgtaaagcagatgaaaataatgctaaattgcaagaacttggcaagtggcttgaacctctgaaaaaccttagatttgaaattaactgcatcccaaacttaattgagtatgttaagcagaatatcgataacttgatgaccccagaaggagttggccttaccactgccttacgtgttctctgtaatgttgcatgcccaccacctcctgttgaaggtcaacagaaagatctgaaatggaatcttgccgttattcagcttttttctgctgaaggaatggacacgtttattcgagttctgcaaaaattgaacagtattctgactcagccttggaggctccatgtcaacatggggactacccttcacagagttactactatttcaatggctcgctgcacactcactcttcttaaaactatgttaacggaactcctgagaggtggatcctttgagtttaaggacatgcgtgttccttcagcgcttgttactttacatatgctcctgtgctctatccccctctcaggtcgtttggatagtgatgaacagaaaattcagaatgatatcattgatattttactgacttttacacaaggagttaatgaaaaactcacaatctcagaagagactctggccaataatacttggtctttaatgttaaaagaagttctttcttcaatcttgaaggttcctgaaggatttttttctggactcatactcctttcagagctgctgcctcttccattgcccatgcaaacaactcaggttattgagccacatgatatatcagtggcactcaacacccgaaaattgtggagcatgcaccttcatgttcaagcaaagttgctccaagaaatagttcgctctttctctggcacaacctgccagcccattcaacatatgttacggcgtatttgtgttcaattgtgtgaccttgcctcaccaactgcacttctgattatgagaactgtgttggatttgattgtagaagacttgcaaagcacttcagaagataaagaaaaacagtatactagccaaaccaccaggttgcttgctcttcttgatgctctggcttcacacaaagcttgtaaattagctattttgcatctaattaatggaactattaaaggtgatgaaagatatgcagagatattccaggatcttttagctttggtgcggtctcctggagacagtgttattcgccaacagtgtgttgaatatgtcacatccattttgcagtctctctgtgatcaggacattgcacttatcttaccaagctcttctgaaggttctatttctgaactggagcagctctccaattctctaccaaataaagaattgatgacctcaatctgtgactgtctgttggctacgctagctaactctgagagcagttacaactgtttactgacatgtgtcagaacaatgatgtttcttgcagagcatgattatggattatttcatttaaaaagcacatttagtaaggacacaggagagcttgcatcttcatttttagaatttatgagacaaattcttaactctgacacaattggatgctgtggagatgataatggtctcatggaagtagagggagctcatacatcacggacgatgagtattaatgctgcagagttaaaacagcttctacaaagcaaagaagaaagtccagaaaatttgttccttgaactagagaagcttgttttggaacattcaaaagatgatgacaatctggattctttgttggacagtgtagttggacttaagcagatgctggagtcatcaggtgaccctttacctctcagtgaccaggatgtagaaccagtactttcagctccagaatctcttcagaatctgtttaacaataggactgcctatgtgcttgctgatgtcatggatgatcagttgaaatctatgtggttcactccatttcaggctgaagagatagatacagatctggatttggtaaaggttgacttaattgaactctctgaaaaatgctgtagtgactttgatttgcactcagaattagagcgctcatttttgtcagaaccatcatctccaggaagaaccaagactactaaaggattcaaacttgggaagcacaagcatgagacctttataacgtcaagtggaaaatctgaatacattgaacctgccaaaagagctcatgttgtgccaccaccaagaggaaggggcaggggaggatttggacagggtatacgacctcatgatatttttcgtcagagaaaacagaacacaagtagaccaccatctatgcatgtggatgactttgttgctgctgaaagtaaagaagtggttcctcaagatggaatacctccaccaaaacggccactcaaagtatcacagaagatttcttcccgtggtgggttttcaggcaatagaggaggacggggtgctttccacagtcagaataggtttttcacaccacctgcttcaaaaggaaactacagtcgtcgggaaggaacaagaggctccagttggagtgctcagaatactcctcgaggaaattacaatgaaagtcgtggaggccagagcaattttaacagaggccctcttccaccattacgaccccttagttctacaggttaccgcccaagtcctcgggaccgtgcttctagaggtcgtgggggacttggaccttcctgggctagtgcaaatagcggcagtggaggctcaagaggaaagtttgttagtggaggcagtggtagaggtcgtcatgtacgctcctttacacgataaaaatccttttgggaacatcttaactgtatatgaacatttcacgaggacaataaaaataagacattgaaggaccaatttagacttagcagttatctggagacatctgagagaatatttttatctgaagaaagcagaatttgtttgatacctaacaagatttcaataaaaatccaaactttgtatgta

SEQ ID NO: 306267 - DNA, 5304 bp, Homo sapiens
  misc_feature (2015)..(2015): n is a, c, g, or t
ccgcggcaaacatggcggtggactcggcgatggagctgttatttttagatacttttaaacacccgagcgctgagcaaagttctcatatagatgtggttcgttttccatgtgtggtttatatcaatgaagtccgagtcatacccccaggagtaagagcccatagcagtctgccagacaatagagcatatggagagacatctccccatacatttcaattagacttattcttcaacaatgtaagcaaaccaagtgcccctgttttcgataggttgggaagcctggaatatgatgagaatacttccatcatctttagacctaactcaaaggtgaatactgatggtctggtgctaagaggctggtataactgtctgacactggcaatatatggatcagtggatagagtgataagtcatgacagagactctccaccaccaccacctccaccgccaccacctccccagccacaaccaagtttgaaaaggaatccaaaacatgctgatggggagaaagaagatcagtttaatggaagccctccaagaccacagccaaggggaccaagaactcctccaggaccccctccacctgatgatgatgaagatgatcctgtgcctctgccagtgtctggtgacaaggaagaggatgctcctcatagagaagattactttgagcccatttctcctgatcggaattctgttccccaggaagggcaatattctgatgaaggagaagtagaagaggaacaacaagaagaaggagaagaagatgaagatgatgtggatgtagaggaagaagaggatgaggatgaggatgatcgacgaacagtagacagtattcctgaggaggaagaggaagatgaagaggaagaaggtgaagaggatgaagaaggtgaaggggatgatggttatgaacaaatttccagtgatgaagatggaattgctgacttggaacgtgaaacatttaagtatccaaactttgatgttgaatacactgctgaagacttagcttcagttcctcctatgacatatgatccatatgacagggagcttgtaccactcttatacttcagttgtccatacaagactacttttgaaattgaaatcagtagaatgaaggatcaaggtccagataaagaaaattcaggggcaatcgaagcctcagtgaagttaacagaactcttagatttgtatagagaagatagaggtgcaaaatgggtaacagctttagaagaaattccaagtttaataataaaagggttaagctatttgcaattgaaaaacacaaaacaagactcccttggccagttggtagactggaccatgcaagctttaaatttacaagtagcgcttcgccaacctatcgccttaaatgttcgacagctcaaagctgggaccaaattagtgtcctcactagcagaatgtggggctcaaggagttacaggactgctacaagcaggagtgatcagtggattatttgaacttctgtttgctgatcacgtatcatcttctcttaagttaaatgcttttaaagctttggacagtgtcattagtatgacagaaggaatggaagcttttttaagaggtaggcagaatgaaaaaagtggttatcaaaagcttctggaactcatacttttagatcagactgtgagggttgttactgctggttcagctattctccaaaaatgccatttctatgaagtcttgtcagagattaaaagacttggtgaccatttagcagagaagacttcatctcttcctaaccacagtgaacctgatcacgacacagatgctggacttgagagaacaaacccagaatatgaaaatgaggtggaagcttctatggatatggatcttttggaatcctcaaatataagtgaaggggaaatagaaaggcttattaacctcctagaagaagtttttcatttaatggaaactgcccctcatacaatgatccaacaacctgttaagtctttcccaacgatggcacgaattactggacctccagagagggatgatccntaccctgttctctttagatatcttcacagtcatcacttcttggagttggttaccttgcttctgtcaattccagtaacaagtgctcaccctggtgtgctgcaagccacaaaagatgttttgaagtttcttgcacagtcacagaagggtcttcttttttttatgtcggaatatgaagcaacaaatttattgatccgagctctgtgtcacttttatgatcaagatgaggaggaaggtctccaatctgatggtgttattgatgatgcatttgccttgtggctacaggactcaacacagacattgcaatgtattacagaactgttcagccattttcagcgttgtacagccagtgaagaaacagaccattcagatctcttgggaaccctgcacaatctttatttgattacttttaatcctgtgggaagatcagctgttggccatgtttttagtctggagaaaaatctccaaagtcttattactctaatggagtactattccaaagaagccttgggtgattccaaatctaagaagtcagtagcttataattacgcatgcatacttattttggtggtggttcagtcttccagtgatgttcaaatgctagaacaacatgcagcatctctcttgaagctttgtaaagcagatgaaaataatgctaaattgcaagaacttggcaagtggcttgaacctctgaaaaaccttagatttgaaattaactgcatcccaaacttaattgagtatgttaagcagaatatcgataacttgatgaccccagaaggagttggccttaccactgccttacgtgttctctgtaatgttgcatgcccaccacctcctgttgaaggtcaacagaaagatctgaaatggaatcttgccgttattcagcttttttctgctgaaggaatggacacgtttattcgagttctgcaaaaattgaacagtattctgactcagccttggaggctccatgtcaacatggggactacccttcacagagttactactatttcaatggctcgctgcacactcactcttcttaaaactatgttaacggaactcctgagaggtggatcctttgagtttaaggacatgcgtgttccttcagcgcttgttactttacatatgctcctgtgctctatccccctctcaggtcgtttggatagtgatgaacagaaaattcagaatgatatcattgatattttactgacttttacacaaggagttaatgaaaaactcacaatctcagaagagactctggccaataatacttggtctttaatgttaaaagaagttctttcttcaatcttgaaggttcctgaaggatttttttctggactcatactcctttcagagctgctgcctcttccattgcccatgcaaacaactcaggttattgagccacatgatatatcagtggcactcaacacccgaaaattgtggagcatgcaccttcatgttcaagcaaagttgctccaagaaatagttcgctctttctctggcacaacctgccagcccattcaacatatgttacggcgtatttgtgttcaattgtgtgaccttgcctcaccaactgcacttctgattatgagaactgtgttggatttgattgtagaagacttgcaaagcacttcagaagataaagaaaaacagtatactagccaaaccaccaggttgcttgctcttcttgatgctctggcttcacacaaagcttgtaaattagctattttgcatctaattaatggaactattaaaggtgatgaaagatatgcagagatattccaggatcttttagctttggtgcggtctcctggagacagtgttattcgccaacagtgtgttgaatatgtcacatccattttgcagtctctctgtgatcaggacattgcacttatcttaccaagctcttctgaaggttctatttctgaactggagcagctctccaattctctaccaaataaagaattgatgacctcaatctgtgactgtctgttggctacgctagctaactctgagagcagttacaactgtttactgacatgtgtcagaacaatgatgtttcttgcagagcatgattatggattatttcatttaaaaagttctttaaggaaaaacagtagtgctctgcatagtttactgaaacgagtggtcagcacatttagtaaggacacaggagagcttgcatcttcatttttagaatttatgagacaaattcttaactctgacacaattggatgctgtggagatgataatggtctcatggaagtagagggagctcatacatcacggacgatgagtattaatgctgcagagttaaaacagcttctacaaagcaaagaagaaagtccagaaaatttgttccttgaactagagaagcttgttttggaacattcaaaagatgatgacaatctggattctttgttggacagtgtagttggacttaagcagatgctggagtcatcaggtgaccctttacctctcagtgaccaggatgtagaaccagtactttcagctccagaatctcttcagaatctgtttaacaataggactgcctatgtgcttgctgatgtcatggatgatcagttgaaatctatgtggttcactccatttcaggctgaagagatagatacagatctggatttggtaaaggttgacttaattgaactctctgaaaaatgctgtagtgactttgatttgcactcagaattagagcgctcatttttgtcagaaccatcatctccaggaagaaccaagactactaaaggattcaaacttgggaagcacaagcatgagacctttataacgtcaaggaaactacagtcgtcgggaaggaacaagaggctccagttggagtgctcagaatactcctcgaggaaattacaatgaaagtcgtggaggccagagcaattttaacagaggccctcttccaccattacgaccccttagttctacaggttaccgcccaagtcctcgggaccgtgcttctagaggtcgtgggggacttggaccttcctgggctagtgcaaatagcggcagtggaggctcaagaggaaagtttgttagtggaggcagtggtagaggtcgtcatgtacgctcctttacacgataaaaatccttttgggaacatcttaactgtatatgaacatttcacgaggacaataaaaataagacattgaaggaccaatttagacttagcagttatctggagacatctgagagaatatttttatctgaagaaagcagaatttgtttgatacctaacaagatttcaataaaaatccaaactttgtatgta

SEQ ID NO: 306268 - DNA, 899 bp, Homo sapiens
tcaagtggaaaatctgaatacattgacgttataaaggtctcatgcttgtgcttcccaagtttgagacctttataacgtcaagtggaaaatctgaatacattgaacctgccaaaagagctcatgttgtgccaccaccaagaggaaggggcaggggaggatttggacagggtatacgacctcatgatatttttcgtcagagaaaacagaacacaagtagaccaccatctatgcatgtggatgactttgttgctgctgaaagtaaagaagtggttcctcaagatggaatacctccaccaaaacggccactcaaagtatcacagaagatttcttcccgtggtgggttttcaggcaatagaggaggacggggtgctttccacagtcagaataggtttttcacaccacctgcttcaaaaggaaactacagtcgtcgggaaggaacaagaggctccagttggagtgctcagaatactcctcgaggaaattacaatgaaagtcgtggaggccagagcaattttaacagaggccctcttccaccattacgaccccttagttctacaggttaccgcccaagtcctcgggaccgtgcttctagaggtcgtgggggacttggaccttcctgggctagtgcaaatagcggcagtggaggctcaagaggaaagtttgttagtggaggcagtggtagaggtcgtcatgtacgctcctttacacgataaaaatccttttgggaacatcttaactgtatatgaacatttcacgaggacaataaaaataagacattgaaggaccaatttagacttagcagttatctggagacatctgagagaatatttttatctgaagaaagcagaatttgtttgatacctaacaagatttcaataaaaatccaaactttgtatgta

SEQ ID NO: 306269 - DNA, 3892 bp, Homo sapiens
  misc_feature (2015)..(2015): n is a, c, g, or t
ccgcggcaaacatggcggtggactcggcgatggagctgttatttttagatacttttaaacacccgagcgctgagcaaagttctcatatagatgtggttcgttttccatgtgtggtttatatcaatgaagtccgagtcatacccccaggagtaagagcccatagcagtctgccagacaatagagcatatggagagacatctccccatacatttcaattagacttattcttcaacaatgtaagcaaaccaagtgcccctgttttcgataggttgggaagcctggaatatgatgagaatacttccatcatctttagacctaactcaaaggtgaatactgatggtctggtgctaagaggctggtataactgtctgacactggcaatatatggatcagtggatagagtgataagtcatgacagagactctccaccaccaccacctccaccgccaccacctccccagccacaaccaagtttgaaaaggaatccaaaacatgctgatggggagaaagaagatcagtttaatggaagccctccaagaccacagccaaggggaccaagaactcctccaggaccccctccacctgatgatgatgaagatgatcctgtgcctctgccagtgtctggtgacaaggaagaggatgctcctcatagagaagattactttgagcccatttctcctgatcggaattctgttccccaggaagggcaatattctgatgaaggagaagtagaagaggaacaacaagaagaaggagaagaagatgaagatgatgtggatgtagaggaagaagaggatgaggatgaggatgatcgacgaacagtagacagtattcctgaggaggaagaggaagatgaagaggaagaaggtgaagaggatgaagaaggtgaaggggatgatggttatgaacaaatttccagtgatgaagatggaattgctgacttggaacgtgaaacatttaagtatccaaactttgatgttgaatacactgctgaagacttagcttcagttcctcctatgacatatgatccatatgacagggagcttgtaccactcttatacttcagttgtccatacaagactacttttgaaattgaaatcagtagaatgaaggatcaaggtccagataaagaaaattcaggggcaatcgaagcctcagtgaagttaacagaactcttagatttgtatagagaagatagaggtgcaaaatgggtaacagctttagaagaaattccaagtttaataataaaagggttaagctatttgcaattgaaaaacacaaaacaagactcccttggccagttggtagactggaccatgcaagctttaaatttacaagtagcgcttcgccaacctatcgccttaaatgttcgacagctcaaagctgggaccaaattagtgtcctcactagcagaatgtggggctcaaggagttacaggactgctacaagcaggagtgatcagtggattatttgaacttctgtttgctgatcacgtatcatcttctcttaagttaaatgcttttaaagctttggacagtgtcattagtatgacagaaggaatggaagcttttttaagaggtaggcagaatgaaaaaagtggttatcaaaagcttctggaactcatacttttagatcagactgtgagggttgttactgctggttcagctattctccaaaaatgccatttctatgaagtcttgtcagagattaaaagacttggtgaccatttagcagagaagacttcatctcttcctaaccacagtgaacctgatcacgacacagatgctggacttgagagaacaaacccagaatatgaaaatgaggtggaagcttctatggatatggatcttttggaatcctcaaatataagtgaaggggaaatagaaaggcttattaacctcctagaagaagtttttcatttaatggaaactgcccctcatacaatgatccaacaacctgttaagtctttcccaacgatggcacgaattactggacctccagagagggatgatccntaccctgttctctttagatatcttcacagtcatcacttcttggagttggttaccttgcttctgtcaattccagtaacaagtgctcaccctggtgtgctgcaagccacaaaagatgttttgaagtttcttgcacagtcacagaagggtcttcttttttttatgtcggaatatgaagcaacaaatttattgatccgagctctgtgtcacttttatgatcaagatgaggaggaaggtctccaatctgatggtgttattgatgatgcatttgccttgtggctacaggactcaacacagacattgcaatgtattacagaactgttcagccattttcagcgttgtacagccagtgaagaaacagaccattcagatctcttgggaaccctgcacaatctttatttgattacttttaatcctgtgggaagatcagctgttggccatgtttttagtctggagaaaaatctccaaagtcttattactctaatggagtactattccaaagaagccttgggtgattccaaatctaagaagtcagtagcttataattacgcatgcatacttattttggtggtggttcagtcttccagtgatgttcaaatgctagaacaacatgcagcatctctcttgaagctttgtaaagcagatgaaaataatgctaaattgcaagaacttggcaagtggcttgaacctctgaaaaaccttagatttgaaattaactgcatcccaaacttaattgagtatgttaagcagaatatcgataacttgatgaccccagaaggagttggccttaccactgccttacgtgttctctgtaatgttgcatgcccaccacctcctgttgaaggtcaacagaaagatctgaaatggaatcttgccgttattcagcttttttctgctgaaggaatggacacgtttattcgagttctgcaaaaattgaacagtattctgactcagccttggaggctccatgtcaacatggggactacccttcacagagttactactatttcaatggctcgctgcacactcactcttcttaaaactatgttaacggaactcctgagaggtggatcctttgagtttaaggacatgcgtgttccttcagcgcttgttactttacatatgctcctgtgctctatccccctctcaggtcgtttggatagtgatgaacagaaaattcagaatgatatcattgatattttactgacttttacacaaggagttaatgaaaaactcacaatctcagaagagactctggccaataatacttggtctttaatgttaaaagaagttctttcttcaatcttgaaggttcctgaaggatttttttctggactcatactcctttcagagctgctgcctcttccattgcccatgcaaacaactcaggtatcacttccatataacatgcatcttataaatgactgcagtaacactttttaaaaagccagtgattttgttaaaaaacaaaaaccctcatctcccttcctcccaaaaagacataaaataaccggatgagggggagataaaactgaaacaagttggtcattgaggaaatatgggggtaacattttaaataaatttttgttaaagtgagttttattttgctgttatgtatgtttgtacttacatttttctgttattttaaatcctttcccccacaccttaccatgtgttagaatttgccaataactagattgcttcaccaatggactctgctcaactaactgctaacctgagaacaataagattttttagactcattgaattcaagcaaatgtttaactgtataatagaaaattaaatgttttaagcatgcagtaaaaatgttcttttcataacatttcttcctgaacagtttttgtgactataaataaata

SEQ ID NO: 306270 - DNA, 981 bp, Homo sapiens
ccgcggcaaacatggcggtggactcggcgatggagctgttatttttagatacttttaaacacccgagcgctgagcaaagttctcatatagatgtggttcgttttccatgtgtggtttatatcaatgaagtccgagtcatacccccaggagtaagagcccatagcagtctgccagacaatagagcatatggagagacatctccccatacatttcaattagacttattcttcaacaatgtaagcaaaccaagtgcccctgttttcgataggttgggaagcctggaatatgatgagaatacttccatcatctttagacctaactcaaaggtgaatactgatggtctggtgctaagaggctggtataactgtctgacactggcaatatatggatcagtggatagagtgataagtcatgacagagactctccaccaccaccacctccaccgccaccacctccccagccacaaccaagtttgaaaaggaatccaaaacatgctgatggggagaaagaagatcagtttaatggaagccctccaagaccacagccaaggggaccaagaactcctccaggaccccctccacctgatgatgatgaagatgatcctgtgcctctgccagtgtctggtgacaaggaagaggatgctcctcatagagaagattactttgagcccatttctcctgatcggaattctgttccccaggaagggcaatattctgatgaaggagaagtagaagaggaacaacaagaagaaggagaagaagatgaagatgatgtggatgtagaggaagaagaggatgaggatgaggatgatcgacgaacagtagacagtattcctgaggaggaagaggaagatgaagaggaagaaggtgaagaggatgaagaaggtgaaggggatgatggttatgaacaaatttccagagattgagtaggcaggatgcaggaagagaaaggaaagaaaaggacaaaggaaaggaaagaga

SEQ ID NO: 306271 - DNA, 1827 bp, Homo sapiens
gaaaacaggctgggcccggtggctcactcctgtaatcccagcactttgggaggttgaggtgggcggatcacctgaggtcaggagtttgagaccagccggcgggagtggccttgggtccccgctgctggttctcctccctcctcctcgcattctcctcctcctctgctcctcccgatccctcctccgccgcctggtccctcctcctcccgccctgcctccccgcgcctcggcccgcgcgagctagacgtccgggcagcccccggcgcagcgcggccgcagcagcctccgccccccgcacggtgtgagcgcccgccgcggccgaggcggccggagtcccgagctagccccggcggccgccgccgcccagaccggacgacaggccacctcgtcggcgtccgcccgagtccccgcctcgccgccaacgccacaaccaccgcgcacggccccctgactccgtccagtattgatcgggagagccggagcgagctcttcggggagcagcgatgcgaccctccgggacggccggggcagcgctcctggcgctgctggctgcgctctgcccggcgagtcgggctctggaggaaaagaaagtttgccaaggcacgagtaacaagctcacgcagttgggcacttttgaagatcattttctcagcctccagaggatgttcaataactgtgaggtggtccttgggaatttggaaattacctatgtgcagaggaattatgatctttccttcttaaagaccatccaggaggtggctggttatgtcctcattgccctcaacacagtggagcgaattcctttggaaaacctgcagatcatcagaggaaatatgtactacgaaaattcctatgccttagcagtcttatctaactatgatgcaaataaaaccggactgaaggagctgcccatgagaaatttacaggaaatcctgcatggcgccgtgcggttcagcaacaaccctgccctgtgcaacgtggagagcatccagtggcgggacatagtcagcagtgactttctcagcaacatgtcgatggacttccagaaccacctgggcagctgccaaaagtgtgatccaagctgtcccaatgggagctgctggggtgcaggagaggagaactgccagaaactgaccaaaatcatctgtgcccagcagtgctccgggcgctgccgtggcaagtcccccagtgactgctgccacaaccagtgtgctgcaggctgcacaggcccccgggagagcgactgcctggtctgccgcaaattccgagacgaagccacgtgcaaggacacctgccccccactcatgctctacaaccccaccacgtaccagatggatgtgaaccccgagggcaaatacagctttggtgccacctgcgtgaagaagtgtccccgtaattatgtggtgacagatcacggctcgtgcgtccgagcctgtggggccgacagctatgagatggaggaagacggcgtccgcaagtgtaagaagtgcgaagggccttgccgcaaagtgtgtaacggaataggtattggtgaatttaaagactcactctccataaatgctacgaatattaaacacttcaaaaactgcacctccatcagtggcgatctccacatcctgccggtggcatttaggggtgactccttcacacatactcctcctctggatccacaggaactggatattctgaaaaccgtaaaggaaatcacaggtttgagctgaattatcacatgaatataaatgggaaatcagtgttttagagagagaacttttcgacatatttcctgttcccttggaataaaaacatttcttctgaaattttaccgtt

SEQ ID NO: 306272 - DNA, 1566 bp, Homo sapiens
  misc_feature (1506)..(1506): n is a, c, g, or t
gcctcagcttttgaagctggtgagagcctggcctgtgctgggccttggccacgggcagcgtcagctttgagtcaagtgctggtctggcctccctagctttgagcctctgtcaattcccttaatctgtttaggctttggcttcctcatccatagaatggagatatgaatgattcctacgccgtagtgctttgagagaattcagtgaaattcctgtgtgtaaaacccttccatggtgcctagcacacagcacacagccaatggcccaatggctcctatcagctgtgggatttgtcatcagaacaccaccagctctgctccaggctgccctgggtaccatcaaaacacaccctgtgcccagcagcacctgctcctctgcacacctggttccttcagcaggggcagtggccgtgggagcacagaaaacatggagtcccatctggtttaattgatgccattgccaaaggggaggactcacggcaccccctctcgggtgccagggtgcctggctcccaccaggaggaagacctgtcctccactgtcaggcacatttcagtcttcccagcagccagcacaactactttgtccttccagtcacggtcggcctctgggaagcccagtctgtgtcctcctccttcaggggtagccagcatgtctgtgtcacccaaggtcatggagcacagggcccctcccgggaaggtgccgtctcctccggcccctcgggtccctgctctgtcactgactgctgtgacccactctgtctccgcagaggccacaggccaggtctgccatgccttgtgctcccccgagggctgctggggcccggagcccagggactgcgtctcttgccggaatgtcagccgaggcagggaatgcgtggacaagtgcaaccttctggaggggtaggaggttatttctttaatccccttgcgttgatcaaaaataaggctccaggttgttgttatagctttacaggcattctgtttgattttctcttccttttattctttgcccttggcttttggaggttttgggttttctgtggggagacgggaagttgtttgattgcgttatttttggcaaatttaagcacaataggaaataagcaagtattattgcctaatataatccaataatttatagaatctcttttcctggaagtatcttaaatttttctaagctacaaaaagttcctaagacaaatgagacagtcatcaatggttcatctagccaacaccgtggccatttgggcttttctttgtagtgcccgattcctggtgtgtgaaaataaattaacacaaattatattgccaagttaatatctgttttatgtgcccccagcatgtgttgaacatcaaacagtaccagggactttaaatatacccacggacaaagaaataattcataatgatgtttgttgaatttagttgcaatcaataaaaagtgcagtttgtgaatgctctgaggttcttgatattgatgtaaggctttgaacgacaaatgaggacnaaacataaataggaaagtaaaactgaaggatagaggccaaggccatgttttagaagattt

SEQ ID NO: 306273 - DNA, 974 bp, Homo sapiens
  misc_feature (879)..(879): n is a, c, g, or t
  misc_feature (881)..(881): n is a, c, g, or t
  misc_feature (883)..(883): n is a, c, g, or t
  misc_feature (891)..(891): n is a, c, g, or t
taggctagtacgagctggtgttaatcggccgggctgggattacgctccctcaaggagataagtgatggagatgtgataatttcaggaaacaaaaatttgtgctatgcaaatacaataaactggaaaaaactgtttgggacctccggtcagaaaaccaaaattataagcaacagaggtgaaaacagctgcaaggccacaggccaggtctgccatgccttgtgctcccccgagggctgctggggcccggagcccagggactgcgtctcttgccggaatgtcagccgaggcagggaatgcgtggacaagtgcaaccttctggagggtgagccaagggagtttgtggagaactctgagtgcatacagtgccacccagagtgcctgcctcaggccatgaacatcacctgcacaggacggggaccagacaactgtatccagtgtgcccactacattgacggcccccactgcgtcaagacctgcccggcaggagtcatgggagaaaacaacaccctggtctggaagtacgcagacgccggccatgtgtgccacctgtgccatccaaactgcacctacggatgcactgggccaggtcttgaaggctgtccaacgaatgggcctaagatcccgtccatcgccactgggatggtgggggccctcctcttgctgctggtggtggccctggggatcggcctcttcatgcgaaggcgccacatcgttcggaagcgcacgctgcggaggctgctgcaggagagggagcttgtggagcctcttacacccagtggagaagctcccaaccaagctctcttgaggatcttgaaggaaactgaattcaaaaagatcaaagtgctgggctccggtgcgttcggcacggtgtataagggncngntccccagngggaattaatccgcggctcgggttagagaggtttccgcccagatctcctagctttgttgggtgggtcccatgtgctggggttc

SEQ ID NO: 306274 - DNA, 500 bp, Homo sapiens
tgattaaaaataaatcaggagaaaaaagaggcaatcagaaaagggcatggtttgacttagtttgaatgtggtttcgttggaagcaaatgtgtcttcactttttcatgaaaaagtctgcaagtgctctgcgacatccctgggaaatgatcctaccctcactcttcagctcacagggaacctttgctctttttcagtgaccaaaatcatctgtgcccagcagtgctccgggcgctgccgtggcaagtcccccagtgactgctgccacaaccagtgtgctgcaggctgcacaggcccccgggagagcgactgcctggtaagatgcccctccagcagcctccctggagcaggctggggctgcacccgccccacccacaccaggacagaagacttcctgtgggggagctgtcaattagcatttgtcataacagacaggatattgccctctgcctggtgacaaagtatctttagtatcctgcctccaccactcactgagaccttgg

SEQ ID NO: 306275 - DNA, 486 bp, Homo sapiens
agaagctatttgaatctcatgtaggggctttcaagcatcaaaggatggttcatgttttattttaaggcacccacatcatgtcatgaggggaggcagctataatttagagaaccaagggggatttcattataacaaaattggcaaacacacaggcacctgctggcaatagacccctgctcctatagccaagaagtggaatagcatctctacgggccattctaatagcctcaaaatctctgcaccagggggatgaaagaatgcatttgccaagtcctacagactccaacttctaccgtgccctgatggatgaagaagacatggacgacgtggtggatgccgacgagtacctcatcccacagcagggcttcttcagcagccccctcactcacactactacaggctccacccacaagcccataatctctacccttactactacaggccctaccctcaatatcatatggcccaagtccagactaccaccac

SEQ ID NO: 306276 - DNA, 532 bp, Homo sapiens
aataagttgaaaagattgtcttcatttattgaatgtgcttaactcaggcccgggaaagggcgtcatcagtttctcatcatttcactgagatatgcatctattacttttacatttcaggccaaaagtgtgatccaagctgtcccaatgggagctgctggggtgcaggagaggagaactgccagaaacgtaagtcagtgaacagcctcagacccatgtgtgaccgcccctctcttccttcacttgcttaggtgattggatttgttttccctctgaagactccaaagagttactttattacagggtcagatgtgaaccagtaggtgaaggacagtcttgcaaatctcaccgcatgcagttaatccagggtgggctattttgggagcttcagcctatcacaaataagtgaacatcagcaggggctgggcgcggtggctcacccctataatcccagcactttgggaggcggaggcggtcggatcacgaggtcaggagatcgagccattctggttaacacagtgaaacctcgtctcta

SEQ ID NO: 306277 - DNA, 430 bp, Homo sapiens
gaattcccgctctctgggtaggtctcagtgcggggttccagggggtccctctaatgagcatctcatgtcactgtgttctgtcacatgccagcctggcctccctgtgtcccagatcgcattattaaaccctccagcgcattagagcaagcctcagtaaggcgcaggccacatcgtgaactaagcagcatccgtgagtggggcccacccaactccatctccccctccccgtctgaactctcctctggtgctcgtcctcactgtccggctagccaaagcctcagctgggtctaagagagaagcatggtctattgggctttggtgtcaggcagacgtggcttcacacccctgactctccacttcttcgcatcacccaggcagccgatccacctatctccttccataacacaggaataccaaaaccaagctcaca

SEQ ID NO: 306278 - DNA, 5858 bp, Homo sapiens
gaaaacaggctgggcccggtggctcactcctgtaatcccagcactttgggaggttgaggtgggcggatcacctgaggtcaggagtttgagaccagccggcgggagtggccttgggtccccgctgctggttctcctccctcctcctcgcattctcctcctcctctgctcctcccgatccctcctccgccgcctggtccctcctcctcccgccctgcctccccgcgcctcggcccgcgcgagctagacgtccgggcagcccccggcgcagcgcggccgcagcagcctccgccccccgcacggtgtgagcgcccgccgcggccgaggcggccggagtcccgagctagccccggcggccgccgccgcccagaccggacgacaggccacctcgtcggcgtccgcccgagtccccgcctcgccgccaacgccacaaccaccgcgcacggccccctgactccgtccagtattgatcgggagagccggagcgagctcttcggggagcagcgatgcgaccctccgggacggccggggcagcgctcctggcgctgctggctgcgctctgcccggcgagtcgggctctggaggaaaagaaagtttgccaaggcacgagtaacaagctcacgcagttgggcacttttgaagatcattttctcagcctccagaggatgttcaataactgtgaggtggtccttgggaatttggaaattacctatgtgcagaggaattatgatctttccttcttaaagaccatccaggaggtggctggttatgtcctcattgccctcaacacagtggagcgaattcctttggaaaacctgcagatcatcagaggaaatatgtactacgaaaattcctatgccttagcagtcttatctaactatgatgcaaataaaaccggactgaaggagctgcccatgagaaatttacaggaaatcctgcatggcgccgtgcggttcagcaacaaccctgccctgtgcaacgtggagagcatccagtggcgggacatagtcagcagtgactttctcagcaacatgtcgatggacttccagaaccacctgggcagctgccaaaagtgtgatccaagctgtcccaatgggagctgctggggtgcaggagaggagaactgccagaaactgaccaaaatcatctgtgcccagcagtgctccgggcgctgccgtggcaagtcccccagtgactgctgccacaaccagtgtgctgcaggctgcacaggcccccgggagagcgactgcctggtctgccgcaaattccgagacgaagccacgtgcaaggacacctgccccccactcatgctctacaaccccaccacgtaccagatggatgtgaaccccgagggcaaatacagctttggtgccacctgcgtgaagaagtgtccccgtaattatgtggtgacagatcacggctcgtgcgtccgagcctgtggggccgacagctatgagatggaggaagacggcgtccgcaagtgtaagaagtgcgaagggccttgccgcaaagtgtgtaacggaataggtattggtgaatttaaagactcactctccataaatgctacgaatattaaacacttcaaaaactgcacctccatcagtggcgatctccacatcctgccggtggcatttaggggtgactccttcacacatactcctcctctggatccacaggaactggatattctgaaaaccgtaaaggaaatcacagggtttttgctgattcaggcttggcctgaaaacaggacggacctccatgcctttgagaacctagaaatcatacgcggcaggaccaagcaacatggtcagttttctcttgcagtcgtcagcctgaacataacatccttgggattacgctccctcaaggagataagtgatggagatgtgataatttcaggaaacaaaaatttgtgctatgcaaatacaataaactggaaaaaactgtttgggacctccggtcagaaaaccaaaattataagcaacagaggtgaaaacagctgcaaggccacaggccaggtctgccatgccttgtgctcccccgagggctgctggggcccggagcccagggactgcgtctcttgccggaatgtcagccgaggcagggaatgcgtggacaagtgcaaccttctggagggtgagccaagggagtttgtggagaactctgagtgcatacagtgccacccagagtgcctgcctcaggccatgaacatcacctgcacaggacggggaccagacaactgtatccagtgtgcccactacattgacggcccccactgcgtcaagacctgcccggcaggagtcatgggagaaaacaacaccctggtctggaagtacgcagacgccggccatgtgtgccacctgtgccatccaaactgcacctacggatgcactgggccaggtcttgaaggctgtccaacgaatgggcctaagatcccgtccatcgccactgggatggtgggggccctcctcttgctgctggtggtggccctggggatcggcctcttcatgcgaaggcgccacatcgttcggaagcgcacgctgcggaggctgctgcaggagagggagcttgtggagcctcttacacccagtggagaagctcccaaccaagctctcttgaggatcttgaaggaaactgaattcaaaaagatcaaagtgctgggctccggtgcgttcggcacggtgtataagggactctggatcccagaaggtgagaaagttaaaattcccgtcgctatcaaggaattaagagaagcaacatctccgaaagccaacaaggaaatcctcgatgaagcctacgtgatggccagcgtggacaacccccacgtgtgccgcctgctgggcatctgcctcacctccaccgtgcagctcatcacgcagctcatgcccttcggctgcctcctggactatgtccgggaacacaaagacaatattggctcccagtacctgctcaactggtgtgtgcagatcgcaaagggcatgaactacttggaggaccgtcgcttggtgcaccgcgacctggcagccaggaacgtactggtgaaaacaccgcagcatgtcaagatcacagattttgggctggccaaactgctgggtgcggaagagaaagaataccatgcagaaggaggcaaagtgcctatcaagtggatggcattggaatcaattttacacagaatctatacccaccagagtgatgtctggagctacggggtgaccgtttgggagttgatgacctttggatccaagccatatgacggaatccctgccagcgagatctcctccatcctggagaaaggagaacgcctccctcagccacccatatgtaccatcgatgtctacatgatcatggtcaagtgctggatgatagacgcagatagtcgcccaaagttccgtgagttgatcatcgaattctccaaaatggcccgagacccccagcgctaccttgtcattcagggggatgaaagaatgcatttgccaagtcctacagactccaacttctaccgtgccctgatggatgaagaagacatggacgacgtggtggatgccgacgagtacctcatcccacagcagggcttcttcagcagcccctccacgtcacggactcccctcctgagctctctgagtgcaaccagcaacaattccaccgtggcttgcattgatagaaatgggctgcaaagctgtcccatcaaggaagacagcttcttgcagcgatacagctcagaccccacaggcgccttgactgaggacagcatagacgacaccttcctcccagtgcctgaatacataaaccagtccgttcccaaaaggcccgctggctctgtgcagaatcctgtctatcacaatcagcctctgaaccccgcgcccagcagagacccacactaccaggacccccacagcactgcagtgggcaaccccgagtatctcaacactgtccagcccacctgtgtcaacagcacattcgacagccctgcccactgggcccagaaaggcagccaccaaattagcctggacaaccctgactaccagcaggacttctttcccaaggaagccaagccaaatggcatctttaagggctccacagctgaaaatgcagaatacctaagggtcgcgccacaaagcagtgaatttattggagcatgaccacggaggatagtatgagccctaaaaatccagactctttcgatacccaggaccaagccacagcaggtcctccatcccaacagccatgcccgcattagctcttagacccacagactggttttgcaacgtttacaccgactagccaggaagtacttccacctcgggcacattttgggaagttgcattcctttgtcttcaaactgtgaagcatttacagaaacgcatccagcaagaatattgtccctttgagcagaaatttatctttcaaagaggtatatttgaaaaaaaaaaaaaagtatatgtgaggatttttattgattggggatcttggagtttttcattgtcgctattgatttttacttcaatgggctcttccaacaaggaagaagcttgctggtagcacttgctaccctgagttcatccaggcccaactgtgagcaaggagcacaagccacaagtcttccagaggatgcttgattccagtggttctgcttcaaggcttccactgcaaaacactaaagatccaagaaggccttcatggccccagcaggccggatcggtactgtatcaagtcatggcaggtacagtaggataagccactctgtcccttcctgggcaaagaagaaacggaggggatggaattcttccttagacttacttttgtaaaaatgtccccacggtacttactccccactgatggaccagtggtttccagtcatgagcgttagactgacttgtttgtcttccattccattgttttgaaactcagtatgctgcccctgtcttgctgtcatgaaatcagcaagagaggatgacacatcaaataataactcggattccagcccacattggattcatcagcatttggaccaatagcccacagctgagaatgtggaatacctaaggatagcaccgcttttgttctcgcaaaaacgtatctcctaatttgaggctcagatgaaatgcatcaggtcctttggggcatagatcagaagactacaaaaatgaagctgctctgaaatctcctttagccatcaccccaaccccccaaaattagtttgtgttacttatggaagatagttttctccttttacttcacttcaaaagctttttactcaaagagtatatgttccctccaggtcagctgcccccaaaccccctccttacgctttgtcacacaaaaagtgtctctgccttgagtcatctattcaagcacttacagctctggccacaacagggcattttacaggtgcgaatgacagtagcattatgagtagtgtggaattcaggtagtaaatatgaaactagggtttgaaattgataatgctttcacaacatttgcagatgttttagaaggaaaaaagttccttcctaaaataatttctctacaattggaagattggaagattcagctagttaggagcccaccttttttcctaatctgtgtgtgccctgtaacctgactggttaacagcagtcctttgtaaacagtgttttaaactctcctagtcaatatccaccccatccaatttatcaaggaagaaatggttcagaaaatattttcagcctacagttatgttcagtcacacacacatacaaaatgttccttttgcttttaaagtaatttttgactcccagatcagtcagagcccctacagcattgttaagaaagtatttgatttttgtctcaatgaaaataaaactatattcatttccactcta

SEQ ID NO: 306279 - DNA, 6615 bp, Homo sapiens
gaaaacaggctgggcccggtggctcactcctgtaatcccagcactttgggaggttgaggtgggcggatcacctgaggtcaggagtttgagaccagccggcgggagtggccttgggtccccgctgctggttctcctccctcctcctcgcattctcctcctcctctgctcctcccgatccctcctccgccgcctggtccctcctcctcccgccctgcctccccgcgcctcggcccgcgcgagctagacgtccgggcagcccccggcgcagcgcggccgcagcagcctccgccccccgcacggtgtgagcgcccgccgcggccgaggcggccggagtcccgagctagccccggcggccgccgccgcccagaccggacgacaggccacctcgtcggcgtccgcccgagtccccgcctcgccgccaacgccacaaccaccgcgcacggccccctgactccgtccagtattgatcgggagagccggagcgagctcttcggggagcagcgatgcgaccctccgggacggccggggcagcgctcctggcgctgctggctgcgctctgcccggcgagtcgggctctggaggaaaagaaagtttgccaaggcacgagtaacaagctcacgcagttgggcacttttgaagatcattttctcagcctccagaggatgttcaataactgtgaggtggtccttgggaatttggaaattacctatgtgcagaggaattatgatctttccttcttaaagaccatccaggaggtggctggttatgtcctcattgccctcaacacagtggagcgaattcctttggaaaacctgcagatcatcagaggaaatatgtactacgaaaattcctatgccttagcagtcttatctaactatgatgcaaataaaaccggactgaaggagctgcccatgagaaatttacaggaaatcctgcatggcgccgtgcggttcagcaacaaccctgccctgtgcaacgtggagagcatccagtggcgggacatagtcagcagtgactttctcagcaacatgtcgatggacttccagaaccacctgggcagctgccaaaagtgtgatccaagctgtcccaatgggagctgctggggtgcaggagaggagaactgccagaaactgaccaaaatcatctgtgcccagcagtgctccgggcgctgccgtggcaagtcccccagtgactgctgccacaaccagtgtgctgcaggctgcacaggcccccgggagagcgactgcctggtctgccgcaaattccgagacgaagccacgtgcaaggacacctgccccccactcatgctctacaaccccaccacgtaccagatggatgtgaaccccgagggcaaatacagctttggtgccacctgcgtgaagaagtgtccccgtaattatgtggtgacagatcacggctcgtgcgtccgagcctgtggggccgacagctatgagatggaggaagacggcgtccgcaagtgtaagaagtgcgaagggccttgccgcaaagtgtgtaacggaataggtattggtgaatttaaagactcactctccataaatgctacgaatattaaacacttcaaaaactgcacctccatcagtggcgatctccacatcctgccggtggcatttaggggtgactccttcacacatactcctcctctggatccacaggaactggatattctgaaaaccgtaaaggaaatcacagggtttttgctgattcaggcttggcctgaaaacaggacggacctccatgcctttgagaacctagaaatcatacgcggcaggaccaagcaacatggtcagttttctcttgcagtcgtcagcctgaacataacatccttgggattacgctccctcaaggagataagtgatggagatgtgataatttcaggaaacaaaaatttgtgctatgcaaatacaataaactggaaaaaactgtttgggacctccggtcagaaaaccaaaattataagcaacagaggtgaaaacagctgcaaggccacaggccaggtctgccatgccttgtgctcccccgagggctgctggggcccggagcccagggactgcgtctcttgccggaatgtcagccgaggcagggaatgcgtggacaagtgcaaccttctggagggtgagccaagggagtttgtggagaactctgagtgcatacagtgccacccagagtgcctgcctcaggccatgaacatcacctgcacaggacggggaccagacaactgtatccagtgtgcccactacattgacggcccccactgcgtcaagacctgcccggcaggagtcatgggagaaaacaacaccctggtctggaagtacgcagacgccggccatgtgtgccacctgtgccatccaaactgcacctacggatgcactgggccaggtcttgaaggctgtccaacgaatgggcctaagatcccgtccatcgccactgggatggtgggggccctcctcttgctgctggtggtggccctggggatcggcctcttcatgcgaaggcgccacatcgttcggaagcgcacgctgcggaggctgctgcaggagagggagcttgtggagcctcttacacccagtggagaagctcccaaccaagctctcttgaggatcttgaaggaaactgaattcaaaaagatcaaagtgctgggctccggtgcgttcggcacggtgtataagggactctggatcccagaaggtgagaaagttaaaattcccgtcgctatcaaggaattaagagaagcaacatctccgaaagccaacaaggaaatcctcgatgaagcctacgtgatggccagcgtggacaacccccacgtgtgccgcctgctgggcatctgcctcacctccaccgtgcagctcatcacgcagctcatgcccttcggctgcctcctggactatgtccgggaacacaaagacaatattggctcccagtacctgctcaactggtgtgtgcagatcgcaaagggcatgaactacttggaggaccgtcgcttggtgcaccgcgacctggcagccaggaacgtactggtgaaaacaccgcagcatgtcaagatcacagattttgggctggccaaactgctgggtgcggaagagaaagaataccatgcagaaggaggcaaagtgcctatcaagtggatggcattggaatcaattttacacagaatctatacccaccagagtgatgtctggagctacggggtgaccgtttgggagttgatgacctttggatccaagccatatgacggaatccctgccagcgagatctcctccatcctggagaaaggagaacgcctccctcagccacccatatgtaccatcgatgtctacatgatcatggtcaagtgctggatgatagacgcagatagtcgcccaaagttccgtgagttgatcatcgaattctccaaaatggcccgagacccccagcgctaccttgtcattcagggggatgaaagaatgcatttgccaagtcctacagactccaacttctaccgtgccctgatggatgaagaagacatggacgacgtggtggatgccgacgagtacctcatcccacagcagggcttcttcagcagcccctccacgtcacggactcccctcctgagctctctgagtgcaaccagcaacaattccaccgtggcttgcattgatagaaatgggctgcaaagctgtcccatcaaggaagacagcttcttgcagcgatacagctcagaccccacaggcgccttgactgaggacagcatagacgacaccttcctcccagtgcctgaatacataaaccagtccgttcccaaaaggcccgctggctctgtgcagaatcctgtctatcacaatcagcctctgaaccccgcgcccagcagagacccacactaccaggacccccacagcactgcagtgggcaaccccgagtatctcaacactgtccagcccacctgtgtcaacagcacattcgacagccctgcccactgggcccagaaaggcagccaccaaattagcctggacaaccctgactaccagcaggacttctttcccaaggaagccaagccaaatggcatctttaagggctccacagctgaaaatgcagaatacctaagggtcgcgccacaaagcagtgaatttattggagcatgaccacggaggatagtatgagccctaaaaatccagactctttcgatacccaggaccaagccacagcaggtcctccatcccaacagccatgcccgcattagctcttagacccacagactggttttgcaacgtttacaccgactagccaggaagtacttccacctcgggcacattttgggaagttgcattcctttgtcttcaaactgtgaagcatttacagaaacgcatccagcaagaatattgtccctttgagcagaaatttatctttcaaagaggtatatttgaaaaaaaaaaaaaagtatatgtgaggatttttattgattggggatcttggagtttttcattgtcgctattgatttttacttcaatgggctcttccaacaaggaagaagcttgctggtagcacttgctaccctgagttcatccaggcccaactgtgagcaaggagcacaagccacaagtcttccagaggatgcttgattccagtggttctgcttcaaggcttccactgcaaaacactaaagatccaagaaggccttcatggccccagcaggccggatcggtactgtatcaagtcatggcaggtacagtaggataagccactctgtcccttcctgggcaaagaagaaacggaggggatggaattcttccttagacttacttttgtaaaaatgtccccacggtacttactccccactgatggaccagtggtttccagtcatgagcgttagactgacttgtttgtcttccattccattgttttgaaactcagtatgctgcccctgtcttgctgtcatgaaatcagcaagagaggatgacacatcaaataataactcggattccagcccacattggattcatcagcatttggaccaatagcccacagctgagaatgtggaatacctaaggatagcaccgcttttgttctcgcaaaaacgtatctcctaatttgaggctcagatgaaatgcatcaggtcctttggggcatagatcagaagactacaaaaatgaagctgctctgaaatctcctttagccatcaccccaaccccccaaaattagtttgtgttacttatggaagatagttttctccttttacttcacttcaaaagctttttactcaaagagtatatgttccctccaggtcagctgcccccaaaccccctccttacgctttgtcacacaaaaagtgtctctgccttgagtcatctattcaagcacttacagctctggccacaacagggcattttacaggtgcgaatgacagtagcattatgagtagtgtggaattcaggtagtaaatatgaaactagggtttgaaattgataatgctttcacaacatttgcagatgttttagaaggaaaaaagttccttcctaaaataatttctctacaattggaagattggaagattcagctagttaggagcccaccttttttcctaatctgtgtgtgccctgtaacctgactggttaacagcagtcctttgtaaacagtgttttaaactctcctagtcaatatccaccccatccaatttatcaaggaagaaatggttcagaaaatattttcagcctacagttatgttcagtcacacacacatacaaaatgttccttttgcttttaaagtaatttttgactcccagatcagtcagagcccctacagcattgttaagaaagtatttgatttttgtctcaatgaaaataaaactatattcatttccactctattatgctctcaaatacccctaagcatctatactagcctggtatgggtatgaaagatacaaagataaataaaacatagtccctgattctaagaaattcacaatttagcaaaggaaatggactcatagatgctaaccttaaaacaacgtgacaaatgccagacaggacccatcagccaggcactgtgagagcacagagcagggaggttgggtcctgcctgaggagacctggaagggaggcctcacaggaggatgaccaggtctcagtcagcggggaggtggaaagtgcaggtgcatcaggggcaccctgaccgaggaaacagctgccagaggcctccactgctaaagtccacataaggctgaggtcagtcaccctaaacaacctgctccctctaagccaggggatgagcttggagcatcccacaagttccctaaaagttgcagcccccagggggattttgagctatcatctctgcacatgcttagtgagaagactacacaacatttctaagaatctgagattttatattgtcagttaaccactttcattattcattcacctcaggacatgcagaaatatttcagtcagaactgggaaacagaaggacctacattctgctgtcacttatgtgtcaagaagcagatgatcgatgaggcaggtcagttgtaagtgagtcacattgtagcattaaattctagtatttttgtagtttgaaacagtaacttaataaaagagcaaaagctattctagctttcttct

SEQ ID NO: 306280 - DNA, 6192 bp, Homo sapiens
ttttcaaagtaattctttttaatttccattttcactggagagtgttgaaccccgtgaggcatgagagcacagtgttccagaacaatgcttactgctcattatcacaggggtcaaaggctaacgtgcagggattgttgcagatcgtggacatgctgcctcctgtgtccatgactgcaatcgtctacctattttacagttgttgagcactcgtgtgcattagggttcaactgggcgtcctagggctccctggacccattttagaccttgagttcttgagttcctcaaaagagaaatcacgcatttatgttttctcttcttagaccatccaggaggtggctggttatgtcctcattgccctcaacacagtggagcgaattcctttggaaaacctgcagatcatcagaggaaatatgtactacgaaaattcctatgccttagcagtcttatctaactatgatgcaaataaaaccggactgaaggagctgcccatgagaaatttacaggaaatcctgcatggcgccgtgcggttcagcaacaaccctgccctgtgcaacgtggagagcatccagtggcgggacatagtcagcagtgactttctcagcaacatgtcgatggacttccagaaccacctgggcagctgccaaaagtgtgatccaagctgtcccaatgggagctgctggggtgcaggagaggagaactgccagaaactgaccaaaatcatctgtgcccagcagtgctccgggcgctgccgtggcaagtcccccagtgactgctgccacaaccagtgtgctgcaggctgcacaggcccccgggagagcgactgcctggtctgccgcaaattccgagacgaagccacgtgcaaggacacctgccccccactcatgctctacaaccccaccacgtaccagatggatgtgaaccccgagggcaaatacagctttggtgccacctgcgtgaagaagtgtccccgtaattatgtggtgacagatcacggctcgtgcgtccgagcctgtggggccgacagctatgagatggaggaagacggcgtccgcaagtgtaagaagtgcgaagggccttgccgcaaagtgtgtaacggaataggtattggtgaatttaaagactcactctccataaatgctacgaatattaaacacttcaaaaactgcacctccatcagtggcgatctccacatcctgccggtggcatttaggggtgactccttcacacatactcctcctctggatccacaggaactggatattctgaaaaccgtaaaggaaatcacagggtttttgctgattcaggcttggcctgaaaacaggacggacctccatgcctttgagaacctagaaatcatacgcggcaggaccaagcaacatggtcagttttctcttgcagtcgtcagcctgaacataacatccttgggattacgctccctcaaggagataagtgatggagatgtgataatttcaggaaacaaaaatttgtgctatgcaaatacaataaactggaaaaaactgtttgggacctccggtcagaaaaccaaaattataagcaacagaggtgaaaacagctgcaaggccacaggccaggtctgccatgccttgtgctcccccgagggctgctggggcccggagcccagggactgcgtctcttgccggaatgtcagccgaggcagggaatgcgtggacaagtgcaaccttctggagggtgagccaagggagtttgtggagaactctgagtgcatacagtgccacccagagtgcctgcctcaggccatgaacatcacctgcacaggacggggaccagacaactgtatccagtgtgcccactacattgacggcccccactgcgtcaagacctgcccggcaggagtcatgggagaaaacaacaccctggtctggaagtacgcagacgccggccatgtgtgccacctgtgccatccaaactgcacctacggatgcactgggccaggtcttgaaggctgtccaacgaatgggcctaagatcccgtccatcgccactgggatggtgggggccctcctcttgctgctggtggtggccctggggatcggcctcttcatgcgaaggcgccacatcgttcggaagcgcacgctgcggaggctgctgcaggagagggagcttgtggagcctcttacacccagtggagaagctcccaaccaagctctcttgaggatcttgaaggaaactgaattcaaaaagatcaaagtgctgggctccggtgcgttcggcacggtgtataagggactctggatcccagaaggtgagaaagttaaaattcccgtcgctatcaaggaattaagagaagcaacatctccgaaagccaacaaggaaatcctcgatgaagcctacgtgatggccagcgtggacaacccccacgtgtgccgcctgctgggcatctgcctcacctccaccgtgcagctcatcacgcagctcatgcccttcggctgcctcctggactatgtccgggaacacaaagacaatattggctcccagtacctgctcaactggtgtgtgcagatcgcaaagggcatgaactacttggaggaccgtcgcttggtgcaccgcgacctggcagccaggaacgtactggtgaaaacaccgcagcatgtcaagatcacagattttgggctggccaaactgctgggtgcggaagagaaagaataccatgcagaaggaggcaaagtgcctatcaagtggatggcattggaatcaattttacacagaatctatacccaccagagtgatgtctggagctacggggtgaccgtttgggagttgatgacctttggatccaagccatatgacggaatccctgccagcgagatctcctccatcctggagaaaggagaacgcctccctcagccacccatatgtaccatcgatgtctacatgatcatggtcaagtgctggatgatagacgcagatagtcgcccaaagttccgtgagttgatcatcgaattctccaaaatggcccgagacccccagcgctaccttgtcattcagggggatgaaagaatgcatttgccaagtcctacagactccaacttctaccgtgccctgatggatgaagaagacatggacgacgtggtggatgccgacgagtacctcatcccacagcagggcttcttcagcagcccctccacgtcacggactcccctcctgagctctctgagtgcaaccagcaacaattccaccgtggcttgcattgatagaaatgggctgcaaagctgtcccatcaaggaagacagcttcttgcagcgatacagctcagaccccacaggcgccttgactgaggacagcatagacgacaccttcctcccagtgcctgaatacataaaccagtccgttcccaaaaggcccgctggctctgtgcagaatcctgtctatcacaatcagcctctgaaccccgcgcccagcagagacccacactaccaggacccccacagcactgcagtgggcaaccccgagtatctcaacactgtccagcccacctgtgtcaacagcacattcgacagccctgcccactgggcccagaaaggcagccaccaaattagcctggacaaccctgactaccagcaggacttctttcccaaggaagccaagccaaatggcatctttaagggctccacagctgaaaatgcagaatacctaagggtcgcgccacaaagcagtgaatttattggagcatgaccacggaggatagtatgagccctaaaaatccagactctttcgatacccaggaccaagccacagcaggtcctccatcccaacagccatgcccgcattagctcttagacccacagactggttttgcaacgtttacaccgactagccaggaagtacttccacctcgggcacattttgggaagttgcattcctttgtcttcaaactgtgaagcatttacagaaacgcatccagcaagaatattgtccctttgagcagaaatttatctttcaaagaggtatatttgaaaaaaaaaaaaaagtatatgtgaggatttttattgattggggatcttggagtttttcattgtcgctattgatttttacttcaatgggctcttccaacaaggaagaagcttgctggtagcacttgctaccctgagttcatccaggcccaactgtgagcaaggagcacaagccacaagtcttccagaggatgcttgattccagtggttctgcttcaaggcttccactgcaaaacactaaagatccaagaaggccttcatggccccagcaggccggatcggtactgtatcaagtcatggcaggtacagtaggataagccactctgtcccttcctgggcaaagaagaaacggaggggatggaattcttccttagacttacttttgtaaaaatgtccccacggtacttactccccactgatggaccagtggtttccagtcatgagcgttagactgacttgtttgtcttccattccattgttttgaaactcagtatgctgcccctgtcttgctgtcatgaaatcagcaagagaggatgacacatcaaataataactcggattccagcccacattggattcatcagcatttggaccaatagcccacagctgagaatgtggaatacctaaggatagcaccgcttttgttctcgcaaaaacgtatctcctaatttgaggctcagatgaaatgcatcaggtcctttggggcatagatcagaagactacaaaaatgaagctgctctgaaatctcctttagccatcaccccaaccccccaaaattagtttgtgttacttatggaagatagttttctccttttacttcacttcaaaagctttttactcaaagagtatatgttccctccaggtcagctgcccccaaaccccctccttacgctttgtcacacaaaaagtgtctctgccttgagtcatctattcaagcacttacagctctggccacaacagggcattttacaggtgcgaatgacagtagcattatgagtagtgtggaattcaggtagtaaatatgaaactagggtttgaaattgataatgctttcacaacatttgcagatgttttagaaggaaaaaagttccttcctaaaataatttctctacaattggaagattggaagattcagctagttaggagcccaccttttttcctaatctgtgtgtgccctgtaacctgactggttaacagcagtcctttgtaaacagtgttttaaactctcctagtcaatatccaccccatccaatttatcaaggaagaaatggttcagaaaatattttcagcctacagttatgttcagtcacacacacatacaaaatgttccttttgcttttaaagtaatttttgactcccagatcagtcagagcccctacagcattgttaagaaagtatttgatttttgtctcaatgaaaataaaactatattcatttccactctattatgctctcaaatacccctaagcatctatactagcctggtatgggtatgaaagatacaaagataaataaaacatagtccctgattctaagaaattcacaatttagcaaaggaaatggactcatagatgctaaccttaaaacaacgtgacaaatgccagacaggacccatcagccaggcactgtgagagcacagagcagggaggttgggtcctgcctgaggagacctggaagggaggcctcacaggaggatgaccaggtctcagtcagcggggaggtggaaagtgcaggtgcatcaggggcaccctgaccgaggaaacagctgccagaggcctccactgctaaagtccacataaggctgaggtcagtcaccctaaacaacctgctccctctaagccaggggatgagcttggagcatcccacaagttccctaaaagttgcagcccccagggggattttgagctatcatctctgcacatgcttagtgagaagactacacaacatttctaagaatctgagattttatattgtcagttaaccactttcattattcattcacctcaggacatgcagaaatatttcagtcagaactgggaaacagaaggacctacattctgctgtcacttatgtgtcaagaagcagatgatcgatgaggcaggtcagttgtaagtgagtcacattgtagcattaaattctagtatttttgtagtttgaaacagtaacttaataaaagagcaaaagctattctagctttcttct

SEQ ID NO: 306281 - DNA, 7201 bp, Homo sapiens
gaaaacaggctgggcccggtggctcactcctgtaatcccagcactttgggaggttgaggtgggcggatcacctgaggtcaggagtttgagaccagccggcgggagtggccttgggtccccgctgctggttctcctccctcctcctcgcattctcctcctcctctgctcctcccgatccctcctccgccgcctggtccctcctcctcccgccctgcctccccgcgcctcggcccgcgcgagctagacgtccgggcagcccccggcgcagcgcggccgcagcagcctccgccccccgcacggtgtgagcgcccgccgcggccgaggcggccggagtcccgagctagccccggcggccgccgccgcccagaccggacgacaggccacctcgtcggcgtccgcccgagtccccgcctcgccgccaacgccacaaccaccgcgcacggccccctgactccgtccagtattgatcgggagagccggagcgagctcttcggggagcagcgatgcgaccctccgggacggccggggcagcgctcctggcgctgctggctgcgctctgcccggcgagtcgggctctggaggaaaagaaagtttgccaaggcacgagtaacaagctcacgcagttgggcacttttgaagatcattttctcagcctccagaggatgttcaataactgtgaggtggtccttgggaatttggaaattacctatgtgcagaggaattatgatctttccttcttaaagaccatccaggaggtggctggttatgtcctcattgccctcaacacagtggagcgaattcctttggaaaacctgcagatcatcagaggaaatatgtactacgaaaattcctatgccttagcagtcttatctaactatgatgcaaataaaaccggactgaaggagctgcccatgagaaatttacaggaaatcctgcatggcgccgtgcggttcagcaacaaccctgccctgtgcaacgtggagagcatccagtggcgggacatagtcagcagtgactttctcagcaacatgtcgatggacttccagaaccacctgggcagctgccaaaagtgtgatccaagctgtcccaatgggagctgctggggtgcaggagaggagaactgccagaaactgaccaaaatcatctgtgcccagcagtgctccgggcgctgccgtggcaagtcccccagtgactgctgccacaaccagtgtgctgcaggctgcacaggcccccgggagagcgactgcctggtctgccgcaaattccgagacgaagccacgtgcaaggacacctgccccccactcatgctctacaaccccaccacgtaccagatggatgtgaaccccgagggcaaatacagctttggtgccacctgcgtgaagaagtgtccccgtaattatgtggtgacagatcacggctcgtgcgtccgagcctgtggggccgacagctatgagatggaggaagacggcgtccgcaagtgtaagaagtgcgaagggccttgccgcaaaggtaggaagcccgccggtgtgcggacgaggcttgttctcggctgctgaggctgggctctcatgccacctccaaaggaacacatcttcctcttctcattaaaaaacaactatacatatcgtttctttaaaacagaagataaagctgtaaagctaggttaggcaatgggaaggcactgaaggttgtgacggggtggggggctctgatgagaacagtcacagagccagccccgctcagcagctgccaggtgcccagccctggggagaatccagggaaggcagagctggaagcagtgcagctccaagcggcccatgggaaataatgaggagaacgcaaggtcagtgtgaggtgacagggatggcatctcctacaccgccgtagccccaaagtgtactataggtcctggtgtccccccttcccgcctgcactctccccagccccttcagtgtttgttgagtgaatgaaggatgatgtggcagtggcggttccggtgaccggaattccttcctgcttccctctgcctgtggatccctagctattcttaatccaacaaatgtgaacggaatacacgtctctcttatctctgcagtgtgtaacggaataggtattggtgaatttaaagactcactctccataaatgctacgaatattaaacacttcaaaaactgcacctccatcagtggcgatctccacatcctgccggtggcatttaggggtgactccttcacacatactcctcctctggatccacaggaactggatattctgaaaaccgtaaaggaaatcacagggtttttgctgattcaggcttggcctgaaaacaggacggacctccatgcctttgagaacctagaaatcatacgcggcaggaccaagcaacatggtcagttttctcttgcagtcgtcagcctgaacataacatccttgggattacgctccctcaaggagataagtgatggagatgtgataatttcaggaaacaaaaatttgtgctatgcaaatacaataaactggaaaaaactgtttgggacctccggtcagaaaaccaaaattataagcaacagaggtgaaaacagctgcaaggccacaggccaggtctgccatgccttgtgctcccccgagggctgctggggcccggagcccagggactgcgtctcttgccggaatgtcagccgaggcagggaatgcgtggacaagtgcaaccttctggagggtgagccaagggagtttgtggagaactctgagtgcatacagtgccacccagagtgcctgcctcaggccatgaacatcacctgcacaggacggggaccagacaactgtatccagtgtgcccactacattgacggcccccactgcgtcaagacctgcccggcaggagtcatgggagaaaacaacaccctggtctggaagtacgcagacgccggccatgtgtgccacctgtgccatccaaactgcacctacggatgcactgggccaggtcttgaaggctgtccaacgaatgggcctaagatcccgtccatcgccactgggatggtgggggccctcctcttgctgctggtggtggccctggggatcggcctcttcatgcgaaggcgccacatcgttcggaagcgcacgctgcggaggctgctgcaggagagggagcttgtggagcctcttacacccagtggagaagctcccaaccaagctctcttgaggatcttgaaggaaactgaattcaaaaagatcaaagtgctgggctccggtgcgttcggcacggtgtataagggactctggatcccagaaggtgagaaagttaaaattcccgtcgctatcaaggaattaagagaagcaacatctccgaaagccaacaaggaaatcctcgatgaagcctacgtgatggccagcgtggacaacccccacgtgtgccgcctgctgggcatctgcctcacctccaccgtgcagctcatcacgcagctcatgcccttcggctgcctcctggactatgtccgggaacacaaagacaatattggctcccagtacctgctcaactggtgtgtgcagatcgcaaagggcatgaactacttggaggaccgtcgcttggtgcaccgcgacctggcagccaggaacgtactggtgaaaacaccgcagcatgtcaagatcacagattttgggctggccaaactgctgggtgcggaagagaaagaataccatgcagaaggaggcaaagtgcctatcaagtggatggcattggaatcaattttacacagaatctatacccaccagagtgatgtctggagctacggggtgaccgtttgggagttgatgacctttggatccaagccatatgacggaatccctgccagcgagatctcctccatcctggagaaaggagaacgcctccctcagccacccatatgtaccatcgatgtctacatgatcatggtcaagtgctggatgatagacgcagatagtcgcccaaagttccgtgagttgatcatcgaattctccaaaatggcccgagacccccagcgctaccttgtcattcagggggatgaaagaatgcatttgccaagtcctacagactccaacttctaccgtgccctgatggatgaagaagacatggacgacgtggtggatgccgacgagtacctcatcccacagcagggcttcttcagcagcccctccacgtcacggactcccctcctgagctctctgagtgcaaccagcaacaattccaccgtggcttgcattgatagaaatgggctgcaaagctgtcccatcaaggaagacagcttcttgcagcgatacagctcagaccccacaggcgccttgactgaggacagcatagacgacaccttcctcccagtgcctgaatacataaaccagtccgttcccaaaaggcccgctggctctgtgcagaatcctgtctatcacaatcagcctctgaaccccgcgcccagcagagacccacactaccaggacccccacagcactgcagtgggcaaccccgagtatctcaacactgtccagcccacctgtgtcaacagcacattcgacagccctgcccactgggcccagaaaggcagccaccaaattagcctggacaaccctgactaccagcaggacttctttcccaaggaagccaagccaaatggcatctttaagggctccacagctgaaaatgcagaatacctaagggtcgcgccacaaagcagtgaatttattggagcatgaccacggaggatagtatgagccctaaaaatccagactctttcgatacccaggaccaagccacagcaggtcctccatcccaacagccatgcccgcattagctcttagacccacagactggttttgcaacgtttacaccgactagccaggaagtacttccacctcgggcacattttgggaagttgcattcctttgtcttcaaactgtgaagcatttacagaaacgcatccagcaagaatattgtccctttgagcagaaatttatctttcaaagaggtatatttgaaaaaaaaaaaaaagtatatgtgaggatttttattgattggggatcttggagtttttcattgtcgctattgatttttacttcaatgggctcttccaacaaggaagaagcttgctggtagcacttgctaccctgagttcatccaggcccaactgtgagcaaggagcacaagccacaagtcttccagaggatgcttgattccagtggttctgcttcaaggcttccactgcaaaacactaaagatccaagaaggccttcatggccccagcaggccggatcggtactgtatcaagtcatggcaggtacagtaggataagccactctgtcccttcctgggcaaagaagaaacggaggggatggaattcttccttagacttacttttgtaaaaatgtccccacggtacttactccccactgatggaccagtggtttccagtcatgagcgttagactgacttgtttgtcttccattccattgttttgaaactcagtatgctgcccctgtcttgctgtcatgaaatcagcaagagaggatgacacatcaaataataactcggattccagcccacattggattcatcagcatttggaccaatagcccacagctgagaatgtggaatacctaaggatagcaccgcttttgttctcgcaaaaacgtatctcctaatttgaggctcagatgaaatgcatcaggtcctttggggcatagatcagaagactacaaaaatgaagctgctctgaaatctcctttagccatcaccccaaccccccaaaattagtttgtgttacttatggaagatagttttctccttttacttcacttcaaaagctttttactcaaagagtatatgttccctccaggtcagctgcccccaaaccccctccttacgctttgtcacacaaaaagtgtctctgccttgagtcatctattcaagcacttacagctctggccacaacagggcattttacaggtgcgaatgacagtagcattatgagtagtgtggaattcaggtagtaaatatgaaactagggtttgaaattgataatgctttcacaacatttgcagatgttttagaaggaaaaaagttccttcctaaaataatttctctacaattggaagattggaagattcagctagttaggagcccaccttttttcctaatctgtgtgtgccctgtaacctgactggttaacagcagtcctttgtaaacagtgttttaaactctcctagtcaatatccaccccatccaatttatcaaggaagaaatggttcagaaaatattttcagcctacagttatgttcagtcacacacacatacaaaatgttccttttgcttttaaagtaatttttgactcccagatcagtcagagcccctacagcattgttaagaaagtatttgatttttgtctcaatgaaaataaaactatattcatttccactctattatgctctcaaatacccctaagcatctatactagcctggtatgggtatgaaagatacaaagataaataaaacatagtccctgattctaagaaattcacaatttagcaaaggaaatggactcatagatgctaaccttaaaacaacgtgacaaatgccagacaggacccatcagccaggcactgtgagagcacagagcagggaggttgggtcctgcctgaggagacctggaagggaggcctcacaggaggatgaccaggtctcagtcagcggggaggtggaaagtgcaggtgcatcaggggcaccctgaccgaggaaacagctgccagaggcctccactgctaaagtccacataaggctgaggtcagtcaccctaaacaacctgctccctctaagccaggggatgagcttggagcatcccacaagttccctaaaagttgcagcccccagggggattttgagctatcatctctgcacatgcttagtgagaagactacacaacatttctaagaatctgagattttatattgtcagttaaccactttcattattcattcacctcaggacatgcagaaatatttcagtcagaactgggaaacagaaggacctacattctgctgtcacttatgtgtcaagaagcagatgatcgatgaggcaggtcagttgtaagtgagtcacattgtagcattaaattctagtatttttgtagtttgaaacagtaacttaataaaagagcaaaagctattctagctttcttct

SEQ ID NO: 306282 - DNA, 6429 bp, Homo sapiens
tggggttggtcctaggaaaagccctcgctgtattgggtctggctcctttacacggcattgttctagcaaggctttctgccattcagcaatacattataaaatataccctcaattgtactttataagggaagcccaatgtcctttataagggaaattaaacataatttcattccatagtcaccgctataatgtgtgaactccatcatctatacgttagtaaacagacgtatttttatcataatccataaattatgataggtgggacagtgcacctaagaaaaaaatggactttttagagaagggtctttctgactctgcagagggcgccagctgggttttcccacactagtggaacactaggctgcaaagacagtaacttgggctttctgacgggagtcaacaccgtgctgcgcttcctccgtgtgtggcactgagtgtacttacctcacttgcccagcgtgtcctctctcctccataggtctgccgcaaattccgagacgaagccacgtgcaaggacacctgccccccactcatgctctacaaccccaccacgtaccagatggatgtgaaccccgagggcaaatacagctttggtgccacctgcgtgaagaagtgtccccgtaattatgtggtgacagatcacggctcgtgcgtccgagcctgtggggccgacagctatgagatggaggaagacggcgtccgcaagtgtaagaagtgcgaagggccttgccgcaaaggtaggaagcccgccggtgtgcggacgaggcttgttctcggctgctgaggctgggctctcatgccacctccaaaggaacacatcttcctcttctcattaaaaaacaactatacatatcgtttctttaaaacagaagataaagctgtaaagctaggttaggcaatgggaaggcactgaaggttgtgacggggtggggggctctgatgagaacagtcacagagccagccccgctcagcagctgccaggtgcccagccctggggagaatccagggaaggcagagctggaagcagtgcagctccaagcggcccatgggaaataatgaggagaacgcaaggtcagtgtgaggtgacagggatggcatctcctacaccgccgtagccccaaagtgtactataggtcctggtgtccccccttcccgcctgcactctccccagccccttcagtgtttgttgagtgaatgaaggatgatgtggcagtggcggttccggtgaccggaattccttcctgcttccctctgcctgtggatccctagctattcttaatccaacaaatgtgaacggaatacacgtctctcttatctctgcagtgtgtaacggaataggtattggtgaatttaaagactcactctccataaatgctacgaatattaaacacttcaaaaactgcacctccatcagtggcgatctccacatcctgccggtggcatttaggggtgactccttcacacatactcctcctctggatccacaggaactggatattctgaaaaccgtaaaggaaatcacagggtttttgctgattcaggcttggcctgaaaacaggacggacctccatgcctttgagaacctagaaatcatacgcggcaggaccaagcaacatggtcagttttctcttgcagtcgtcagcctgaacataacatccttgggattacgctccctcaaggagataagtgatggagatgtgataatttcaggaaacaaaaatttgtgctatgcaaatacaataaactggaaaaaactgtttgggacctccggtcagaaaaccaaaattataagcaacagaggtgaaaacagctgcaaggccacaggccaggtctgccatgccttgtgctcccccgagggctgctggggcccggagcccagggactgcgtctcttgccggaatgtcagccgaggcagggaatgcgtggacaagtgcaaccttctggagggtgagccaagggagtttgtggagaactctgagtgcatacagtgccacccagagtgcctgcctcaggccatgaacatcacctgcacaggacggggaccagacaactgtatccagtgtgcccactacattgacggcccccactgcgtcaagacctgcccggcaggagtcatgggagaaaacaacaccctggtctggaagtacgcagacgccggccatgtgtgccacctgtgccatccaaactgcacctacggatgcactgggccaggtcttgaaggctgtccaacgaatgggcctaagatcccgtccatcgccactgggatggtgggggccctcctcttgctgctggtggtggccctggggatcggcctcttcatgcgaaggcgccacatcgttcggaagcgcacgctgcggaggctgctgcaggagagggagcttgtggagcctcttacacccagtggagaagctcccaaccaagctctcttgaggatcttgaaggaaactgaattcaaaaagatcaaagtgctgggctccggtgcgttcggcacggtgtataagggactctggatcccagaaggtgagaaagttaaaattcccgtcgctatcaaggaattaagagaagcaacatctccgaaagccaacaaggaaatcctcgatgaagcctacgtgatggccagcgtggacaacccccacgtgtgccgcctgctgggcatctgcctcacctccaccgtgcagctcatcacgcagctcatgcccttcggctgcctcctggactatgtccgggaacacaaagacaatattggctcccagtacctgctcaactggtgtgtgcagatcgcaaagggcatgaactacttggaggaccgtcgcttggtgcaccgcgacctggcagccaggaacgtactggtgaaaacaccgcagcatgtcaagatcacagattttgggctggccaaactgctgggtgcggaagagaaagaataccatgcagaaggaggcaaagtgcctatcaagtggatggcattggaatcaattttacacagaatctatacccaccagagtgatgtctggagctacggggtgaccgtttgggagttgatgacctttggatccaagccatatgacggaatccctgccagcgagatctcctccatcctggagaaaggagaacgcctccctcagccacccatatgtaccatcgatgtctacatgatcatggtcaagtgctggatgatagacgcagatagtcgcccaaagttccgtgagttgatcatcgaattctccaaaatggcccgagacccccagcgctaccttgtcattcagggggatgaaagaatgcatttgccaagtcctacagactccaacttctaccgtgccctgatggatgaagaagacatggacgacgtggtggatgccgacgagtacctcatcccacagcagggcttcttcagcagcccctccacgtcacggactcccctcctgagctctctgagtgcaaccagcaacaattccaccgtggcttgcattgatagaaatgggctgcaaagctgtcccatcaaggaagacagcttcttgcagcgatacagctcagaccccacaggcgccttgactgaggacagcatagacgacaccttcctcccagtgcctgaatacataaaccagtccgttcccaaaaggcccgctggctctgtgcagaatcctgtctatcacaatcagcctctgaaccccgcgcccagcagagacccacactaccaggacccccacagcactgcagtgggcaaccccgagtatctcaacactgtccagcccacctgtgtcaacagcacattcgacagccctgcccactgggcccagaaaggcagccaccaaattagcctggacaaccctgactaccagcaggacttctttcccaaggaagccaagccaaatggcatctttaagggctccacagctgaaaatgcagaatacctaagggtcgcgccacaaagcagtgaatttattggagcatgaccacggaggatagtatgagccctaaaaatccagactctttcgatacccaggaccaagccacagcaggtcctccatcccaacagccatgcccgcattagctcttagacccacagactggttttgcaacgtttacaccgactagccaggaagtacttccacctcgggcacattttgggaagttgcattcctttgtcttcaaactgtgaagcatttacagaaacgcatccagcaagaatattgtccctttgagcagaaatttatctttcaaagaggtatatttgaaaaaaaaaaaaaagtatatgtgaggatttttattgattggggatcttggagtttttcattgtcgctattgatttttacttcaatgggctcttccaacaaggaagaagcttgctggtagcacttgctaccctgagttcatccaggcccaactgtgagcaaggagcacaagccacaagtcttccagaggatgcttgattccagtggttctgcttcaaggcttccactgcaaaacactaaagatccaagaaggccttcatggccccagcaggccggatcggtactgtatcaagtcatggcaggtacagtaggataagccactctgtcccttcctgggcaaagaagaaacggaggggatggaattcttccttagacttacttttgtaaaaatgtccccacggtacttactccccactgatggaccagtggtttccagtcatgagcgttagactgacttgtttgtcttccattccattgttttgaaactcagtatgctgcccctgtcttgctgtcatgaaatcagcaagagaggatgacacatcaaataataactcggattccagcccacattggattcatcagcatttggaccaatagcccacagctgagaatgtggaatacctaaggatagcaccgcttttgttctcgcaaaaacgtatctcctaatttgaggctcagatgaaatgcatcaggtcctttggggcatagatcagaagactacaaaaatgaagctgctctgaaatctcctttagccatcaccccaaccccccaaaattagtttgtgttacttatggaagatagttttctccttttacttcacttcaaaagctttttactcaaagagtatatgttccctccaggtcagctgcccccaaaccccctccttacgctttgtcacacaaaaagtgtctctgccttgagtcatctattcaagcacttacagctctggccacaacagggcattttacaggtgcgaatgacagtagcattatgagtagtgtggaattcaggtagtaaatatgaaactagggtttgaaattgataatgctttcacaacatttgcagatgttttagaaggaaaaaagttccttcctaaaataatttctctacaattggaagattggaagattcagctagttaggagcccaccttttttcctaatctgtgtgtgccctgtaacctgactggttaacagcagtcctttgtaaacagtgttttaaactctcctagtcaatatccaccccatccaatttatcaaggaagaaatggttcagaaaatattttcagcctacagttatgttcagtcacacacacatacaaaatgttccttttgcttttaaagtaatttttgactcccagatcagtcagagcccctacagcattgttaagaaagtatttgatttttgtctcaatgaaaataaaactatattcatttccactctattatgctctcaaatacccctaagcatctatactagcctggtatgggtatgaaagatacaaagataaataaaacatagtccctgattctaagaaattcacaatttagcaaaggaaatggactcatagatgctaaccttaaaacaacgtgacaaatgccagacaggacccatcagccaggcactgtgagagcacagagcagggaggttgggtcctgcctgaggagacctggaagggaggcctcacaggaggatgaccaggtctcagtcagcggggaggtggaaagtgcaggtgcatcaggggcaccctgaccgaggaaacagctgccagaggcctccactgctaaagtccacataaggctgaggtcagtcaccctaaacaacctgctccctctaagccaggggatgagcttggagcatcccacaagttccctaaaagttgcagcccccagggggattttgagctatcatctctgcacatgcttagtgagaagactacacaacatttctaagaatctgagattttatattgtcagttaaccactttcattattcattcacctcaggacatgcagaaatatttcagtcagaactgggaaacagaaggacctacattctgctgtcacttatgtgtcaagaagcagatgatcgatgaggcaggtcagttgtaagtgagtcacattgtagcattaaattctagtatttttgtagtttgaaacagtaacttaataaaagagcaaaagctattctagctttcttct

SEQ ID NO: 306283 - DNA, 5771 bp, Homo sapiens
gaaaacaggctgggcccggtggctcactcctgtaatcccagcactttgggaggttgaggtgggcggatcacctgaggtcaggagtttgagaccagccggcgggagtggccttgggtccccgctgctggttctcctccctcctcctcgcattctcctcctcctctgctcctcccgatccctcctccgccgcctggtccctcctcctcccgccctgcctccccgcgcctcggcccgcgcgagctagacgtccgggcagcccccggcgcagcgcggccgcagcagcctccgccccccgcacggtgtgagcgcccgccgcggccgaggcggccggagtcccgagctagccccggcggccgccgccgcccagaccggacgacaggccacctcgtcggcgtccgcccgagtccccgcctcgccgccaacgccacaaccaccgcgcacggccccctgactccgtccagtattgatcgggagagccggagcgagctcttcggggagcagcgatgcgaccctccgggacggccggggcagcgctcctggcgctgctggctgcgctctgcccggcgagtcgggctctggaggaaaagaaagtttgccaaggcacgagtaacaagctcacgcagttgggcacttttgaagatcattttctcagcctccagaggatgttcaataactgtgaggtggtccttgggaatttggaaattacctatgtgcagaggaattatgatctttccttcttaaagaccatccaggaggtggctggttatgtcctcattgccctcaacacagtggagcgaattcctttggaaaacctgcagatcatcagaggaaatatgtactacgaaaattcctatgccttagcagtcttatctaactatgatgcaaataaaaccggactgaaggagctgcccatgagaaatttacaggaaatcctgcatggcgccgtgcggttcagcaacaaccctgccctgtgcaacgtggagagcatccagtggcgggacatagtcagcagtgactttctcagcaacatgtcgatggacttccagaaccacctgggcagctgccaaaagtgtgatccaagctgtcccaatgggagctgctggggtgcaggagaggagaactgccagaaactgaccaaaatcatctgtgcccagcagtgctccgggcgctgccgtggcaagtcccccagtgactgctgccacaaccagtgtgctgcaggctgcacaggcccccgggagagcgactgcctggtctgccgcaaattccgagacgaagccacgtgcaaggacacctgccccccactcatgctctacaaccccaccacgtaccagatggatgtgaaccccgagggcaaatacagctttggtgccacctgcgtgaagaagtgtccccgtaattatgtggtgacagatcacggctcgtgcgtccgagcctgtggggccgacagctatgagatggaggaagacggcgtccgcaagtgtaagaagtgcgaagggccttgccgcaaagtgtgtaacggaataggtattggtgaatttaaagactcactctccataaatgctacgaatattaaacacttcaaaaactgcacctccatcagtggcgatctccacatcctgccggtggcatttaggggtgactccttcacacatactcctcctctggatccacaggaactggatattctgaaaaccgtaaaggaaatcacagggtttttgctgattcaggcttggcctgaaaacaggacggacctccatgcctttgagaacctagaaatcatacgcggcaggaccaagcaacatggtcagttttctcttgcagtcgtcagcctgaacataacatccttgggattacgctccctcaaggagataagtgatggagatgtgataatttcaggaaacaaaaatttgtgctatgcaaatacaataaactggaaaaaactgtttgggacctccggtcagaaaaccaaaattataagcaacagaggtgaaaacagctgcaaggccacaggccaggtctgccatgccttgtgctcccccgagggctgctggggcccggagcccagggactgcgtctcttgccggaatgtcagccgaggcagggaatgcgtggacaagtgcaaccttctggagggtgagccaagggagtttgtggagaactctgagtgcatacagtgccacccagagtgcctgcctcaggccatgaacatcacctgcacaggacggggaccagacaactgtatccagtgtgcccactacattgacggcccccactgcgtcaagacctgcccggcaggagtcatgggagaaaacaacaccctggtctggaagtacgcagacgccggccatgtgtgccacctgtgccatccaaactgcacctacggatgcactgggccaggtcttgaaggctgtccaacgaatgggcctaagatcccgtccatcgccactgggatggtgggggccctcctcttgctgctggtggtggccctggggatcggcctcttcatgcgaaggcgccacatcgttcggaagcgcacgctgcggaggctgctgcaggagagggagcttgtggagcctcttacacccagtggagaagctcccaaccaagctctcttgaggatcttgaaggaaactgaattcaaaaagatcaaagtgctgggctccggtgcgttcggcacggtgtataagggactctggatcccagaaggtgagaaagttaaaattcccgtcgctatcaaggaattaagagaagcaacatctccgaaagccaacaaggaaatcctcgatgaagcctacgtgatggccagcgtggacaacccccacgtgtgccgcctgctgggcatctgcctcacctccaccgtgcagctcatcacgcagctcatgcccttcggctgcctcctggactatgtccgggaacacaaagacaatattggctcccagtacctgctcaactggtgtgtgcagatcgcaaagggcatgaactacttggaggaccgtcgcttggtgcaccgcgacctggcagccaggaacgtactggtgaaaacaccgcagcatgtcaagatcacagattttgggctggccaaactgctgggtgcggaagagaaagaataccatgcagaaggaggcaaagtgcctatcaagtggatggcattggaatcaattttacacagaatctatacccaccagagtgatgtctggagctacggggtgaccgtttgggagttgatgacctttggatccaagccatatgacggaatccctgccagcgagatctcctccatcctggagaaaggagaacgcctccctcagccacccatatgtaccatcgatgtctacatgatcatggtcaagtgctggatgatagacgcagatagtcgcccaaagttccgtgagttgatcatcgaattctccaaaatggcccgagacccccagcgctaccttgtcattcagggggatgaaagaatgcatttgccaagtcctacagactccaacttctaccgtgccctgatggatgaagaagacatggacgacgtggtggatgccgacgagtacctcatcccacagcagggcttcttcagcagcccctccacgtcacggactcccctcctgagctctctgagtgcaaccagcaacaattccaccgtggcttgcattgatagaaatgggctgcaaagctgtcccatcaaggaagacagcttcttgcagcgatacagctcagaccccacaggcgccttgactgaggacagcatagacgacaccttcctcccagtgcctgaatacataaaccagtccgttcccaaaaggcccgctggctctgtgcagaatcctgtctatcacaatcagcctctgaaccccgcgcccagcagagacccacactaccaggacccccacagcactgcagtgggcaaccccgagtatctcaacactgtccagcccacctgtgtcaacagcacattcgacagccctgcccactgggcccagaaaggcagccaccaaattagcctggacaaccctgactaccagcaggacttctttcccaaggaagccaagccaaatggcatctttaagggctccacagctgaaaatgcagaatacctaagggtcgcgccacaaagcagtgaatttattggagcatgaccacggaggatagtatgagccctaaaaatccagactctttcgatacccaggaccaagccacagcaggtcctccatcccaacagccatgcccgcattagctcttagacccacagactggttttgcaacgtttacaccgactagccaggaagtacttccacctcgggcacattttgggaagttgcattcctttgtcttcaaactgtgaagcatttacagaaacgcatccagcaagaatattgtccctttgagcagaaatttatctttcaaagaggtatatttgaaaaaaaaaaaaaagtatatgtgaggatttttattgattggggatcttggagtttttcattgtcgctattgatttttacttcaatgggctcttccaacaaggaagaagcttgctggtagcacttgctaccctgagttcatccaggcccaactgtgagcaaggagcacaagccacaagtcttccagaggatgcttgattccagtggttctgcttcaaggcttccactgcaaaacactaaagatccaagaaggccttcatggccccagcaggccggatcggtactgtatcaagtcatggcaggtacagtaggataagccactctgtcccttcctgggcaaagaagaaacggaggggatggaattcttccttagacttacttttgtaaaaatgtccccacggtacttactccccactgatggaccagtggtttccagtcatgagcgttagactgacttgtttgtcttccattccattgttttgaaactcagtatgctgcccctgtcttgctgtcatgaaatcagcaagagaggatgacacatcaaataataactcggattccagcccacattggattcatcagcatttggaccaatagcccacagctgagaatgtggaatacctaaggatagcaccgcttttgttctcgcaaaaacgtatctcctaatttgaggctcagatgaaatgcatcaggtcctttggggcatagatcagaagactacaaaaatgaagctgctctgaaatctcctttagccatcaccccaaccccccaaaattagtttgtgttacttatggaagatagttttctccttttacttcacttcaaaagctttttactcaaagagtatatgttccctccaggtcagctcggggaggtggaaagtgcaggtgcatcaggggcaccctgaccgaggaaacagctgccagaggcctccactgctaaagtccacataaggctgaggtcagtcaccctaaacaacctgctccctctaagccaggggatgagcttggagcatcccacaagttccctaaaagttgcagcccccagggggattttgagctatcatctctgcacatgcttagtgagaagactacacaacatttctaagaatctgagattttatattgtcagttaaccactttcattattcattcacctcaggacatgcagaaatatttcagtcagaactgggaaacagaaggacctacattctgctgtcacttatgtgtcaagaagcagatgatcgatgaggcaggtcagttgtaagtgagtcacattgtagcattaaattctagtatttttgtagtttgaaacagtaacttaataaaagagcaaaagctattctagctttcttct

SEQ ID NO: 306284 - DNA, 5263 bp, Homo sapiens
  misc_feature (362)..(362): n is a, c, g, or t
atttaacctgcacagaatttgggacagagaacctctagtgtttgttcaataaatatatgaatggatagagggacaggttgggtggtggatagatggatgaacccacacctttgaagtgtatttggctgtttgagaggttagaatatgttctcaatttccaggcaaaatgaaaatggagaaaatataatgacattaaggcattttattcatcctccccatctgccactgggttaaagatactaaataaacaaggaactatcttttgcctggaggaactttaaaaacacctgcagttttcaaaaggtgcagtgtgtgcctcccacagcatgacctaccatcattggaaagcagtttgtagtcantcaaaggtggtctggagaaacaaagttttcagggatacattgtttttataatttttcaccacatgatttttcttctctccaatgtagtggtcagttttctcttgcagtcgtcagcctgaacataacatccttgggattacgctccctcaaggagataagtgatggagatgtgataatttcaggaaacaaaaatttgtgctatgcaaatacaataaactggaaaaaactgtttgggacctccggtcagaaaaccaaaattataagcaacagaggtgaaaacagctgcaaggccacaggccaggtctgccatgccttgtgctcccccgagggctgctggggcccggagcccagggactgcgtctcttgccggaatgtcagccgaggcagggaatgcgtggacaagtgcaaccttctggagggtgagccaagggagtttgtggagaactctgagtgcatacagtgccacccagagtgcctgcctcaggccatgaacatcacctgcacaggacggggaccagacaactgtatccagtgtgcccactacattgacggcccccactgcgtcaagacctgcccggcaggagtcatgggagaaaacaacaccctggtctggaagtacgcagacgccggccatgtgtgccacctgtgccatccaaactgcacctacggatgcactgggccaggtcttgaaggctgtccaacgaatgggcctaagatcccgtccatcgccactgggatggtgggggccctcctcttgctgctggtggtggccctggggatcggcctcttcatgcgaaggcgccacatcgttcggaagcgcacgctgcggaggctgctgcaggagagggagcttgtggagcctcttacacccagtggagaagctcccaaccaagctctcttgaggatcttgaaggaaactgaattcaaaaagatcaaagtgctgggctccggtgcgttcggcacggtgtataagggactctggatcccagaaggtgagaaagttaaaattcccgtcgctatcaaggaattaagagaagcaacatctccgaaagccaacaaggaaatcctcgatgaagcctacgtgatggccagcgtggacaacccccacgtgtgccgcctgctgggcatctgcctcacctccaccgtgcagctcatcacgcagctcatgcccttcggctgcctcctggactatgtccgggaacacaaagacaatattggctcccagtacctgctcaactggtgtgtgcagatcgcaaagggcatgaactacttggaggaccgtcgcttggtgcaccgcgacctggcagccaggaacgtactggtgaaaacaccgcagcatgtcaagatcacagattttgggctggccaaactgctgggtgcggaagagaaagaataccatgcagaaggaggcaaagtgcctatcaagtggatggcattggaatcaattttacacagaatctatacccaccagagtgatgtctggagctacggggtgaccgtttgggagttgatgacctttggatccaagccatatgacggaatccctgccagcgagatctcctccatcctggagaaaggagaacgcctccctcagccacccatatgtaccatcgatgtctacatgatcatggtcaagtgctggatgatagacgcagatagtcgcccaaagttccgtgagttgatcatcgaattctccaaaatggcccgagacccccagcgctaccttgtcattcagggggatgaaagaatgcatttgccaagtcctacagactccaacttctaccgtgccctgatggatgaagaagacatggacgacgtggtggatgccgacgagtacctcatcccacagcagggcttcttcagcagcccctccacgtcacggactcccctcctgagctctctgagtgcaaccagcaacaattccaccgtggcttgcattgatagaaatgggctgcaaagctgtcccatcaaggaagacagcttcttgcagcgatacagctcagaccccacaggcgccttgactgaggacagcatagacgacaccttcctcccagtgcctgaatacataaaccagtccgttcccaaaaggcccgctggctctgtgcagaatcctgtctatcacaatcagcctctgaaccccgcgcccagcagagacccacactaccaggacccccacagcactgcagtgggcaaccccgagtatctcaacactgtccagcccacctgtgtcaacagcacattcgacagccctgcccactgggcccagaaaggcagccaccaaattagcctggacaaccctgactaccagcaggacttctttcccaaggaagccaagccaaatggcatctttaagggctccacagctgaaaatgcagaatacctaagggtcgcgccacaaagcagtgaatttattggagcatgaccacggaggatagtatgagccctaaaaatccagactctttcgatacccaggaccaagccacagcaggtcctccatcccaacagccatgcccgcattagctcttagacccacagactggttttgcaacgtttacaccgactagccaggaagtacttccacctcgggcacattttgggaagttgcattcctttgtcttcaaactgtgaagcatttacagaaacgcatccagcaagaatattgtccctttgagcagaaatttatctttcaaagaggtatatttgaaaaaaaaaaaaaagtatatgtgaggatttttattgattggggatcttggagtttttcattgtcgctattgatttttacttcaatgggctcttccaacaaggaagaagcttgctggtagcacttgctaccctgagttcatccaggcccaactgtgagcaaggagcacaagccacaagtcttccagaggatgcttgattccagtggttctgcttcaaggcttccactgcaaaacactaaagatccaagaaggccttcatggccccagcaggccggatcggtactgtatcaagtcatggcaggtacagtaggataagccactctgtcccttcctgggcaaagaagaaacggaggggatggaattcttccttagacttacttttgtaaaaatgtccccacggtacttactccccactgatggaccagtggtttccagtcatgagcgttagactgacttgtttgtcttccattccattgttttgaaactcagtatgctgcccctgtcttgctgtcatgaaatcagcaagagaggatgacacatcaaataataactcggattccagcccacattggattcatcagcatttggaccaatagcccacagctgagaatgtggaatacctaaggatagcaccgcttttgttctcgcaaaaacgtatctcctaatttgaggctcagatgaaatgcatcaggtcctttggggcatagatcagaagactacaaaaatgaagctgctctgaaatctcctttagccatcaccccaaccccccaaaattagtttgtgttacttatggaagatagttttctccttttacttcacttcaaaagctttttactcaaagagtatatgttccctccaggtcagctgcccccaaaccccctccttacgctttgtcacacaaaaagtgtctctgccttgagtcatctattcaagcacttacagctctggccacaacagggcattttacaggtgcgaatgacagtagcattatgagtagtgtggaattcaggtagtaaatatgaaactagggtttgaaattgataatgctttcacaacatttgcagatgttttagaaggaaaaaagttccttcctaaaataatttctctacaattggaagattggaagattcagctagttaggagcccaccttttttcctaatctgtgtgtgccctgtaacctgactggttaacagcagtcctttgtaaacagtgttttaaactctcctagtcaatatccaccccatccaatttatcaaggaagaaatggttcagaaaatattttcagcctacagttatgttcagtcacacacacatacaaaatgttccttttgcttttaaagtaatttttgactcccagatcagtcagagcccctacagcattgttaagaaagtatttgatttttgtctcaatgaaaataaaactatattcatttccactctattatgctctcaaatacccctaagcatctatactagcctggtatgggtatgaaagatacaaagataaataaaacatagtccctgattctaagaaattcacaatttagcaaaggaaatggactcatagatgctaaccttaaaacaacgtgacaaatgccagacaggacccatcagccaggcactgtgagagcacagagcagggaggttgggtcctgcctgaggagacctggaagggaggcctcacaggaggatgaccaggtctcagtcagcggggaggtggaaagtgcaggtgcatcaggggcaccctgaccgaggaaacagctgccagaggcctccactgctaaagtccacataaggctgaggtcagtcaccctaaacaacctgctccctctaagccaggggatgagcttggagcatcccacaagttccctaaaagttgcagcccccagggggattttgagctatcatctctgcacatgcttagtgagaagactacacaacatttctaagaatctgagattttatattgtcagttaaccactttcattattcattcacctcaggacatgcagaaatatttcagtcagaactgggaaacagaaggacctacattctgctgtcacttatgtgtcaagaagcagatgatcgatgaggcaggtcagttgtaagtgagtcacattgtagcattaaattctagtatttttgtagtttgaaacagtaacttaataaaagagcaaaagctattctagctttcttct

SEQ ID NO: 306285 - DNA, 5312 bp, Homo sapiens
gaaaacaggctgggcccggtggctcactcctgtaatcccagcactttgggaggttgaggtgggcggatcacctgaggtcaggagtttgagaccagccggcgggagtggccttgggtccccgctgctggttctcctccctcctcctcgcattctcctcctcctctgctcctcccgatccctcctccgccgcctggtccctcctcctcccgccctgcctccccgcgcctcggcccgcgcgagctagacgtccgggcagcccccggcgcagcgcggccgcagcagcctccgccccccgcacggtgtgagcgcccgccgcggccgaggcggccggagtcccgagctagccccggcggccgccgccgcccagaccggacgacaggccacctcgtcggcgtccgcccgagtccccgcctcgccgccaacgccacaaccaccgcgcacggccccctgactccgtccagtattgatcgggagagccggagcgagctcttcggggagcagcgatgcgaccctccgggacggccggggcagcgctcctggcgctgctggctgcgctctgcccggcgagtcgggctctggaggaaaagaaagtttgccaaggcacgagtaacaagctcacgcagttgggcacttttgaagatcattttctcagcctccagaggatgttcaataactgtgaggtggtccttgggaatttggaaattacctatgtgcagaggaattatgatctttccttcttaaagaccatccaggaggtggctggttatgtcctcattgccctcaacacagtggagcgaattcctttggaaaacctgcagatcatcagaggaaatatgtactacgaaaattcctatgccttagcagtcttatctaactatgatgcaaataaaaccggactgaaggagctgcccatgagaaatttacaggaaatcctgcatggcgccgtgcggttcagcaacaaccctgccctgtgcaacgtggagagcatccagtggcgggacatagtcagcagtgactttctcagcaacatgtcgatggacttccagaaccacctgggcagctgccaaaagtgtgatccaagctgtcccaatgggagctgctggggtgcaggagaggagaactgccagaaactgaccaaaatcatctgtgcccagcagtgctccgggcgctgccgtggcaagtcccccagtgactgctgccacaaccagtgtgctgcaggctgcacaggcccccgggagagcgactgcctggtctgccgcaaattccgagacgaagccacgtgcaaggacacctgccccccactcatgctctacaaccccaccacgtaccagatggatgtgaaccccgagggcaaatacagctttggtgccacctgcgtgaagaagtgtccccgtaattatgtggtgacagatcacggctcgtgcgtccgagcctgtggggccgacagctatgagatggaggaagacggcgtccgcaagtgtaagaagtgcgaagggccttgccgcaaagtgtgtaacggaataggtattggtgaatttaaagactcactctccataaatgctacgaatattaaacacttcaaaaactgcacctccatcagtggcgatctccacatcctgccggtggcatttaggggtgactccttcacacatactcctcctctggatccacaggaactggatattctgaaaaccgtaaaggaaatcacagggtttttgctgattcaggcttggcctgaaaacaggacggacctccatgcctttgagaacctagaaatcatacgcggcaggaccaagcaacatggtcagttttctcttgcagtcgtcagcctgaacataacatccttgggattacgctccctcaaggagataagtgatggagatgtgataatttcaggaaacaaaaatttgtgctatgcaaatacaataaactggaaaaaactgtttgggacctccggtcagaaaaccaaaattataagcaacagaggtgaaaacagctgcaaggccacaggccaggtctgccatgccttgtgctcccccgagggctgctggggcccggagcccagggactgcgtctcttgccggaatgtcagccgaggcagggaatgcgtggacaagtgcaaccttctggagggtgagccaagggagtttgtggagaactctgagtgcatacagtgccacccagagtgcctgcctcaggccatgaacatcacctgcacaggacggggaccagacaactgtatccagtgtgcccactacattgacggcccccactgcgtcaagacctgcccggcaggagtcatgggagaaaacaacaccctggtctggaagtacgcagacgccggccatgtgtgccacctgtgccatccaaactgcacctacggatgcactgggccaggtcttgaaggctgtccaacgaatgggcctaagatcccgtccatcgccactgggatggtgggggccctcctcttgctgctggtggtggccctggggatcggcctcttcatgcgaaggcgccacatcgttcggaagcgcacgctgcggaggctgctgcaggagagggagcttgtggagcctcttacacccagtggagaagctcccaaccaagctctcttgaggatcttgaaggaaactgaattcaaaaagatcaaagtgctgggctccggtgcgttcggcacggtgtataagggactctggatcccagaaggtgagaaagttaaaattcccgtcgctatcaaggaattaagagaagcaacatctccgaaagccaacaaggaaatcctcgatgaagcctacgtgatggccagcgtggacaacccccacgtgtgccgcctgctgggcatctgcctcacctccaccgtgcagctcatcacgcagctcatgcccttcggctgcctcctggactatgtccgggaacacaaagacaatattggctcccagtacctgctcaactggtgtgtgcagatcgcaaagggcatgaactacttggaggaccgtcgcttggtgcaccgcgacctggcagccaggaacgtactggtgaaaacaccgcagcatgtcaagatcacagattttgggctggccaaactgctgggtgcggaagagaaagaataccatgcagaaggaggcaaagtgcctatcaagtggatggcattggaatcaattttacacagaatctatacccaccagagtgatgtctggagctacggggtgaccgtttgggagttgatgacctttggatccaagccatatgacggaatccctgccagcgagatctcctccatcctggagaaaggagaacgcctccctcagccacccatatgtaccatcgatgtctacatgatcatggtcaagtgctggatgatagacgcagatagtcgcccaaagttccgtgagttgatcatcgaattctccaaaatggcccgagacccccagcgctaccttgtcattcagggggatgaaagaatgcatttgccaagtcctacagactccaacttctaccgtgccctgatggatgaagaagacatggacgacgtggtggatgccgacgagtacctcatcccacagcagggcttcttcagcagcccctccacgtcacggactcccctcctgagctctctgagtgcaaccagcaacaattccaccgtggcttgcattgatagaaatgggctgcaaagctgtcccatcaaggaagacagcttcttgcagcgatacagctcagaccccacaggcgccttgactgaggacagcatagacgacaccttcctcccagtgcctgaatacataaaccagtccgttcccaaaaggcccgctggctctgtgcagaatcctgtctatcacaatcagcctctgaaccccgcgcccagcagagacccacactaccaggacccccacagcactgcagtgggcaaccccgagtatctcaacactgtccagcccacctgtgtcaacagcacattcgacagccctgcccactgggcccagaaaggcagccaccaaattagcctggacaaccctgactaccagcaggacttctttcccaaggaagccaagccaaatggcatctttaagggctccacagctgaaaatgcagaatacctaagggtcgcgccacaaagcagtgaatttattggagcatgaccacggaggatagtatgagccctaaaaatccagactctttcgatacccaggaccaagccacagcaggtcctccatcccaacagccatgcccgcattagctcttagacccacagactggttttgcaacgtttacaccgactagccaggaagtacttccacctcgggcacattttgggaagttgcattcctttgtcttcaaactgtgaagcatttacagaaacgcatccagcaagaatattgtccctttgagcagaaatttatctttcaaagaggtatatttgaaaaaaaaaaaaaagtatatgtgaggatttttattgattggggatcttggagtttttcattgtcgctattgatttttacttcaatgggctcttccaacaaggaagaagcttgctggtagcacttgctaccctgagttcatccaggcccaactgtgagcaaggagcacaagccacaagtcttccagaggatgcttgattccagtggttctgcttcaaggcttccactgcaaaacactaaagatccaagaaggccttcatggccccagcaggccggatcggtactgtatcaagtcatggcaggtacagtaggataagccactctgtcccttcctgggcaaagaagaaacggaggggatggaattcttccttagacttacttttgtaaaaatgtccccacggtacttactccccactgatggaccagtggtttccagtcatgagcgttagactgacttgtttgtcttccattccattgttttgaaactcagtatgctgcccctgtcttgctgtcatgaaatcagcaagagaggatgacacatcaaataataactcggattccagcccacattggattcatcagcatttggaccaatagcccacagctgagaatgtggaatacctaaggatagcaccgcttttgttctcgcaaaaacgtatctcctaatttgaggctcagatgaaatgcatcaggtcctttggggcatagatcagaagactacaaaaatgaagctgctctgaaatctcctttagccatcaccccaaccccccaaaattagtttgtgttacttatggaagatagttttctccttttacttcacttcaaaagctttttactcaaagagtatatgttccctccaggtcagctgccgattctgtgctgatgaccgatattatg

SEQ ID NO: 306286 - DNA, 4804 bp, Homo sapiens
taggctagtacgagctggtgttaatcggccgggctgggattacgctccctcaaggagataagtgatggagatgtgataatttcaggaaacaaaaatttgtgctatgcaaatacaataaactggaaaaaactgtttgggacctccggtcagaaaaccaaaattataagcaacagaggtgaaaacagctgcaaggccacaggccaggtctgccatgccttgtgctcccccgagggctgctggggcccggagcccagggactgcgtctcttgccggaatgtcagccgaggcagggaatgcgtggacaagtgcaaccttctggagggtgagccaagggagtttgtggagaactctgagtgcatacagtgccacccagagtgcctgcctcaggccatgaacatcacctgcacaggacggggaccagacaactgtatccagtgtgcccactacattgacggcccccactgcgtcaagacctgcccggcaggagtcatgggagaaaacaacaccctggtctggaagtacgcagacgccggccatgtgtgccacctgtgccatccaaactgcacctacggatgcactgggccaggtcttgaaggctgtccaacgaatgggcctaagatcccgtccatcgccactgggatggtgggggccctcctcttgctgctggtggtggccctggggatcggcctcttcatgcgaaggcgccacatcgttcggaagcgcacgctgcggaggctgctgcaggagagggagcttgtggagcctcttacacccagtggagaagctcccaaccaagctctcttgaggatcttgaaggaaactgaattcaaaaagatcaaagtgctgggctccggtgcgttcggcacggtgtataagggactctggatcccagaaggtgagaaagttaaaattcccgtcgctatcaaggaattaagagaagcaacatctccgaaagccaacaaggaaatcctcgatgaagcctacgtgatggccagcgtggacaacccccacgtgtgccgcctgctgggcatctgcctcacctccaccgtgcagctcatcacgcagctcatgcccttcggctgcctcctggactatgtccgggaacacaaagacaatattggctcccagtacctgctcaactggtgtgtgcagatcgcaaagggcatgaactacttggaggaccgtcgcttggtgcaccgcgacctggcagccaggaacgtactggtgaaaacaccgcagcatgtcaagatcacagattttgggctggccaaactgctgggtgcggaagagaaagaataccatgcagaaggaggcaaagtgcctatcaagtggatggcattggaatcaattttacacagaatctatacccaccagagtgatgtctggagctacggggtgaccgtttgggagttgatgacctttggatccaagccatatgacggaatccctgccagcgagatctcctccatcctggagaaaggagaacgcctccctcagccacccatatgtaccatcgatgtctacatgatcatggtcaagtgctggatgatagacgcagatagtcgcccaaagttccgtgagttgatcatcgaattctccaaaatggcccgagacccccagcgctaccttgtcattcagggggatgaaagaatgcatttgccaagtcctacagactccaacttctaccgtgccctgatggatgaagaagacatggacgacgtggtggatgccgacgagtacctcatcccacagcagggcttcttcagcagcccctccacgtcacggactcccctcctgagctctctgagtgcaaccagcaacaattccaccgtggcttgcattgatagaaatgggctgcaaagctgtcccatcaaggaagacagcttcttgcagcgatacagctcagaccccacaggcgccttgactgaggacagcatagacgacaccttcctcccagtgcctgaatacataaaccagtccgttcccaaaaggcccgctggctctgtgcagaatcctgtctatcacaatcagcctctgaaccccgcgcccagcagagacccacactaccaggacccccacagcactgcagtgggcaaccccgagtatctcaacactgtccagcccacctgtgtcaacagcacattcgacagccctgcccactgggcccagaaaggcagccaccaaattagcctggacaaccctgactaccagcaggacttctttcccaaggaagccaagccaaatggcatctttaagggctccacagctgaaaatgcagaatacctaagggtcgcgccacaaagcagtgaatttattggagcatgaccacggaggatagtatgagccctaaaaatccagactctttcgatacccaggaccaagccacagcaggtcctccatcccaacagccatgcccgcattagctcttagacccacagactggttttgcaacgtttacaccgactagccaggaagtacttccacctcgggcacattttgggaagttgcattcctttgtcttcaaactgtgaagcatttacagaaacgcatccagcaagaatattgtccctttgagcagaaatttatctttcaaagaggtatatttgaaaaaaaaaaaaaagtatatgtgaggatttttattgattggggatcttggagtttttcattgtcgctattgatttttacttcaatgggctcttccaacaaggaagaagcttgctggtagcacttgctaccctgagttcatccaggcccaactgtgagcaaggagcacaagccacaagtcttccagaggatgcttgattccagtggttctgcttcaaggcttccactgcaaaacactaaagatccaagaaggccttcatggccccagcaggccggatcggtactgtatcaagtcatggcaggtacagtaggataagccactctgtcccttcctgggcaaagaagaaacggaggggatggaattcttccttagacttacttttgtaaaaatgtccccacggtacttactccccactgatggaccagtggtttccagtcatgagcgttagactgacttgtttgtcttccattccattgttttgaaactcagtatgctgcccctgtcttgctgtcatgaaatcagcaagagaggatgacacatcaaataataactcggattccagcccacattggattcatcagcatttggaccaatagcccacagctgagaatgtggaatacctaaggatagcaccgcttttgttctcgcaaaaacgtatctcctaatttgaggctcagatgaaatgcatcaggtcctttggggcatagatcagaagactacaaaaatgaagctgctctgaaatctcctttagccatcaccccaaccccccaaaattagtttgtgttacttatggaagatagttttctccttttacttcacttcaaaagctttttactcaaagagtatatgttccctccaggtcagctgcccccaaaccccctccttacgctttgtcacacaaaaagtgtctctgccttgagtcatctattcaagcacttacagctctggccacaacagggcattttacaggtgcgaatgacagtagcattatgagtagtgtggaattcaggtagtaaatatgaaactagggtttgaaattgataatgctttcacaacatttgcagatgttttagaaggaaaaaagttccttcctaaaataatttctctacaattggaagattggaagattcagctagttaggagcccaccttttttcctaatctgtgtgtgccctgtaacctgactggttaacagcagtcctttgtaaacagtgttttaaactctcctagtcaatatccaccccatccaatttatcaaggaagaaatggttcagaaaatattttcagcctacagttatgttcagtcacacacacatacaaaatgttccttttgcttttaaagtaatttttgactcccagatcagtcagagcccctacagcattgttaagaaagtatttgatttttgtctcaatgaaaataaaactatattcatttccactctattatgctctcaaatacccctaagcatctatactagcctggtatgggtatgaaagatacaaagataaataaaacatagtccctgattctaagaaattcacaatttagcaaaggaaatggactcatagatgctaaccttaaaacaacgtgacaaatgccagacaggacccatcagccaggcactgtgagagcacagagcagggaggttgggtcctgcctgaggagacctggaagggaggcctcacaggaggatgaccaggtctcagtcagcggggaggtggaaagtgcaggtgcatcaggggcaccctgaccgaggaaacagctgccagaggcctccactgctaaagtccacataaggctgaggtcagtcaccctaaacaacctgctccctctaagccaggggatgagcttggagcatcccacaagttccctaaaagttgcagcccccagggggattttgagctatcatctctgcacatgcttagtgagaagactacacaacatttctaagaatctgagattttatattgtcagttaaccactttcattattcattcacctcaggacatgcagaaatatttcagtcagaactgggaaacagaaggacctacattctgctgtcacttatgtgtcaagaagcagatgatcgatgaggcaggtcagttgtaagtgagtcacattgtagcattaaattctagtatttttgtagtttgaaacagtaacttaataaaagagcaaaagctattctagctttcttct

SEQ ID NO: 306287 - DNA, 5380 bp, Homo sapiens
gcctcagcttttgaagctggtgagagcctggcctgtgctgggccttggccacgggcagcgtcagctttgagtcaagtgctggtctggcctccctagctttgagcctctgtcaattcccttaatctgtttaggctttggcttcctcatccatagaatggagatatgaatgattcctacgccgtagtgctttgagagaattcagtgaaattcctgtgtgtaaaacccttccatggtgcctagcacacagcacacagccaatggcccaatggctcctatcagctgtgggatttgtcatcagaacaccaccagctctgctccaggctgccctgggtaccatcaaaacacaccctgtgcccagcagcacctgctcctctgcacacctggttccttcagcaggggcagtggccgtgggagcacagaaaacatggagtcccatctggtttaattgatgccattgccaaaggggaggactcacggcaccccctctcgggtgccagggtgcctggctcccaccaggaggaagacctgtcctccactgtcaggcacatttcagtcttcccagcagccagcacaactactttgtccttccagtcacggtcggcctctgggaagcccagtctgtgtcctcctccttcaggggtagccagcatgtctgtgtcacccaaggtcatggagcacagggcccctcccgggaaggtgccgtctcctccggcccctcgggtccctgctctgtcactgactgctgtgacccactctgtctccgcagaggccacaggccaggtctgccatgccttgtgctcccccgagggctgctggggcccggagcccagggactgcgtctcttgccggaatgtcagccgaggcagggaatgcgtggacaagtgcaaccttctggagggtgagccaagggagtttgtggagaactctgagtgcatacagtgccacccagagtgcctgcctcaggccatgaacatcacctgcacaggacggggaccagacaactgtatccagtgtgcccactacattgacggcccccactgcgtcaagacctgcccggcaggagtcatgggagaaaacaacaccctggtctggaagtacgcagacgccggccatgtgtgccacctgtgccatccaaactgcacctacggatgcactgggccaggtcttgaaggctgtccaacgaatgggcctaagatcccgtccatcgccactgggatggtgggggccctcctcttgctgctggtggtggccctggggatcggcctcttcatgcgaaggcgccacatcgttcggaagcgcacgctgcggaggctgctgcaggagagggagcttgtggagcctcttacacccagtggagaagctcccaaccaagctctcttgaggatcttgaaggaaactgaattcaaaaagatcaaagtgctgggctccggtgcgttcggcacggtgtataagggactctggatcccagaaggtgagaaagttaaaattcccgtcgctatcaaggaattaagagaagcaacatctccgaaagccaacaaggaaatcctcgatgaagcctacgtgatggccagcgtggacaacccccacgtgtgccgcctgctgggcatctgcctcacctccaccgtgcagctcatcacgcagctcatgcccttcggctgcctcctggactatgtccgggaacacaaagacaatattggctcccagtacctgctcaactggtgtgtgcagatcgcaaagggcatgaactacttggaggaccgtcgcttggtgcaccgcgacctggcagccaggaacgtactggtgaaaacaccgcagcatgtcaagatcacagattttgggctggccaaactgctgggtgcggaagagaaagaataccatgcagaaggaggcaaagtgcctatcaagtggatggcattggaatcaattttacacagaatctatacccaccagagtgatgtctggagctacggggtgaccgtttgggagttgatgacctttggatccaagccatatgacggaatccctgccagcgagatctcctccatcctggagaaaggagaacgcctccctcagccacccatatgtaccatcgatgtctacatgatcatggtcaagtgctggatgatagacgcagatagtcgcccaaagttccgtgagttgatcatcgaattctccaaaatggcccgagacccccagcgctaccttgtcattcagggggatgaaagaatgcatttgccaagtcctacagactccaacttctaccgtgccctgatggatgaagaagacatggacgacgtggtggatgccgacgagtacctcatcccacagcagggcttcttcagcagcccctccacgtcacggactcccctcctgagctctctgagtgcaaccagcaacaattccaccgtggcttgcattgatagaaatgggctgcaaagctgtcccatcaaggaagacagcttcttgcagcgatacagctcagaccccacaggcgccttgactgaggacagcatagacgacaccttcctcccagtgcctgaatacataaaccagtccgttcccaaaaggcccgctggctctgtgcagaatcctgtctatcacaatcagcctctgaaccccgcgcccagcagagacccacactaccaggacccccacagcactgcagtgggcaaccccgagtatctcaacactgtccagcccacctgtgtcaacagcacattcgacagccctgcccactgggcccagaaaggcagccaccaaattagcctggacaaccctgactaccagcaggacttctttcccaaggaagccaagccaaatggcatctttaagggctccacagctgaaaatgcagaatacctaagggtcgcgccacaaagcagtgaatttattggagcatgaccacggaggatagtatgagccctaaaaatccagactctttcgatacccaggaccaagccacagcaggtcctccatcccaacagccatgcccgcattagctcttagacccacagactggttttgcaacgtttacaccgactagccaggaagtacttccacctcgggcacattttgggaagttgcattcctttgtcttcaaactgtgaagcatttacagaaacgcatccagcaagaatattgtccctttgagcagaaatttatctttcaaagaggtatatttgaaaaaaaaaaaaaagtatatgtgaggatttttattgattggggatcttggagtttttcattgtcgctattgatttttacttcaatgggctcttccaacaaggaagaagcttgctggtagcacttgctaccctgagttcatccaggcccaactgtgagcaaggagcacaagccacaagtcttccagaggatgcttgattccagtggttctgcttcaaggcttccactgcaaaacactaaagatccaagaaggccttcatggccccagcaggccggatcggtactgtatcaagtcatggcaggtacagtaggataagccactctgtcccttcctgggcaaagaagaaacggaggggatggaattcttccttagacttacttttgtaaaaatgtccccacggtacttactccccactgatggaccagtggtttccagtcatgagcgttagactgacttgtttgtcttccattccattgttttgaaactcagtatgctgcccctgtcttgctgtcatgaaatcagcaagagaggatgacacatcaaataataactcggattccagcccacattggattcatcagcatttggaccaatagcccacagctgagaatgtggaatacctaaggatagcaccgcttttgttctcgcaaaaacgtatctcctaatttgaggctcagatgaaatgcatcaggtcctttggggcatagatcagaagactacaaaaatgaagctgctctgaaatctcctttagccatcaccccaaccccccaaaattagtttgtgttacttatggaagatagttttctccttttacttcacttcaaaagctttttactcaaagagtatatgttccctccaggtcagctgcccccaaaccccctccttacgctttgtcacacaaaaagtgtctctgccttgagtcatctattcaagcacttacagctctggccacaacagggcattttacaggtgcgaatgacagtagcattatgagtagtgtggaattcaggtagtaaatatgaaactagggtttgaaattgataatgctttcacaacatttgcagatgttttagaaggaaaaaagttccttcctaaaataatttctctacaattggaagattggaagattcagctagttaggagcccaccttttttcctaatctgtgtgtgccctgtaacctgactggttaacagcagtcctttgtaaacagtgttttaaactctcctagtcaatatccaccccatccaatttatcaaggaagaaatggttcagaaaatattttcagcctacagttatgttcagtcacacacacatacaaaatgttccttttgcttttaaagtaatttttgactcccagatcagtcagagcccctacagcattgttaagaaagtatttgatttttgtctcaatgaaaataaaactatattcatttccactctattatgctctcaaatacccctaagcatctatactagcctggtatgggtatgaaagatacaaagataaataaaacatagtccctgattctaagaaattcacaatttagcaaaggaaatggactcatagatgctaaccttaaaacaacgtgacaaatgccagacaggacccatcagccaggcactgtgagagcacagagcagggaggttgggtcctgcctgaggagacctggaagggaggcctcacaggaggatgaccaggtctcagtcagcggggaggtggaaagtgcaggtgcatcaggggcaccctgaccgaggaaacagctgccagaggcctccactgctaaagtccacataaggctgaggtcagtcaccctaaacaacctgctccctctaagccaggggatgagcttggagcatcccacaagttccctaaaagttgcagcccccagggggattttgagctatcatctctgcacatgcttagtgagaagactacacaacatttctaagaatctgagattttatattgtcagttaaccactttcattattcattcacctcaggacatgcagaaatatttcagtcagaactgggaaacagaaggacctacattctgctgtcacttatgtgtcaagaagcagatgatcgatgaggcaggtcagttgtaagtgagtcacattgtagcattaaattctagtatttttgtagtttgaaacagtaacttaataaaagagcaaaagctattctagctttcttct

SEQ ID NO: 306288 - DNA, 3652 bp, Homo sapiens
aagccctttgcattccccttgagcgagagaagccacactgcctttctgtgtctggttcaaagctcttccttcttggcatgttttctggactacatgcacatgggcagctatagattaatctgcaaggaacccacgcgcgtgggttccttgcgaataggaggcaaagtgcctatcaagtggatggcattggaatcaattttacacagaatctatacccaccagagtgatgtctggagctacggggtgaccgtttgggagttgatgacctttggatccaagccatatgacggaatccctgccagcgagatctcctccatcctggagaaaggagaacgcctccctcagccacccatatgtaccatcgatgtctacatgatcatggtcaagtgctggatgatagacgcagatagtcgcccaaagttccgtgagttgatcatcgaattctccaaaatggcccgagacccccagcgctaccttgtcattcagggggatgaaagaatgcatttgccaagtcctacagactccaacttctaccgtgccctgatggatgaagaagacatggacgacgtggtggatgccgacgagtacctcatcccacagcagggcttcttcagcagcccctccacgtcacggactcccctcctgagctctctgagtgcaaccagcaacaattccaccgtggcttgcattgatagaaatgggctgcaaagctgtcccatcaaggaagacagcttcttgcagcgatacagctcagaccccacaggcgccttgactgaggacagcatagacgacaccttcctcccagtgcctgaatacataaaccagtccgttcccaaaaggcccgctggctctgtgcagaatcctgtctatcacaatcagcctctgaaccccgcgcccagcagagacccacactaccaggacccccacagcactgcagtgggcaaccccgagtatctcaacactgtccagcccacctgtgtcaacagcacattcgacagccctgcccactgggcccagaaaggcagccaccaaattagcctggacaaccctgactaccagcaggacttctttcccaaggaagccaagccaaatggcatctttaagggctccacagctgaaaatgcagaatacctaagggtcgcgccacaaagcagtgaatttattggagcatgaccacggaggatagtatgagccctaaaaatccagactctttcgatacccaggaccaagccacagcaggtcctccatcccaacagccatgcccgcattagctcttagacccacagactggttttgcaacgtttacaccgactagccaggaagtacttccacctcgggcacattttgggaagttgcattcctttgtcttcaaactgtgaagcatttacagaaacgcatccagcaagaatattgtccctttgagcagaaatttatctttcaaagaggtatatttgaaaaaaaaaaaaaagtatatgtgaggatttttattgattggggatcttggagtttttcattgtcgctattgatttttacttcaatgggctcttccaacaaggaagaagcttgctggtagcacttgctaccctgagttcatccaggcccaactgtgagcaaggagcacaagccacaagtcttccagaggatgcttgattccagtggttctgcttcaaggcttccactgcaaaacactaaagatccaagaaggccttcatggccccagcaggccggatcggtactgtatcaagtcatggcaggtacagtaggataagccactctgtcccttcctgggcaaagaagaaacggaggggatggaattcttccttagacttacttttgtaaaaatgtccccacggtacttactccccactgatggaccagtggtttccagtcatgagcgttagactgacttgtttgtcttccattccattgttttgaaactcagtatgctgcccctgtcttgctgtcatgaaatcagcaagagaggatgacacatcaaataataactcggattccagcccacattggattcatcagcatttggaccaatagcccacagctgagaatgtggaatacctaaggatagcaccgcttttgttctcgcaaaaacgtatctcctaatttgaggctcagatgaaatgcatcaggtcctttggggcatagatcagaagactacaaaaatgaagctgctctgaaatctcctttagccatcaccccaaccccccaaaattagtttgtgttacttatggaagatagttttctccttttacttcacttcaaaagctttttactcaaagagtatatgttccctccaggtcagctgcccccaaaccccctccttacgctttgtcacacaaaaagtgtctctgccttgagtcatctattcaagcacttacagctctggccacaacagggcattttacaggtgcgaatgacagtagcattatgagtagtgtggaattcaggtagtaaatatgaaactagggtttgaaattgataatgctttcacaacatttgcagatgttttagaaggaaaaaagttccttcctaaaataatttctctacaattggaagattggaagattcagctagttaggagcccaccttttttcctaatctgtgtgtgccctgtaacctgactggttaacagcagtcctttgtaaacagtgttttaaactctcctagtcaatatccaccccatccaatttatcaaggaagaaatggttcagaaaatattttcagcctacagttatgttcagtcacacacacatacaaaatgttccttttgcttttaaagtaatttttgactcccagatcagtcagagcccctacagcattgttaagaaagtatttgatttttgtctcaatgaaaataaaactatattcatttccactctattatgctctcaaatacccctaagcatctatactagcctggtatgggtatgaaagatacaaagataaataaaacatagtccctgattctaagaaattcacaatttagcaaaggaaatggactcatagatgctaaccttaaaacaacgtgacaaatgccagacaggacccatcagccaggcactgtgagagcacagagcagggaggttgggtcctgcctgaggagacctggaagggaggcctcacaggaggatgaccaggtctcagtcagcggggaggtggaaagtgcaggtgcatcaggggcaccctgaccgaggaaacagctgccagaggcctccactgctaaagtccacataaggctgaggtcagtcaccctaaacaacctgctccctctaagccaggggatgagcttggagcatcccacaagttccctaaaagttgcagcccccagggggattttgagctatcatctctgcacatgcttagtgagaagactacacaacatttctaagaatctgagattttatattgtcagttaaccactttcattattcattcacctcaggacatgcagaaatatttcagtcagaactgggaaacagaaggacctacattctgctgtcacttatgtgtcaagaagcagatgatcgatgaggcaggtcagttgtaagtgagtcacattgtagcattaaattctagtatttttgtagtttgaaacagtaacttaataaaagagcaaaagctattctagctttcttct

SEQ ID NO: 306289 - DNA, 3411 bp, Homo sapiens
agaagctatttgaatctcatgtaggggctttcaagcatcaaaggatggttcatgttttattttaaggcacccacatcatgtcatgaggggaggcagctataatttagagaaccaagggggatttcattataacaaaattggcaaacacacaggcacctgctggcaatagacccctgctcctatagccaagaagtggaatagcatctctacgggccattctaatagcctcaaaatctctgcaccagggggatgaaagaatgcatttgccaagtcctacagactccaacttctaccgtgccctgatggatgaagaagacatggacgacgtggtggatgccgacgagtacctcatcccacagcagggcttcttcagcagcccctccacgtcacggactcccctcctgagctctctgagtgcaaccagcaacaattccaccgtggcttgcattgatagaaatgggctgcaaagctgtcccatcaaggaagacagcttcttgcagcgatacagctcagaccccacaggcgccttgactgaggacagcatagacgacaccttcctcccagtgcctgaatacataaaccagtccgttcccaaaaggcccgctggctctgtgcagaatcctgtctatcacaatcagcctctgaaccccgcgcccagcagagacccacactaccaggacccccacagcactgcagtgggcaaccccgagtatctcaacactgtccagcccacctgtgtcaacagcacattcgacagccctgcccactgggcccagaaaggcagccaccaaattagcctggacaaccctgactaccagcaggacttctttcccaaggaagccaagccaaatggcatctttaagggctccacagctgaaaatgcagaatacctaagggtcgcgccacaaagcagtgaatttattggagcatgaccacggaggatagtatgagccctaaaaatccagactctttcgatacccaggaccaagccacagcaggtcctccatcccaacagccatgcccgcattagctcttagacccacagactggttttgcaacgtttacaccgactagccaggaagtacttccacctcgggcacattttgggaagttgcattcctttgtcttcaaactgtgaagcatttacagaaacgcatccagcaagaatattgtccctttgagcagaaatttatctttcaaagaggtatatttgaaaaaaaaaaaaaagtatatgtgaggatttttattgattggggatcttggagtttttcattgtcgctattgatttttacttcaatgggctcttccaacaaggaagaagcttgctggtagcacttgctaccctgagttcatccaggcccaactgtgagcaaggagcacaagccacaagtcttccagaggatgcttgattccagtggttctgcttcaaggcttccactgcaaaacactaaagatccaagaaggccttcatggccccagcaggccggatcggtactgtatcaagtcatggcaggtacagtaggataagccactctgtcccttcctgggcaaagaagaaacggaggggatggaattcttccttagacttacttttgtaaaaatgtccccacggtacttactccccactgatggaccagtggtttccagtcatgagcgttagactgacttgtttgtcttccattccattgttttgaaactcagtatgctgcccctgtcttgctgtcatgaaatcagcaagagaggatgacacatcaaataataactcggattccagcccacattggattcatcagcatttggaccaatagcccacagctgagaatgtggaatacctaaggatagcaccgcttttgttctcgcaaaaacgtatctcctaatttgaggctcagatgaaatgcatcaggtcctttggggcatagatcagaagactacaaaaatgaagctgctctgaaatctcctttagccatcaccccaaccccccaaaattagtttgtgttacttatggaagatagttttctccttttacttcacttcaaaagctttttactcaaagagtatatgttccctccaggtcagctgcccccaaaccccctccttacgctttgtcacacaaaaagtgtctctgccttgagtcatctattcaagcacttacagctctggccacaacagggcattttacaggtgcgaatgacagtagcattatgagtagtgtggaattcaggtagtaaatatgaaactagggtttgaaattgataatgctttcacaacatttgcagatgttttagaaggaaaaaagttccttcctaaaataatttctctacaattggaagattggaagattcagctagttaggagcccaccttttttcctaatctgtgtgtgccctgtaacctgactggttaacagcagtcctttgtaaacagtgttttaaactctcctagtcaatatccaccccatccaatttatcaaggaagaaatggttcagaaaatattttcagcctacagttatgttcagtcacacacacatacaaaatgttccttttgcttttaaagtaatttttgactcccagatcagtcagagcccctacagcattgttaagaaagtatttgatttttgtctcaatgaaaataaaactatattcatttccactctattatgctctcaaatacccctaagcatctatactagcctggtatgggtatgaaagatacaaagataaataaaacatagtccctgattctaagaaattcacaatttagcaaaggaaatggactcatagatgctaaccttaaaacaacgtgacaaatgccagacaggacccatcagccaggcactgtgagagcacagagcagggaggttgggtcctgcctgaggagacctggaagggaggcctcacaggaggatgaccaggtctcagtcagcggggaggtggaaagtgcaggtgcatcaggggcaccctgaccgaggaaacagctgccagaggcctccactgctaaagtccacataaggctgaggtcagtcaccctaaacaacctgctccctctaagccaggggatgagcttggagcatcccacaagttccctaaaagttgcagcccccagggggattttgagctatcatctctgcacatgcttagtgagaagactacacaacatttctaagaatctgagattttatattgtcagttaaccactttcattattcattcacctcaggacatgcagaaatatttcagtcagaactgggaaacagaaggacctacattctgctgtcacttatgtgtcaagaagcagatgatcgatgaggcaggtcagttgtaagtgagtcacattgtagcattaaattctagtatttttgtagtttgaaacagtaacttaataaaagagcaaaagctattctagctttcttct

SEQ ID NO: 306290 - DNA, 2902 bp, Homo sapiens
ggctccagctccacagccagccacagcccaggacaatcaaccgcctatccaggggccgtcggtccgcatgtccccccgcaagccgctaggcccgctggctctgtgcagaatcctgtctatcacaatcagcctctgaaccccgcgcccagcagagacccacactaccaggacccccacagcactgcagtgggcaaccccgagtatctcaacactgtccagcccacctgtgtcaacagcacattcgacagccctgcccactgggcccagaaaggcagccaccaaattagcctggacaaccctgactaccagcaggacttctttcccaaggaagccaagccaaatggcatctttaagggctccacagctgaaaatgcagaatacctaagggtcgcgccacaaagcagtgaatttattggagcatgaccacggaggatagtatgagccctaaaaatccagactctttcgatacccaggaccaagccacagcaggtcctccatcccaacagccatgcccgcattagctcttagacccacagactggttttgcaacgtttacaccgactagccaggaagtacttccacctcgggcacattttgggaagttgcattcctttgtcttcaaactgtgaagcatttacagaaacgcatccagcaagaatattgtccctttgagcagaaatttatctttcaaagaggtatatttgaaaaaaaaaaaaaagtatatgtgaggatttttattgattggggatcttggagtttttcattgtcgctattgatttttacttcaatgggctcttccaacaaggaagaagcttgctggtagcacttgctaccctgagttcatccaggcccaactgtgagcaaggagcacaagccacaagtcttccagaggatgcttgattccagtggttctgcttcaaggcttccactgcaaaacactaaagatccaagaaggccttcatggccccagcaggccggatcggtactgtatcaagtcatggcaggtacagtaggataagccactctgtcccttcctgggcaaagaagaaacggaggggatggaattcttccttagacttacttttgtaaaaatgtccccacggtacttactccccactgatggaccagtggtttccagtcatgagcgttagactgacttgtttgtcttccattccattgttttgaaactcagtatgctgcccctgtcttgctgtcatgaaatcagcaagagaggatgacacatcaaataataactcggattccagcccacattggattcatcagcatttggaccaatagcccacagctgagaatgtggaatacctaaggatagcaccgcttttgttctcgcaaaaacgtatctcctaatttgaggctcagatgaaatgcatcaggtcctttggggcatagatcagaagactacaaaaatgaagctgctctgaaatctcctttagccatcaccccaaccccccaaaattagtttgtgttacttatggaagatagttttctccttttacttcacttcaaaagctttttactcaaagagtatatgttccctccaggtcagctgcccccaaaccccctccttacgctttgtcacacaaaaagtgtctctgccttgagtcatctattcaagcacttacagctctggccacaacagggcattttacaggtgcgaatgacagtagcattatgagtagtgtggaattcaggtagtaaatatgaaactagggtttgaaattgataatgctttcacaacatttgcagatgttttagaaggaaaaaagttccttcctaaaataatttctctacaattggaagattggaagattcagctagttaggagcccaccttttttcctaatctgtgtgtgccctgtaacctgactggttaacagcagtcctttgtaaacagtgttttaaactctcctagtcaatatccaccccatccaatttatcaaggaagaaatggttcagaaaatattttcagcctacagttatgttcagtcacacacacatacaaaatgttccttttgcttttaaagtaatttttgactcccagatcagtcagagcccctacagcattgttaagaaagtatttgatttttgtctcaatgaaaataaaactatattcatttccactctattatgctctcaaatacccctaagcatctatactagcctggtatgggtatgaaagatacaaagataaataaaacatagtccctgattctaagaaattcacaatttagcaaaggaaatggactcatagatgctaaccttaaaacaacgtgacaaatgccagacaggacccatcagccaggcactgtgagagcacagagcagggaggttgggtcctgcctgaggagacctggaagggaggcctcacaggaggatgaccaggtctcagtcagcggggaggtggaaagtgcaggtgcatcaggggcaccctgaccgaggaaacagctgccagaggcctccactgctaaagtccacataaggctgaggtcagtcaccctaaacaacctgctccctctaagccaggggatgagcttggagcatcccacaagttccctaaaagttgcagcccccagggggattttgagctatcatctctgcacatgcttagtgagaagactacacaacatttctaagaatctgagattttatattgtcagttaaccactttcattattcattcacctcaggacatgcagaaatatttcagtcagaactgggaaacagaaggacctacattctgctgtcacttatgtgtcaagaagcagatgatcgatgaggcaggtcagttgtaagtgagtcacattgtagcattaaattctagtatttttgtagtttgaaacagtaacttaataaaagagcaaaagctattctagctttcttct

SEQ ID NO: 306291 - DNA, 2529 bp, Homo sapiens
tcggctcggtaccggtgtctgcacaaagcagtgaatttattggagcatgaccacggaggatagtatgagccctaaaaatccagactctttcgatacccaggaccaagccacagcaggtcctccatcccaacagccatgcccgcattagctcttagacccacagactggttttgcaacgtttacaccgactagccaggaagtacttccacctcgggcacattttgggaagttgcattcctttgtcttcaaactgtgaagcatttacagaaacgcatccagcaagaatattgtccctttgagcagaaatttatctttcaaagaggtatatttgaaaaaaaaaaaaaagtatatgtgaggatttttattgattggggatcttggagtttttcattgtcgctattgatttttacttcaatgggctcttccaacaaggaagaagcttgctggtagcacttgctaccctgagttcatccaggcccaactgtgagcaaggagcacaagccacaagtcttccagaggatgcttgattccagtggttctgcttcaaggcttccactgcaaaacactaaagatccaagaaggccttcatggccccagcaggccggatcggtactgtatcaagtcatggcaggtacagtaggataagccactctgtcccttcctgggcaaagaagaaacggaggggatggaattcttccttagacttacttttgtaaaaatgtccccacggtacttactccccactgatggaccagtggtttccagtcatgagcgttagactgacttgtttgtcttccattccattgttttgaaactcagtatgctgcccctgtcttgctgtcatgaaatcagcaagagaggatgacacatcaaataataactcggattccagcccacattggattcatcagcatttggaccaatagcccacagctgagaatgtggaatacctaaggatagcaccgcttttgttctcgcaaaaacgtatctcctaatttgaggctcagatgaaatgcatcaggtcctttggggcatagatcagaagactacaaaaatgaagctgctctgaaatctcctttagccatcaccccaaccccccaaaattagtttgtgttacttatggaagatagttttctccttttacttcacttcaaaagctttttactcaaagagtatatgttccctccaggtcagctgcccccaaaccccctccttacgctttgtcacacaaaaagtgtctctgccttgagtcatctattcaagcacttacagctctggccacaacagggcattttacaggtgcgaatgacagtagcattatgagtagtgtggaattcaggtagtaaatatgaaactagggtttgaaattgataatgctttcacaacatttgcagatgttttagaaggaaaaaagttccttcctaaaataatttctctacaattggaagattggaagattcagctagttaggagcccaccttttttcctaatctgtgtgtgccctgtaacctgactggttaacagcagtcctttgtaaacagtgttttaaactctcctagtcaatatccaccccatccaatttatcaaggaagaaatggttcagaaaatattttcagcctacagttatgttcagtcacacacacatacaaaatgttccttttgcttttaaagtaatttttgactcccagatcagtcagagcccctacagcattgttaagaaagtatttgatttttgtctcaatgaaaataaaactatattcatttccactctattatgctctcaaatacccctaagcatctatactagcctggtatgggtatgaaagatacaaagataaataaaacatagtccctgattctaagaaattcacaatttagcaaaggaaatggactcatagatgctaaccttaaaacaacgtgacaaatgccagacaggacccatcagccaggcactgtgagagcacagagcagggaggttgggtcctgcctgaggagacctggaagggaggcctcacaggaggatgaccaggtctcagtcagcggggaggtggaaagtgcaggtgcatcaggggcaccctgaccgaggaaacagctgccagaggcctccactgctaaagtccacataaggctgaggtcagtcaccctaaacaacctgctccctctaagccaggggatgagcttggagcatcccacaagttccctaaaagttgcagcccccagggggattttgagctatcatctctgcacatgcttagtgagaagactacacaacatttctaagaatctgagattttatattgtcagttaaccactttcattattcattcacctcaggacatgcagaaatatttcagtcagaactgggaaacagaaggacctacattctgctgtcacttatgtgtcaagaagcagatgatcgatgaggcaggtcagttgtaagtgagtcacattgtagcattaaattctagtatttttgtagtttgaaacagtaacttaataaaagagcaaaagctattctagctttcttct

SEQ ID NO: 306292 - DNA, 3965 bp, Homo sapiens
gaaaacaggctgggcccggtggctcactcctgtaatcccagcactttgggaggttgaggtgggcggatcacctgaggtcaggagtttgagaccagccggcgggagtggccttgggtccccgctgctggttctcctccctcctcctcgcattctcctcctcctctgctcctcccgatccctcctccgccgcctggtccctcctcctcccgccctgcctccccgcgcctcggcccgcgcgagctagacgtccgggcagcccccggcgcagcgcggccgcagcagcctccgccccccgcacggtgtgagcgcccgccgcggccgaggcggccggagtcccgagctagccccggcggccgccgccgcccagaccggacgacaggccacctcgtcggcgtccgcccgagtccccgcctcgccgccaacgccacaaccaccgcgcacggccccctgactccgtccagtattgatcgggagagccggagcgagctcttcggggagcagcgatgcgaccctccgggacggccggggcagcgctcctggcgctgctggctgcgctctgcccggcgagtcgggctctggaggaaaagaaagtttgccaaggcacgagtaacaagctcacgcagttgggcacttttgaagatcattttctcagcctccagaggatgttcaataactgtgaggtggtccttgggaatttggaaattacctatgtgcagaggaattatgatctttccttcttaaagaccatccaggaggtggctggttatgtcctcattgccctcaacacagtggagcgaattcctttggaaaacctgcagatcatcagaggaaatatgtactacgaaaattcctatgccttagcagtcttatctaactatgatgcaaataaaaccggactgaaggagctgcccatgagaaatttacaggaaatcctgcatggcgccgtgcggttcagcaacaaccctgccctgtgcaacgtggagagcatccagtggcgggacatagtcagcagtgactttctcagcaacatgtcgatggacttccagaaccacctgggcagctgccaaaagtgtgatccaagctgtcccaatgggagctgctggggtgcaggagaggagaactgccagaaactgaccaaaatcatctgtgcccagcagtgctccgggcgctgccgtggcaagtcccccagtgactgctgccacaaccagtgtgctgcaggctgcacaggcccccgggagagcgactgcctggtctgccgcaaattccgagacgaagccacgtgcaaggacacctgccccccactcatgctctacaaccccaccacgtaccagatggatgtgaaccccgagggcaaatacagctttggtgccacctgcgtgaagaagtgtccccgtaattatgtggtgacagatcacggctcgtgcgtccgagcctgtggggccgacagctatgagatggaggaagacggcgtccgcaagtgtaagaagtgcgaagggccttgccgcaaagtgtgtaacggaataggtattggtgaatttaaagactcactctccataaatgctacgaatattaaacacttcaaaaactgcacctccatcagtggcgatctccacatcctgccggtggcatttaggggtgactccttcacacatactcctcctctggatccacaggaactggatattctgaaaaccgtaaaggaaatcacagggtttttgctgattcaggcttggcctgaaaacaggacggacctccatgcctttgagaacctagaaatcatacgcggcaggaccaagcaacatggtcagttttctcttgcagtcgtcagcctgaacataacatccttgggattacgctccctcaaggagataagtgatggagatgtgataatttcaggaaacaaaaatttgtgctatgcaaatacaataaactggaaaaaactgtttgggacctccggtcagaaaaccaaaattataagcaacagaggtgaaaacagctgcaaggccacaggccaggtctgccatgccttgtgctcccccgagggctgctggggcccggagcccagggactgcgtctcttgccggaatgtcagccgaggcagggaatgcgtggacaagtgcaaccttctggagggtgagccaagggagtttgtggagaactctgagtgcatacagtgccacccagagtgcctgcctcaggccatgaacatcacctgcacaggacggggaccagacaactgtatccagtgtgcccactacattgacggcccccactgcgtcaagacctgcccggcaggagtcatgggagaaaacaacaccctggtctggaagtacgcagacgccggccatgtgtgccacctgtgccatccaaactgcacctacggatgcactgggccaggtcttgaaggctgtccaacgaatgggcctaagatcccgtccatcgccactgggatggtgggggccctcctcttgctgctggtggtggccctggggatcggcctcttcatgcgaaggcgccacatcgttcggaagcgcacgctgcggaggctgctgcaggagagggagcttgtggagcctcttacacccagtggagaagctcccaaccaagctctcttgaggatcttgaaggaaactgaattcaaaaagatcaaagtgctgggctccggtgcgttcggcacggtgtataagggactctggatcccagaaggtgagaaagttaaaattcccgtcgctatcaaggaattaagagaagcaacatctccgaaagccaacaaggaaatcctcgatgaagcctacgtgatggccagcgtggacaacccccacgtgtgccgcctgctgggcatctgcctcacctccaccgtgcagctcatcacgcagctcatgcccttcggctgcctcctggactatgtccgggaacacaaagacaatattggctcccagtacctgctcaactggtgtgtgcagatcgcaaagggcatgaactacttggaggaccgtcgcttggtgcaccgcgacctggcagccaggaacgtactggtgaaaacaccgcagcatgtcaagatcacagattttgggctggccaaactgctgggtgcggaagagaaagaataccatgcagaaggaggcaaagtgcctatcaagtggatggcattggaatcaattttacacagaatctatacccaccagagtgatgtctggagctacggggtgaccgtttgggagttgatgacctttggatccaagccatatgacggaatccctgccagcgagatctcctccatcctggagaaaggagaacgcctccctcagccacccatatgtaccatcgatgtctacatgatcatggtcaagtgctggatgatagacgcagatagtcgcccaaagttccgtgagttgatcatcgaattctccaaaatggcccgagacccccagcgctaccttgtcattcagggggatgaaagaatgcatttgccaagtcctacagactccaacttctaccgtgccctgatggatgaagaagacatggacgacgtggtggatgccgacgagtacctcatcccacagcagggcttcttcagcagcccctccacgtcacggactcccctcctgagctctctgagtgcaaccagcaacaattccaccgtggcttgcattgatagaaatgggctgcaaagctgtcccatcaaggaagacagcttcttgcagcgatacagctcagaccccacaggcgccttgactgaggacagcatagacgacaccttcctcccagtgcctgaatacataaaccagtccgttcccaaaaggcccgctggctctgtgcagaatcctgtctatcacaatcagcctctgaaccccgcgcccagcagagacccacactaccaggacccccacacctcgtccagctaatttttgtagtttttgtaaagacaggatctccttatgttgcccaggctagtcttgaacttc

SEQ ID NO: 306293 - DNA, 3869 bp, Homo sapiens
gaaaacaggctgggcccggtggctcactcctgtaatcccagcactttgggaggttgaggtgggcggatcacctgaggtcaggagtttgagaccagccggcgggagtggccttgggtccccgctgctggttctcctccctcctcctcgcattctcctcctcctctgctcctcccgatccctcctccgccgcctggtccctcctcctcccgccctgcctccccgcgcctcggcccgcgcgagctagacgtccgggcagcccccggcgcagcgcggccgcagcagcctccgccccccgcacggtgtgagcgcccgccgcggccgaggcggccggagtcccgagctagccccggcggccgccgccgcccagaccggacgacaggccacctcgtcggcgtccgcccgagtccccgcctcgccgccaacgccacaaccaccgcgcacggccccctgactccgtccagtattgatcgggagagccggagcgagctcttcggggagcagcgatgcgaccctccgggacggccggggcagcgctcctggcgctgctggctgcgctctgcccggcgagtcgggctctggaggaaaagaaagtttgccaaggcacgagtaacaagctcacgcagttgggcacttttgaagatcattttctcagcctccagaggatgttcaataactgtgaggtggtccttgggaatttggaaattacctatgtgcagaggaattatgatctttccttcttaaagaccatccaggaggtggctggttatgtcctcattgccctcaacacagtggagcgaattcctttggaaaacctgcagatcatcagaggaaatatgtactacgaaaattcctatgccttagcagtcttatctaactatgatgcaaataaaaccggactgaaggagctgcccatgagaaatttacaggaaatcctgcatggcgccgtgcggttcagcaacaaccctgccctgtgcaacgtggagagcatccagtggcgggacatagtcagcagtgactttctcagcaacatgtcgatggacttccagaaccacctgggcagctgccaaaagtgtgatccaagctgtcccaatgggagctgctggggtgcaggagaggagaactgccagaaactgaccaaaatcatctgtgcccagcagtgctccgggcgctgccgtggcaagtcccccagtgactgctgccacaaccagtgtgctgcaggctgcacaggcccccgggagagcgactgcctggtctgccgcaaattccgagacgaagccacgtgcaaggacacctgccccccactcatgctctacaaccccaccacgtaccagatggatgtgaaccccgagggcaaatacagctttggtgccacctgcgtgaagaagtgtccccgtaattatgtggtgacagatcacggctcgtgcgtccgagcctgtggggccgacagctatgagatggaggaagacggcgtccgcaagtgtaagaagtgcgaagggccttgccgcaaagtgtgtaacggaataggtattggtgaatttaaagactcactctccataaatgctacgaatattaaacacttcaaaaactgcacctccatcagtggcgatctccacatcctgccggtggcatttaggggtgactccttcacacatactcctcctctggatccacaggaactggatattctgaaaaccgtaaaggaaatcacagggtttttgctgattcaggcttggcctgaaaacaggacggacctccatgcctttgagaacctagaaatcatacgcggcaggaccaagcaacatggtcagttttctcttgcagtcgtcagcctgaacataacatccttgggattacgctccctcaaggagataagtgatggagatgtgataatttcaggaaacaaaaatttgtgctatgcaaatacaataaactggaaaaaactgtttgggacctccggtcagaaaaccaaaattataagcaacagaggtgaaaacagctgcaaggccacaggccaggtctgccatgccttgtgctcccccgagggctgctggggcccggagcccagggactgcgtctcttgccggaatgtcagccgaggcagggaatgcgtggacaagtgcaaccttctggagggtgagccaagggagtttgtggagaactctgagtgcatacagtgccacccagagtgcctgcctcaggccatgaacatcacctgcacaggacggggaccagacaactgtatccagtgtgcccactacattgacggcccccactgcgtcaagacctgcccggcaggagtcatgggagaaaacaacaccctggtctggaagtacgcagacgccggccatgtgtgccacctgtgccatccaaactgcacctacggatgcactgggccaggtcttgaaggctgtccaacgaatgggcctaagatcccgtccatcgccactgggatggtgggggccctcctcttgctgctggtggtggccctggggatcggcctcttcatgcgaaggcgccacatcgttcggaagcgcacgctgcggaggctgctgcaggagagggagcttgtggagcctcttacacccagtggagaagctcccaaccaagctctcttgaggatcttgaaggaaactgaattcaaaaagatcaaagtgctgggctccggtgcgttcggcacggtgtataagggactctggatcccagaaggtgagaaagttaaaattcccgtcgctatcaaggaattaagagaagcaacatctccgaaagccaacaaggaaatcctcgatgaagcctacgtgatggccagcgtggacaacccccacgtgtgccgcctgctgggcatctgcctcacctccaccgtgcagctcatcacgcagctcatgcccttcggctgcctcctggactatgtccgggaacacaaagacaatattggctcccagtacctgctcaactggtgtgtgcagatcgcaaagggcatgaactacttggaggaccgtcgcttggtgcaccgcgacctggcagccaggaacgtactggtgaaaacaccgcagcatgtcaagatcacagattttgggctggccaaactgctgggtgcggaagagaaagaataccatgcagaaggaggcaaagtgcctatcaagtggatggcattggaatcaattttacacagaatctatacccaccagagtgatgtctggagctacggggtgaccgtttgggagttgatgacctttggatccaagccatatgacggaatccctgccagcgagatctcctccatcctggagaaaggagaacgcctccctcagccacccatatgtaccatcgatgtctacatgatcatggtcaagtgctggatgatagacgcagatagtcgcccaaagttccgtgagttgatcatcgaattctccaaaatggcccgagacccccagcgctaccttgtcattcaggtacaaattgcagtctgtgcttccattgggaagagtccctctaatgagcatctcatgtcactgtgttctgtcacatgccagcctggcctccctgtgtcccagatcgcattattaaaccctccagcgcattagagcaagcctcagtaaggcgcaggccacatcgtgaactaagcagcatccgtgagtggggcccacccaactccatctccccctccccgtctgaactctcctctggtgctcgtcctcactgtccggctagccaaagcctcagctgggtctaagagagaagcatggtctattgggctttggtgtcaggcagacgtggcttcacacccctgactctccacttcttcgcatcacccaggcagccgatccacctatctccttccataacacaggaataccaaaaccaagctcaca

SEQ ID NO: 306294 - DNA, 1953 bp, Homo sapiens
  misc_feature (13)..(13): n is a, c, g, or t
tatcgagccggtnccggggtcagagccggatcggtactgtatcaagtcatggcaggtacagtaggataagccactctgtcccttcctgggcaaagaagaaacggaggggatggaattcttccttagacttacttttgtaaaaatgtccccacggtacttactccccactgatggaccagtggtttccagtcatgagcgttagactgacttgtttgtcttccattccattgttttgaaactcagtatgctgcccctgtcttgctgtcatgaaatcagcaagagaggatgacacatcaaataataactcggattccagcccacattggattcatcagcatttggaccaatagcccacagctgagaatgtggaatacctaaggatagcaccgcttttgttctcgcaaaaacgtatctcctaatttgaggctcagatgaaatgcatcaggtcctttggggcatagatcagaagactacaaaaatgaagctgctctgaaatctcctttagccatcaccccaaccccccaaaattagtttgtgttacttatggaagatagttttctccttttacttcacttcaaaagctttttactcaaagagtatatgttccctccaggtcagctgcccccaaaccccctccttacgctttgtcacacaaaaagtgtctctgccttgagtcatctattcaagcacttacagctctggccacaacagggcattttacaggtgcgaatgacagtagcattatgagtagtgtggaattcaggtagtaaatatgaaactagggtttgaaattgataatgctttcacaacatttgcagatgttttagaaggaaaaaagttccttcctaaaataatttctctacaattggaagattggaagattcagctagttaggagcccaccttttttcctaatctgtgtgtgccctgtaacctgactggttaacagcagtcctttgtaaacagtgttttaaactctcctagtcaatatccaccccatccaatttatcaaggaagaaatggttcagaaaatattttcagcctacagttatgttcagtcacacacacatacaaaatgttccttttgcttttaaagtaatttttgactcccagatcagtcagagcccctacagcattgttaagaaagtatttgatttttgtctcaatgaaaataaaactatattcatttccactctattatgctctcaaatacccctaagcatctatactagcctggtatgggtatgaaagatacaaagataaataaaacatagtccctgattctaagaaattcacaatttagcaaaggaaatggactcatagatgctaaccttaaaacaacgtgacaaatgccagacaggacccatcagccaggcactgtgagagcacagagcagggaggttgggtcctgcctgaggagacctggaagggaggcctcacaggaggatgaccaggtctcagtcagcggggaggtggaaagtgcaggtgcatcaggggcaccctgaccgaggaaacagctgccagaggcctccactgctaaagtccacataaggctgaggtcagtcaccctaaacaacctgctccctctaagccaggggatgagcttggagcatcccacaagttccctaaaagttgcagcccccagggggattttgagctatcatctctgcacatgcttagtgagaagactacacaacatttctaagaatctgagattttatattgtcagttaaccactttcattattcattcacctcaggacatgcagaaatatttcagtcagaactgggaaacagaaggacctacattctgctgtcacttatgtgtcaagaagcagatgatcgatgaggcaggtcagttgtaagtgagtcacattgtagcattaaattctagtatttttgtagtttgaaacagtaacttaataaaagagcaaaagctattctagctttcttct

SEQ ID NO: 306295 - DNA, 3122 bp, Homo sapiens
gaaaacaggctgggcccggtggctcactcctgtaatcccagcactttgggaggttgaggtgggcggatcacctgaggtcaggagtttgagaccagccggcgggagtggccttgggtccccgctgctggttctcctccctcctcctcgcattctcctcctcctctgctcctcccgatccctcctccgccgcctggtccctcctcctcccgccctgcctccccgcgcctcggcccgcgcgagctagacgtccgggcagcccccggcgcagcgcggccgcagcagcctccgccccccgcacggtgtgagcgcccgccgcggccgaggcggccggagtcccgagctagccccggcggccgccgccgcccagaccggacgacaggccacctcgtcggcgtccgcccgagtccccgcctcgccgccaacgccacaaccaccgcgcacggccccctgactccgtccagtattgatcgggagagccggagcgagctcttcggggagcagcgatgcgaccctccgggacggccggggcagcgctcctggcgctgctggctgcgctctgcccggcgagtcgggctctggaggaaaagaaagtttgccaaggcacgagtaacaagctcacgcagttgggcacttttgaagatcattttctcagcctccagaggatgttcaataactgtgaggtggtccttgggaatttggaaattacctatgtgcagaggaattatgatctttccttcttaaagaccatccaggaggtggctggttatgtcctcattgccctcaacacagtggagcgaattcctttggaaaacctgcagatcatcagaggaaatatgtactacgaaaattcctatgccttagcagtcttatctaactatgatgcaaataaaaccggactgaaggagctgcccatgagaaatttacaggaaatcctgcatggcgccgtgcggttcagcaacaaccctgccctgtgcaacgtggagagcatccagtggcgggacatagtcagcagtgactttctcagcaacatgtcgatggacttccagaaccacctgggcagctgccaaaagtgtgatccaagctgtcccaatgggagctgctggggtgcaggagaggagaactgccagaaactgaccaaaatcatctgtgcccagcagtgctccgggcgctgccgtggcaagtcccccagtgactgctgccacaaccagtgtgctgcaggctgcacaggcccccgggagagcgactgcctggtctgccgcaaattccgagacgaagccacgtgcaaggacacctgccccccactcatgctctacaaccccaccacgtaccagatggatgtgaaccccgagggcaaatacagctttggtgccacctgcgtgaagaagtgtccccgtaattatgtggtgacagatcacggctcgtgcgtccgagcctgtggggccgacagctatgagatggaggaagacggcgtccgcaagtgtaagaagtgcgaagggccttgccgcaaagtgtgtaacggaataggtattggtgaatttaaagactcactctccataaatgctacgaatattaaacacttcaaaaactgcacctccatcagtggcgatctccacatcctgccggtggcatttaggggtgactccttcacacatactcctcctctggatccacaggaactggatattctgaaaaccgtaaaggaaatcacagggtttttgctgattcaggcttggcctgaaaacaggacggacctccatgcctttgagaacctagaaatcatacgcggcaggaccaagcaacatggtcagttttctcttgcagtcgtcagcctgaacataacatccttgggattacgctccctcaaggagataagtgatggagatgtgataatttcaggaaacaaaaatttgtgctatgcaaatacaataaactggaaaaaactgtttgggacctccggtcagaaaaccaaaattataagcaacagaggtgaaaacagctgcaaggccacaggccaggtctgccatgccttgtgctcccccgagggctgctggggcccggagcccagggactgcgtctcttgccggaatgtcagccgaggcagggaatgcgtggacaagtgcaaccttctggagggtgagccaagggagtttgtggagaactctgagtgcatacagtgccacccagagtgcctgcctcaggccatgaacatcacctgcacaggacggggaccagacaactgtatccagtgtgcccactacattgacggcccccactgcgtcaagacctgcccggcaggagtcatgggagaaaacaacaccctggtctggaagtacgcagacgccggccatgtgtgccacctgtgccatccaaactgcacctacgggccaggaaatgagagtctcaaagccatgttattctgcctttttaaactatcatcctgtaatcaaagtaatgatggcagcgtgtcccaccagagcgggagcccagctgctcaggagtcatgcttaggatggatcccttctcttctgccgtcagagtttcagctgggttggggtggatgcagccacctccatgcctggccttctgcatctgtgatcatcacggcctcctcctgccactgagcctcatgccttcacgtgtctgttccccccgcttttcctttctgccacccctgcacgtgggccgccaggttcccaagagtatcctacccatttccttccttccactccctttgccagtgcctctcaccccaactagtagctaaccatcacccccaggactgacctcttcctcctcgctgccagatgattgttcaaagcacagaatttgtcagaaacctgcagggactccatgctgccagccttctccgtaattagcatggccccagtccatgcttctagccttggttccttctgcccctctgtttgaaattctagagccagctgtgggacaattatctgtgtcaaaagccagatgtgaaaacatctcaataacaaactggctgctttgttcaatgctagaacaacgcctgtcacagagtagaaactcaaaaatatttgctgagtgaatgaacaaatgaataaatgcataataaataattaaccaccaatccaacatccaga

SEQ ID NO: 306296 - DNA, 2986 bp, Homo sapiens
  misc_feature (2501)..(2502): n is a, c, g, or t
  misc_feature (2531)..(2531): n is a, c, g, or t
  misc_feature (2639)..(2639): n is a, c, g, or t
  misc_feature (2705)..(2705): n is a, c, g, or t
gaaaacaggctgggcccggtggctcactcctgtaatcccagcactttgggaggttgaggtgggcggatcacctgaggtcaggagtttgagaccagccggcgggagtggccttgggtccccgctgctggttctcctccctcctcctcgcattctcctcctcctctgctcctcccgatccctcctccgccgcctggtccctcctcctcccgccctgcctccccgcgcctcggcccgcgcgagctagacgtccgggcagcccccggcgcagcgcggccgcagcagcctccgccccccgcacggtgtgagcgcccgccgcggccgaggcggccggagtcccgagctagccccggcggccgccgccgcccagaccggacgacaggccacctcgtcggcgtccgcccgagtccccgcctcgccgccaacgccacaaccaccgcgcacggccccctgactccgtccagtattgatcgggagagccggagcgagctcttcggggagcagcgatgcgaccctccgggacggccggggcagcgctcctggcgctgctggctgcgctctgcccggcgagtcgggctctggaggaaaagaaagtttgccaaggcacgagtaacaagctcacgcagttgggcacttttgaagatcattttctcagcctccagaggatgttcaataactgtgaggtggtccttgggaatttggaaattacctatgtgcagaggaattatgatctttccttcttaaagaccatccaggaggtggctggttatgtcctcattgccctcaacacagtggagcgaattcctttggaaaacctgcagatcatcagaggaaatatgtactacgaaaattcctatgccttagcagtcttatctaactatgatgcaaataaaaccggactgaaggagctgcccatgagaaatttacaggaaatcctgcatggcgccgtgcggttcagcaacaaccctgccctgtgcaacgtggagagcatccagtggcgggacatagtcagcagtgactttctcagcaacatgtcgatggacttccagaaccacctgggcagctgccaaaagtgtgatccaagctgtcccaatgggagctgctggggtgcaggagaggagaactgccagaaactgaccaaaatcatctgtgcccagcagtgctccgggcgctgccgtggcaagtcccccagtgactgctgccacaaccagtgtgctgcaggctgcacaggcccccgggagagcgactgcctggtctgccgcaaattccgagacgaagccacgtgcaaggacacctgccccccactcatgctctacaaccccaccacgtaccagatggatgtgaaccccgagggcaaatacagctttggtgccacctgcgtgaagaagtgtccccgtaattatgtggtgacagatcacggctcgtgcgtccgagcctgtggggccgacagctatgagatggaggaagacggcgtccgcaagtgtaagaagtgcgaagggccttgccgcaaagtgtgtaacggaataggtattggtgaatttaaagactcactctccataaatgctacgaatattaaacacttcaaaaactgcacctccatcagtggcgatctccacatcctgccggtggcatttaggggtgactccttcacacatactcctcctctggatccacaggaactggatattctgaaaaccgtaaaggaaatcacagggtttttgctgattcaggcttggcctgaaaacaggacggacctccatgcctttgagaacctagaaatcatacgcggcaggaccaagcaacatggtcagttttctcttgcagtcgtcagcctgaacataacatccttgggattacgctccctcaaggagataagtgatggagatgtgataatttcaggaaacaaaaatttgtgctatgcaaatacaataaactggaaaaaactgtttgggacctccggtcagaaaaccaaaattataagcaacagaggtgaaaacagctgcaaggccacaggccaggtctgccatgccttgtgctcccccgagggctgctggggcccggagcccagggactgcgtctcttgccggaatgtcagccgaggcagggaatgcgtggacaagtgcaaccttctggagggtgagccaagggagtttgtggagaactctgagtgcatacagtgccacccagagtgcctgcctcaggccatgaacatcacctgcacaggacggggaccagacaactgtatccagtgtgcccactacattgacggcccccactgcgtcaagacctgcccggcaggagtcatgggagaaaacaacaccctggtctggaagtacgcagacgccggccatgtgtgccacctgtgccatccaaactgcacctacggatgcactgggccaggtcttgaaggctgtccaacgaatggaagctacatagtgtctcactttccaagatcattctacaagatgtcagtgcactgaaacatgcaggggcgtgttgagtgnnaaggatcttgacaagttgttttgaagatngcattttgctaagtccctgaggtcactggtcctcaaagcggcatggcgcatggcgtggctggttctgccacatgccagctgtgtgacctctgagactccacttcttcngtgctgaaaataaagaaggagttttactaaggaccaaacaagataatgaatgtgaaactgctccangaaccccaaagaattatgcacatagatgcgatcattaagatgcgaagccatcgagttaccacctggcatgcttaaactgtaaagagtgggtcaaagtaaactgaattggaaaatccaaagttatgcagaaaaacaataaaggagatagtaaaaagggttaacgagccagtccaggggaagcgaagaagacaaaaagagtccttttctgggccaagtttgataaattaggcctcccgaccctttgctctgttgctttatcaactctactcggcaataacaat

SEQ ID NO: 306297 - DNA, 3683 bp, Homo sapiens
  misc_feature (3682)..(3682): n is a, c, g, or t
gaaaacaggctgggcccggtggctcactcctgtaatcccagcactttgggaggttgaggtgggcggatcacctgaggtcaggagtttgagaccagccggcgggagtggccttgggtccccgctgctggttctcctccctcctcctcgcattctcctcctcctctgctcctcccgatccctcctccgccgcctggtccctcctcctcccgccctgcctccccgcgcctcggcccgcgcgagctagacgtccgggcagcccccggcgcagcgcggccgcagcagcctccgccccccgcacggtgtgagcgcccgccgcggccgaggcggccggagtcccgagctagccccggcggccgccgccgcccagaccggacgacaggccacctcgtcggcgtccgcccgagtccccgcctcgccgccaacgccacaaccaccgcgcacggccccctgactccgtccagtattgatcgggagagccggagcgagctcttcggggagcagcgatgcgaccctccgggacggccggggcagcgctcctggcgctgctggctgcgctctgcccggcgagtcgggctctggaggaaaagaaagtttgccaaggcacgagtaacaagctcacgcagttgggcacttttgaagatcattttctcagcctccagaggatgttcaataactgtgaggtggtccttgggaatttggaaattacctatgtgcagaggaattatgatctttccttcttaaagaccatccaggaggtggctggttatgtcctcattgccctcaacacagtggagcgaattcctttggaaaacctgcagatcatcagaggaaatatgtactacgaaaattcctatgccttagcagtcttatctaactatgatgcaaataaaaccggactgaaggagctgcccatgagaaatttacaggaaatcctgcatggcgccgtgcggttcagcaacaaccctgccctgtgcaacgtggagagcatccagtggcgggacatagtcagcagtgactttctcagcaacatgtcgatggacttccagaaccacctgggcagctgccaaaagtgtgatccaagctgtcccaatgggagctgctggggtgcaggagaggagaactgccagaaactgaccaaaatcatctgtgcccagcagtgctccgggcgctgccgtggcaagtcccccagtgactgctgccacaaccagtgtgctgcaggctgcacaggcccccgggagagcgactgcctggtctgccgcaaattccgagacgaagccacgtgcaaggacacctgccccccactcatgctctacaaccccaccacgtaccagatggatgtgaaccccgagggcaaatacagctttggtgccacctgcgtgaagaagtgtccccgtaattatgtggtgacagatcacggctcgtgcgtccgagcctgtggggccgacagctatgagatggaggaagacggcgtccgcaagtgtaagaagtgcgaagggccttgccgcaaaggtaggaagcccgccggtgtgcggacgaggcttgttctcggctgctgaggctgggctctcatgccacctccaaaggaacacatcttcctcttctcattaaaaaacaactatacatatcgtttctttaaaacagaagataaagctgtaaagctaggttaggcaatgggaaggcactgaaggttgtgacggggtggggggctctgatgagaacagtcacagagccagccccgctcagcagctgccaggtgcccagccctggggagaatccagggaaggcagagctggaagcagtgcagctccaagcggcccatgggaaataatgaggagaacgcaaggtcagtgtgaggtgacagggatggcatctcctacaccgccgtagccccaaagtgtactataggtcctggtgtccccccttcccgcctgcactctccccagccccttcagtgtttgttgagtgaatgaaggatgatgtggcagtggcggttccggtgaccggaattccttcctgcttccctctgcctgtggatccctagctattcttaatccaacaaatgtgaacggaatacacgtctctcttatctctgcagtgtgtaacggaataggtattggtgaatttaaagactcactctccataaatgctacgaatattaaacacttcaaaaactgcacctccatcagtggcgatctccacatcctgccggtggcatttaggggtgactccttcacacatactcctcctctggatccacaggaactggatattctgaaaaccgtaaaggaaatcacagggtttttgctgattcaggcttggcctgaaaacaggacggacctccatgcctttgagaacctagaaatcatacgcggcaggaccaagcaacatggtcagttttctcttgcagtcgtcagcctgaacataacatccttgggattacgctccctcaaggagataagtgatggagatgtgataatttcaggaaacaaaaatttgtgctatgcaaatacaataaactggaaaaaactgtttgggacctccggtcagaaaaccaaaattataagcaacagaggtgaaaacagctgcaaggccacaggccaggtctgccatgccttgtgctcccccgagggctgctggggcccggagcccagggactgcgtctcttgccggaatgtcagccgaggcagggaatgcgtggacaagtgcaaccttctggagggtgagccaagggagtttgtggagaactctgagtgcatacagtgccacccagagtgcctgcctcaggccatgaacatcacctgcacaggacggggaccagacaactgtatccagtgtgcccactacattgacggcccccactgcgtcaagacctgcccggcaggagtcatgggagaaaacaacaccctggtctggaagtacgcagacgccggccatgtgtgccacctgtgccatccaaactgcacctacgggtgagtggaaagtgaaggagaacagaacatttcctctcttgcaaattcagagatcaaaaatgtctcccaagttttccggcaacaaattgccgaggtttgtatttgagtcagttacttaaggtgttttggtccccacagccatgccagtagcaacttgcttgtgagcaggcctcagtgcagtgggaatgactctgccatgcaccgtgtccccggccgggcctgtgttgtgcaatgctgcacatcacaacaggagggtagggggacaaaagagcacaggtcctggcagctgccacagtctccaggggcttttgcgtttctctccagatttctaaggttaacatggggattagctgttttgcaatgaataaaaggtaacattgcctggaatgttgcttaaagacacttttttaaagctagttgattgttaagctgttgctacttaaattaaaactactttgggccagacgcagtggctcacgcctgtaattccagcactttgggattccaaggcaggcagatcacttgaggtcaggagcttgagaccaggctggccaacatggtgaaaccccacctctactaaaaatacacctgtagtcccagctactcaggaggctgaggcaggagaattgcttgaacccgggaggcagaggttgcagtgagccaagatctcgccactgcactccagcctgagcaccaagagcgaaactctgtcnc

SEQ ID NO: 306298 - DNA, 1724 bp, Homo sapiens
ctgtgggctattggtccaaatgctgatgaatccaatgtgggctggaatccgagttattatttgatgtgtcatcctctcttgctgatttcatgacagcaagacaggggcagcatactgagtttcaaaacaatggaatgtggaatacctaaggatagcaccgcttttgttctcgcaaaaacgtatctcctaatttgaggctcagatgaaatgcatcaggtcctttggggcatagatcagaagactacaaaaatgaagctgctctgaaatctcctttagccatcaccccaaccccccaaaattagtttgtgttacttatggaagatagttttctccttttacttcacttcaaaagctttttactcaaagagtatatgttccctccaggtcagctgcccccaaaccccctccttacgctttgtcacacaaaaagtgtctctgccttgagtcatctattcaagcacttacagctctggccacaacagggcattttacaggtgcgaatgacagtagcattatgagtagtgtggaattcaggtagtaaatatgaaactagggtttgaaattgataatgctttcacaacatttgcagatgttttagaaggaaaaaagttccttcctaaaataatttctctacaattggaagattggaagattcagctagttaggagcccaccttttttcctaatctgtgtgtgccctgtaacctgactggttaacagcagtcctttgtaaacagtgttttaaactctcctagtcaatatccaccccatccaatttatcaaggaagaaatggttcagaaaatattttcagcctacagttatgttcagtcacacacacatacaaaatgttccttttgcttttaaagtaatttttgactcccagatcagtcagagcccctacagcattgttaagaaagtatttgatttttgtctcaatgaaaataaaactatattcatttccactctattatgctctcaaatacccctaagcatctatactagcctggtatgggtatgaaagatacaaagataaataaaacatagtccctgattctaagaaattcacaatttagcaaaggaaatggactcatagatgctaaccttaaaacaacgtgacaaatgccagacaggacccatcagccaggcactgtgagagcacagagcagggaggttgggtcctgcctgaggagacctggaagggaggcctcacaggaggatgaccaggtctcagtcagcggggaggtggaaagtgcaggtgcatcaggggcaccctgaccgaggaaacagctgccagaggcctccactgctaaagtccacataaggctgaggtcagtcaccctaaacaacctgctccctctaagccaggggatgagcttggagcatcccacaagttccctaaaagttgcagcccccagggggattttgagctatcatctctgcacatgcttagtgagaagactacacaacatttctaagaatctgagattttatattgtcagttaaccactttcattattcattcacctcaggacatgcagaaatatttcagtcagaactgggaaacagaaggacctacattctgctgtcacttatgtgtcaagaagcagatgatcgatgaggcaggtcagttgtaagtgagtcacattgtagcattaaattctagtatttttgtagtttgaaacagtaacttaataaaagagcaaaagctattctagctttcttct

SEQ ID NO: 306299 - DNA, 3082 bp, Homo sapiens
gaaaacaggctgggcccggtggctcactcctgtaatcccagcactttgggaggttgaggtgggcggatcacctgaggtcaggagtttgagaccagccggcgggagtggccttgggtccccgctgctggttctcctccctcctcctcgcattctcctcctcctctgctcctcccgatccctcctccgccgcctggtccctcctcctcccgccctgcctccccgcgcctcggcccgcgcgagctagacgtccgggcagcccccggcgcagcgcggccgcagcagcctccgccccccgcacggtgtgagcgcccgccgcggccgaggcggccggagtcccgagctagccccggcggccgccgccgcccagaccggacgacaggccacctcgtcggcgtccgcccgagtccccgcctcgccgccaacgccacaaccaccgcgcacggccccctgactccgtccagtattgatcgggagagccggagcgagctcttcggggagcagcgatgcgaccctccgggacggccggggcagcgctcctggcgctgctggctgcgctctgcccggcgagtcgggctctggaggaaaagaaagtttgccaaggcacgagtaacaagctcacgcagttgggcacttttgaagatcattttctcagcctccagaggatgttcaataactgtgaggtggtccttgggaatttggaaattacctatgtgcagaggaattatgatctttccttcttaaagaccatccaggaggtggctggttatgtcctcattgccctcaacacagtggagcgaattcctttggaaaacctgcagatcatcagaggaaatatgtactacgaaaattcctatgccttagcagtcttatctaactatgatgcaaataaaaccggactgaaggagctgcccatgagaaatttacaggaaatcctgcatggcgccgtgcggttcagcaacaaccctgccctgtgcaacgtggagagcatccagtggcgggacatagtcagcagtgactttctcagcaacatgtcgatggacttccagaaccacctgggcagctgccaaaagtgtgatccaagctgtcccaatgggagctgctggggtgcaggagaggagaactgccagaaactgaccaaaatcatctgtgcccagcagtgctccgggcgctgccgtggcaagtcccccagtgactgctgccacaaccagtgtgctgcaggctgcacaggcccccgggagagcgactgcctggtctgccgcaaattccgagacgaagccacgtgcaaggacacctgccccccactcatgctctacaaccccaccacgtaccagatggatgtgaaccccgagggcaaatacagctttggtgccacctgcgtgaagaagtgtccccgtaattatgtggtgacagatcacggctcgtgcgtccgagcctgtggggccgacagctatgagatggaggaagacggcgtccgcaagtgtaagaagtgcgaagggccttgccgcaaaggtaggaagcccgccggtgtgcggacgaggcttgttctcggctgctgaggctgggctctcatgccacctccaaaggaacacatcttcctcttctcattaaaaaacaactatacatatcgtttctttaaaacagaagataaagctgtaaagctaggttaggcaatgggaaggcactgaaggttgtgacggggtggggggctctgatgagaacagtcacagagccagccccgctcagcagctgccaggtgcccagccctggggagaatccagggaaggcagagctggaagcagtgcagctccaagcggcccatgggaaataatgaggagaacgcaaggtcagtgtgaggtgacagggatggcatctcctacaccgccgtagccccaaagtgtactataggtcctggtgtccccccttcccgcctgcactctccccagccccttcagtgtttgttgagtgaatgaaggatgatgtggcagtggcggttccggtgaccggaattccttcctgcttccctctgcctgtggatccctagctattcttaatccaacaaatgtgaacggaatacacgtctctcttatctctgcagtgtgtaacggaataggtattggtgaatttaaagactcactctccataaatgctacgaatattaaacacttcaaaaactgcacctccatcagtggcgatctccacatcctgccggtggcatttaggggtgactccttcacacatactcctcctctggatccacaggaactggatattctgaaaaccgtaaaggaaatcacagggtttttgctgattcaggcttggcctgaaaacaggacggacctccatgcctttgagaacctagaaatcatacgcggcaggaccaagcaacatggtcagttttctcttgcagtcgtcagcctgaacataacatccttgggattacgctccctcaaggagataagtgatggagatgtgataatttcaggaaacaaaaatttgtgctatgcaaatacaataaactggaaaaaactgtttgggacctccggtcagaaaaccaaaattataagcaacagaggtgaaaacagctgcaaggccacaggccaggtctgccatgccttgtgctcccccgagggctgctggggcccggagcccagggactgcgtctcttgccggaatgtcagccgaggcagggaatgcgtggacaagtgcaaccttctggagggtgagccaagggagtttgtggagaactctgagtgcatacagtgccacccagagtgcctgcctcaggccatgaacatcacctgcacaggacggggaccagacaactgtatccagtgtgcccactacattgacggcccccactgcgtcaagacctgcccggcaggagtcatgggagaaaacaacaccctggtctggaagtacgcagacgccggccatgtgtgccacctgtgccatccaaactgcacctacgggtcctaataaatcttcactgtctgactttagtctcccactaaaactgcatttcctttctacaatttcaatttctccctttgcttcaaataaagtcctgacactattcatttga

SEQ ID NO: 306300 - DNA, 3387 bp, Homo sapiens
  misc_feature (3327)..(3327): n is a, c, g, or t
gaaaacaggctgggcccggtggctcactcctgtaatcccagcactttgggaggttgaggtgggcggatcacctgaggtcaggagtttgagaccagccggcgggagtggccttgggtccccgctgctggttctcctccctcctcctcgcattctcctcctcctctgctcctcccgatccctcctccgccgcctggtccctcctcctcccgccctgcctccccgcgcctcggcccgcgcgagctagacgtccgggcagcccccggcgcagcgcggccgcagcagcctccgccccccgcacggtgtgagcgcccgccgcggccgaggcggccggagtcccgagctagccccggcggccgccgccgcccagaccggacgacaggccacctcgtcggcgtccgcccgagtccccgcctcgccgccaacgccacaaccaccgcgcacggccccctgactccgtccagtattgatcgggagagccggagcgagctcttcggggagcagcgatgcgaccctccgggacggccggggcagcgctcctggcgctgctggctgcgctctgcccggcgagtcgggctctggaggaaaagaaagtttgccaaggcacgagtaacaagctcacgcagttgggcacttttgaagatcattttctcagcctccagaggatgttcaataactgtgaggtggtccttgggaatttggaaattacctatgtgcagaggaattatgatctttccttcttaaagaccatccaggaggtggctggttatgtcctcattgccctcaacacagtggagcgaattcctttggaaaacctgcagatcatcagaggaaatatgtactacgaaaattcctatgccttagcagtcttatctaactatgatgcaaataaaaccggactgaaggagctgcccatgagaaatttacaggaaatcctgcatggcgccgtgcggttcagcaacaaccctgccctgtgcaacgtggagagcatccagtggcgggacatagtcagcagtgactttctcagcaacatgtcgatggacttccagaaccacctgggcagctgccaaaagtgtgatccaagctgtcccaatgggagctgctggggtgcaggagaggagaactgccagaaactgaccaaaatcatctgtgcccagcagtgctccgggcgctgccgtggcaagtcccccagtgactgctgccacaaccagtgtgctgcaggctgcacaggcccccgggagagcgactgcctggtctgccgcaaattccgagacgaagccacgtgcaaggacacctgccccccactcatgctctacaaccccaccacgtaccagatggatgtgaaccccgagggcaaatacagctttggtgccacctgcgtgaagaagtgtccccgtaattatgtggtgacagatcacggctcgtgcgtccgagcctgtggggccgacagctatgagatggaggaagacggcgtccgcaagtgtaagaagtgcgaagggccttgccgcaaaggtaggaagcccgccggtgtgcggacgaggcttgttctcggctgctgaggctgggctctcatgccacctccaaaggaacacatcttcctcttctcattaaaaaacaactatacatatcgtttctttaaaacagaagataaagctgtaaagctaggttaggcaatgggaaggcactgaaggttgtgacggggtggggggctctgatgagaacagtcacagagccagccccgctcagcagctgccaggtgcccagccctggggagaatccagggaaggcagagctggaagcagtgcagctccaagcggcccatgggaaataatgaggagaacgcaaggtcagtgtgaggtgacagggatggcatctcctacaccgccgtagccccaaagtgtactataggtcctggtgtccccccttcccgcctgcactctccccagccccttcagtgtttgttgagtgaatgaaggatgatgtggcagtggcggttccggtgaccggaattccttcctgcttccctctgcctgtggatccctagctattcttaatccaacaaatgtgaacggaatacacgtctctcttatctctgcagtgtgtaacggaataggtattggtgaatttaaagactcactctccataaatgctacgaatattaaacacttcaaaaactgcacctccatcagtggcgatctccacatcctgccggtggcatttaggggtgactccttcacacatactcctcctctggatccacaggaactggatattctgaaaaccgtaaaggaaatcacagggtttttgctgattcaggcttggcctgaaaacaggacggacctccatgcctttgagaacctagaaatcatacgcggcaggaccaagcaacatggtcagttttctcttgcagtcgtcagcctgaacataacatccttgggattacgctccctcaaggagataagtgatggagatgtgataatttcaggaaacaaaaatttgtgctatgcaaatacaataaactggaaaaaactgtttgggacctccggtcagaaaaccaaaattataagcaacagaggtgaaaacagctgcaaggccacaggccaggtctgccatgccttgtgctcccccgagggctgctggggcccggagcccagggactgcgtctcttgccggaatgtcagccgaggcagggaatgcgtggacaagtgcaaccttctggaggggtaggaggttatttctttaatccccttgcgttgatcaaaaataaggctccaggttgttgttatagctttacaggcattctgtttgattttctcttccttttattctttgcccttggcttttggaggttttgggttttctgtggggagacgggaagttgtttgattgcgttatttttggcaaatttaagcacaataggaaataagcaagtattattgcctaatataatccaataatttatagaatctcttttcctggaagtatcttaaatttttctaagctacaaaaagttcctaagacaaatgagacagtcatcaatggttcatctagccaacaccgtggccatttgggcttttctttgtagtgcccgattcctggtgtgtgaaaataaattaacacaaattatattgccaagttaatatctgttttatgtgcccccagcatgtgttgaacatcaaacagtaccagggactttaaatatacccacggacaaagaaataattcataatgatgtttgttgaatttagttgcaatcaataaaaagtgcagtttgtgaatgctctgaggttcttgatattgatgtaaggctttgaacgacaaatgaggacnaaacataaataggaaagtaaaactgaaggatagaggccaaggccatgttttagaagattt

SEQ ID NO: 306301 - DNA, 1701 bp, Homo sapiens
gaaaacaggctgggcccggtggctcactcctgtaatcccagcactttgggaggttgaggtgggcggatcacctgaggtcaggagtttgagaccagccggcgggagtggccttgggtccccgctgctggttctcctccctcctcctcgcattctcctcctcctctgctcctcccgatccctcctccgccgcctggtccctcctcctcccgccctgcctccccgcgcctcggcccgcgcgagctagacgtccgggcagcccccggcgcagcgcggccgcagcagcctccgccccccgcacggtgtgagcgcccgccgcggccgaggcggccggagtcccgagctagccccggcggccgccgccgcccagaccggacgacaggccacctcgtcggcgtccgcccgagtccccgcctcgccgccaacgccacaaccaccgcgcacggccccctgactccgtccagtattgatcgggagagccggagcgagctcttcggggagcagcgatgcgaccctccgggacggccggggcagcgctcctggcgctgctggctgcgctctgcccggcgagtcgggctctggaggaaaagaaagtttgccaaggcacgagtaacaagctcacgcagttgggcacttttgaagatcattttctcagcctccagaggatgttcaataactgtgaggtggtccttgggaatttggaaattacctatgtgcagaggaattatgatctttccttcttaaagaccatccaggaggtggctggttatgtcctcattgccctcaacacagtggagcgaattcctttggaaaacctgcagatcatcagaggaaatatgtactacgaaaattcctatgccttagcagtcttatctaactatgatgcaaataaaaccggactgaaggagctgcccatgagaaatttacaggaaatcctgcatggcgccgtgcggttcagcaacaaccctgccctgtgcaacgtggagagcatccagtggcgggacatagtcagcagtgactttctcagcaacatgtcgatggacttccagaaccacctgggcagctgccaaaagtgtgatccaagctgtcccaatgggagctgctggggtgcaggagaggagaactgccagaaactgaccaaaatcatctgtgcccagcagtgctccgggcgctgccgtggcaagtcccccagtgactgctgccacaaccagtgtgctgcaggctgcacaggcccccgggagagcgactgcctggtctgccgcaaattccgagacgaagccacgtgcaaggacacctgccccccactcatgctctacaaccccaccacgtaccagatggatgtgaaccccgagggcaaatacagctttggtgccacctgcgtgaagaagtgtccccgtaattatgtggtgacagatcacggctcgtgcgtccgagcctgtggggccgacagctatgagatggaggaagacggcgtccgcaagtgtaagaagtgcgaagggccttgccgcaaagtgtgtaacggaataggtattggtgaatttaaagactcactctccataaatgctacgaatattaaacacttcaaaaactgcacctccatcagtggcgatctccacatccgtactggcccgcgggccagtacggatgtggggggccatatttaacattcttaaagaaagattttcagcccacgaatttcacact

SEQ ID NO: 306302 - DNA, 1832 bp, Homo sapiens
  misc_feature (1276)..(1276): n is a, c, g, or t
  misc_feature (1647)..(1647): n is a, c, g, or t
gaaaacaggctgggcccggtggctcactcctgtaatcccagcactttgggaggttgaggtgggcggatcacctgaggtcaggagtttgagaccagccggcgggagtggccttgggtccccgctgctggttctcctccctcctcctcgcattctcctcctcctctgctcctcccgatccctcctccgccgcctggtccctcctcctcccgccctgcctccccgcgcctcggcccgcgcgagctagacgtccgggcagcccccggcgcagcgcggccgcagcagcctccgccccccgcacggtgtgagcgcccgccgcggccgaggcggccggagtcccgagctagccccggcggccgccgccgcccagaccggacgacaggccacctcgtcggcgtccgcccgagtccccgcctcgccgccaacgccacaaccaccgcgcacggccccctgactccgtccagtattgatcgggagagccggagcgagctcttcggggagcagcgatgcgaccctccgggacggccggggcagcgctcctggcgctgctggctgcgctctgcccggcgagtcgggctctggaggaaaagaaagtttgccaaggcacgagtaacaagctcacgcagttgggcacttttgaagatcattttctcagcctccagaggatgttcaataactgtgaggtggtccttgggaatttggaaattacctatgtgcagaggaattatgatctttccttcttaaagaccatccaggaggtggctggttatgtcctcattgccctcaacacagtggagcgaattcctttggaaaacctgcagatcatcagaggaaatatgtactacgaaaattcctatgccttagcagtcttatctaactatgatgcaaataaaaccggactgaaggagctgcccatgagaaatttacaggaaatcctgcatggcgccgtgcggttcagcaacaaccctgccctgtgcaacgtggagagcatccagtggcgggacatagtcagcagtgactttctcagcaacatgtcgatggacttccagaaccacctgggcagctgtaagtgtcgcatacacactatctctgcctccagctcctatgggggacagctctacagcactggggcaggggagagaagccatgtttagtaagtcacattaatcagaaacaaaaagtagtaagcaaaatatctgaccactagaaaagcatgtatttaccacggacatagagatcgtttttttgtggcgggtggcagcccagctggttggcagtncaggccaccggaggcagatcccctgcagggacagcagagcacttgtgtcctgagaagagctgctgttcatggggctggcagcaccagggcctctcctagcctgccctgctgacactggccagactcctacatgcttctgagtctccagaggctacccggccctcctgaagcaccagggctgaatccacccccagctgagggcatgaacactgccacatggagtcacacacacagctgggcactgccatggagaggaagtctgtccatgtttccttgaatactggtggcctggtccctgtcccattccccagtgaggcagcctgtggggaagcctggcagggaaccaggcgcaggtcagcgtggcgccctgnctcaggccagcactgatgggggactctgagacgcaagctcacactcacccagctcccctgggctgcgcccgttcctgatcgcttggactttctgttctttagagtaagaagtgatcaccatttcctgcttctttgtttctccacaactgtgcagtggatgcctgtttgttttctgccctcagaac

SEQ ID NO: 306303 - DNA, 1251 bp, Homo sapiens
gaaaacaggctgggcccggtggctcactcctgtaatcccagcactttgggaggttgaggtgggcggatcacctgaggtcaggagtttgagaccagccggcgggagtggccttgggtccccgctgctggttctcctccctcctcctcgcattctcctcctcctctgctcctcccgatccctcctccgccgcctggtccctcctcctcccgccctgcctccccgcgcctcggcccgcgcgagctagacgtccgggcagcccccggcgcagcgcggccgcagcagcctccgccccccgcacggtgtgagcgcccgccgcggccgaggcggccggagtcccgagctagccccggcggccgccgccgcccagaccggacgacaggccacctcgtcggcgtccgcccgagtccccgcctcgccgccaacgccacaaccaccgcgcacggccccctgactccgtccagtattgatcgggagagccggagcgagctcttcggggagcagcgatgcgaccctccgggacggccggggcagcgctcctggcgctgctggctgcgctctgcccggcgagtcgggctctggaggaaaagaaagtttgccaaggcacgagtaacaagctcacgcagttgggcacttttgaagatcattttctcagcctccagaggatgttcaataactgtgaggtggtccttgggaatttggaaattacctatgtgcagaggaattatgatctttccttcttaaagaccatccaggaggtggctggttatgtcctcattgccctcaacacagtggagcgaattcctttggaaaacctgcagatcatcagaggaaatatgtactacgaaaattcctatgccttagcagtcttatctaactatgatgcaaataaaaccggactgaaggagctgcccatgagaaatttacaggaaatcctgcatggcgccgtgcggttcagcaacaaccctgccctgtgcaacgtggagagcatccagtggcgggacatagtcagcagtgactttctcagcaacatgtcgatggacttccagaaccacctgggcagctgtaagtgtcgcatacacactatctctgcctccagctcctatgggggacagctctacagcactggggcaggggagagaagccatgtttagtaagtggtcacggcataaatgatatgcatgtggtaagctgggtcccaaggggctgattggctggactggaatggtcgcatgatgtagggggtaggcaggg

SEQ ID NO: 306304 - DNA, 937 bp, Homo sapiens
gaaaacaggctgggcccggtggctcactcctgtaatcccagcactttgggaggttgaggtgggcggatcacctgaggtcaggagtttgagaccagccggcgggagtggccttgggtccccgctgctggttctcctccctcctcctcgcattctcctcctcctctgctcctcccgatccctcctccgccgcctggtccctcctcctcccgccctgcctccccgcgcctcggcccgcgcgagctagacgtccgggcagcccccggcgcagcgcggccgcagcagcctccgccccccgcacggtgtgagcgcccgccgcggccgaggcggccggagtcccgagctagccccggcggccgccgccgcccagaccggacgacaggccacctcgtcggcgtccgcccgagtccccgcctcgccgccaacgccacaaccaccgcgcacggccccctgactccgtccagtattgatcgggagagccggagcgagctcttcggggagcagcgatgcgaccctccgggacggccggggcagcgctcctggcgctgctggctgcgctctgcccggcgagtcgggctctggaggaaaagaaagttcaagtgccattcaatttatcctggcaagaagaggaaggcatcatcaagaccttaattttctaatacatctgatctgagaagaatgtgaaagctataaaattaatttttgatcaataactacaggccttttgagagagtgccctcctaatgaattgagtacctatttctccatacacagtgtctatcatgacctacaaacccttttcccatgaggtgtaacagagagagattacagccttggaactggatgtcagactctcctggtttaagacaataagccatgacatagagcctgaaaccaacacaatcttccgagtggttccagaaacatataggggataatg

SEQ ID NO: 306305 - DNA, 808 bp, Homo sapiens
gaaaacaggctgggcccggtggctcactcctgtaatcccagcactttgggaggttgaggtgggcggatcacctgaggtcaggagtttgagaccagccggcgggagtggccttgggtccccgctgctggttctcctccctcctcctcgcattctcctcctcctctgctcctcccgatccctcctccgccgcctggtccctcctcctcccgccctgcctccccgcgcctcggcccgcgcgagctagacgtccgggcagcccccggcgcagcgcggccgcagcagcctccgccccccgcacggtgtgagcgcccgccgcggccgaggcggccggagtcccgagctagccccggcggccgccgccgcccagaccggacgacaggccacctcgtcggcgtccgcccgagtccccgcctcgccgccaacgccacaaccaccgcgcacggccccctgactccgtccagtattgatcgggagagccggagcgagctcttcggggagcagcgatgcgaccctccgggacggccggggcagcgctcctggcgctgctggctgcgctctgcccggcgagtcgggctctggaggaaaagaaagttaatgatcctttgcctggactttctaagtgcccagaagagcaacagccagcatgcaggatggcattcctgaccagttgcacttggcctagcattccaacctcacctgcctcagcttgttcaacctgaaaacctaccaagtgaaagcaagagccacgtgaagacgccttagttatatgcacccacccagacacttgctcagaaaggaatcagtgggg

SEQ ID NO: 306306 - DNA, 388 bp, Homo sapiens
tgatgccataacaacccagagagcaactatttctagtgatttttaaatgcagctatttgaccttccattcctagtgggatacatcttaaggacaggattaattttaaaaatcttaaactgttttcactagccttctaattgatttttagcatagaaaaagggatatacagacattggatcaatggcatcaagtaaaaaccctgaagtcctaaatttgagttagaactatcctaaacacccatgatgtgtttcacattttaaaaatatttccggccgggcatggtggctcacacctgtaatcccagcaatttgagaggccgaggtgggcatatcacttgaggtcaggagttcaagaccagcctcgccaacatgatgaaaccccaccttt

SEQ ID NO: 306307 - DNA, 5877 bp, Homo sapiens
  misc_feature (2)..(2): n is a, c, g, or t
  misc_feature (7)..(7): n is a, c, g, or t
  misc_feature (10)..(10): n is a, c, g, or t
  misc_feature (16)..(16): n is a, c, g, or t
gnatccnagntcagangaaagccccgagatcacagagacccggcgagatcacagagacccggcctgaaggaacgtggaaagaccaatgtacctgttttgaccggttgcctggagcaagaagttccagttggggagaattttcagaagataaagtcggagattgtggaaagacttgacttgcagcattactctactgactggcagagacaggagaggtagatgtccacgcccacagaccctggtgcgatgccccacccagggccttcgccggggcctgggccttcccctgggccaattcttgggcctagtccaggaccaggaccatccccaggttccgtccacagcatgatggggccaagtcctggacctccaagtgtctcccatcctatgccgacgatggggtccacagacttcccacaggaaggcatgcatcaaatgcataagcccatcgatggtatacatgacaaggggattgtagaagacatccattgtggatccatgaagggcactggtatgcgaccacctcacccaggcatgggccctccccagagtccaatggatcaacacagccaaggttatatgtcaccacacccatctccattaggagccccagagcacgtctccagccctatgtctggaggaggcccaactccacctcagatgccaccaagccagccgggggccctcatcccaggtgatccgcaggccatgagccagcccaacagaggtccctcacctttcagtcctgtccagctgcatcagcttcgagctcagattttagcttataaaatgctggcccgaggccagcccctccccgaaacgctgcagcttgcagtccaggggaaaaggacgttgcctggcttgcagcaacaacagcagcagcaacagcagcagcagcagcagcagcagcagcagcagcagcagcaacagcagccgcagcagcagccgccgcaaccacagacgcagcaacaacagcagccggcccttgttaactacaacagaccatctggcccggggccggagctgagcggcccgagcaccccgcagaagctgccggtgcccgcgcccggcggccggccctcgcccgcgccccccgcagccgcgcagccgcccgcggccgcagtgcccgggccctcagtgccgcagccggccccggggcagccctcgcccgtcctccagctgcagcagaagcagagccgcatcagccccatccagaaaccgcaaggcctggaccccgtggaaattctgcaagagcgggaatacagacttcaggcccgcatagctcataggatacaagaactggaaaatctgcctggctctttgccaccagatttaagaaccaaagcaaccgtggaactaaaagcacttcggttactcaatttccagcgtcagctgagacaggaggtggtggcctgcatgcgcagggacacgaccctggagacggctctcaactccaaagcatacaaacggagcaagcgccagactctgagagaagctcgcatgaccgagaagctggagaagcagcagaagattgagcaggagaggaaacgccgtcagaaacaccaggaatacctgaacagtattttgcaacatgcaaaagattttaaggaatatcatcggtctgtggccggaaagatccagaagctctccaaagcagtggcaacttggcatgccaacactgaaagagagcagaagaaggagacagagcggattgaaaaggagagaatgcggcgactgatggctgaagatgaggagggttatagaaaactgattgatcaaaagaaagacaggcgtttagcttaccttttgcagcagaccgatgagtatgtagccaatctgaccaatctggtttgggagcacaagcaagcccaggcagccaaagagaagaagaagaggaggaggaggaagaagaaggctgaggagaatgcagagggtggggagtctgccctgggaccggatggagagcccatagatgagagcagccagatgagtgacctccctgtcaaagtgactcacacagaaaccggcaaggttctgttcggaccagaagcacccaaagcaagtcagctggacgcctggctggaaatgaatcctggttatgaagttgcccctagatctgacagtgaagagagtgattctgattatgaggaagaggatgaggaagaagagtccagtaggcaggaaaccgaagagaaaatactcctggatccaaatagcgaagaagtttctgagaaggatgctaagcagatcattgagacagctaagcaagacgtggatgatgaatacagcatgcagtacagtgccaggggctcccagtcctactacaccgtggctcatgccatctcggagagggtggagaaacagtctgccctcctaattaatgggaccctaaagcattaccagctccagggcctggaatggatggtttccctgtataataacaacttgaacggaatcttagccgatgaaatggggcttggaaagaccatacagaccattgcactcatcacttatctgatggagcacaaaagactcaatggcccctatctcatcattgttcccctttcgactctatctaactggacatatgaatttgacaaatgggctccttctgtggtgaagatttcttacaagggtactcctgccatgcgtcgctcccttgtcccccagctacggagtggcaaattcaatgtcctcttgactacttatgagtatattataaaagacaagcacattcttgcaaagattcggtggaaatacatgatagtggacgaaggccaccgaatgaagaatcaccactgcaagctgactcaggtcttgaacactcactatgtggcccccagaaggatcctcttgactgggaccccgctgcagaataagctccctgaactctgggccctcctcaacttcctcctcccaacaatttttaagagctgcagcacatttgaacaatggttcaatgctccatttgccatgactggtgaaagggtggacttaaatgaagaagaaactatattgatcatcaggcgtctacataaggtgttaagaccatttttactaaggagactgaagaaagaagttgaatcccagcttcccgaaaaagtggaatatgtgatcaagtgtgacatgtcagctctgcagaagattctgtatcgccatatgcaagccaaggggatccttctcacagatggttctgagaaagataagaaggggaaaggaggtgctaagacacttatgaacactattatgcagttgagaaaaatctgcaaccacccatatatgtttcagcacattgaggaatcctttgctgaacacctaggctattcaaatggggtcatcaatggggctgaactgtatcgggcctcagggaagtttgagctgcttgatcgtattctgccaaaattgagagcgactaatcaccgagtgctgcttttctgccagatgacatctctcatgaccatcatggaggattattttgcttttcggaacttcctttacctacgccttgatggcaccaccaagtctgaagatcgtgctgctttgctgaagaaattcaatgaacctggatcccagtatttcattttcttgctgagcacaagagctggtggcctgggcttaaatcttcaggcagctgatacagtggtcatctttgacagcgactggaatcctcatcaggatctgcaggcccaagaccgagctcaccgcatcgggcagcagaacgaggtccgggtactgaggctctgtaccgtgaacagcgtggaggaaaagatcctcgcggccgcaaaatacaagctgaacgtggatcagaaagtgatccaggcgggcatgtttgaccaaaagtcttcaagccacgagcggagggcattcctgcaggccatcttggagcatgaggaggaaaatgaggaagaagatgaagtaccggacgatgagactctgaaccaaatgattgctcgacgagaagaagaatttgacctttttatgcggatggacatggaccggcggagggaagatgcccggaacccgaaacggaagccccgtttaatggaggaggatgagctgccctcctggatcattaaggatgacgctgaagtagaaaggctcacctgtgaagaagaggaggagaaaatatttgggagggggtcccgccagcgccgtgacgtggactacagtgacgccctcacggagaagcagtggctaagggccatcgaagacggcaatttggaggaaatggaagaggaagtacggcttaagaagcgaaaaagacgaagaaatgtggataaagatcctgcaaaagaagatgtggaaaaagctaagaagagaagaggccgccctcccgctgagaaactgtcaccaaatccccccaaactgacaaagcagatgaacgctatcatcgatactgtgataaactacaaagataggtgtaacgtggagaaggtgcccagtaattctcagttggaaatagaaggaaacagttcagggcgacagctcagtgaagtcttcattcagttaccttcaaggaaagaattaccagaatactatgaattaattaggaagccagtggatttcaaaaaaataaaggaaaggattcgtaatcataagtaccggagcctaggcgacctggagaaggatgtcatgcttctctgtcacaacgctcagacgttcaacctggagggatcccagatctatgaagactccatcgtcttacagtcagtgtttaagagtgcccggcagaaaattgccaaagaggaagagagtgaggatgaaagcaatgaagaggaggaagaggaagatgaagaagagtcagagtccgaggcaaaatcagtcaaggtgaaaattaagctcaataaaaaagatgacaaaggccgggacaaagggaaaggcaagaaaaggccaaatcgaggaaaagccaaacctgtagtgagcgattttgacagcgatgaggagcaggatgaacgtgaacagtcagaaggaagtgggacggatgatgagtgatcagtatggacctttttccttggtagaactgaattccttcctcccctgtctcatttctacccagtgagttcatttgtcatataggcactgggttgtttctatatcatcatcgtctataaactagctttaggatagtgccagacaaacatatgatatcatggtgtaaaaaacacacacatacacaaatatttgtaacatattgtgaccaaatgggcctcaaagattcagattgaaacaaacaaaaagcttttgatggaaaatatgtgggtggatagtatatttctatgggtgggtctaatttggtaacggtttgattgtgcctggttttatcacctgttcagatgagaagatttttgtcttttgtagcactgataaccaggagaagccattaaaagccactggttattttatttttcatcaggcaattttcgaggtttttatttgttcggtattgtttttttacactgtggtacatataagcaactttaataggtgataaatgtacagtagttagatttcacctgcatatacatttttccattttatgctctatgatctgaacaaaagctttttgaattgtataagatttatgtctactgtaaacattgcttaatttttttgctcttgatttaaaaaaaagttttgttgaaagcgctattgaatattgcaatctatatagtgtattggatggcttcttttgtcaccctgatctcctatgttaccaatgtgtatcgtctccttctccctaaagtgtacttaatctttgctttctttgcacaatgtctttggttgcaagtcataagcctgaggcaaataaaattccagtaatttcgaagaatgtggtgttggtgctttcctaataaagaaataatttagcttgacaaa

SEQ ID NO: 306308 - DNA, 1273 bp, Homo sapiens
gtagaaaataagagatttattcccctttttaaatcaaaaccagattccatgcttcagccgccccctaacccgccagccccgcccccagggtttgtttttccatatttttgtatatattttagcgaagatggcaggtgagggaaggttatagtgctgtacctagtccacgaagtaaacagagaggttagggtgggtttacttatttataaggcgttcagcctctcagctgtttctccctcgttggcatttggaagcttgcagtccttcagggaagagacagatttggcaggaacgttctttgtgcccgcctcccttttctattttttatttttttacctggaatagggggcagatttataatgacagccttagggaagggggagaaaaagtttcagccggcacgacaatgcccgttttttccacagtccacactgtgccacaaacagctttggtgccactcggagcccgtcccccgtcccctccctctctctctgcaggctcgcactggcaggcggaggcacagttaaattccagcaccttctccacatacccccgaactactacgcgctattactacggctgccctccgttttcgcttcgcctcctccccttccgcagtctccctggaggagccccgcggcgcccgaggaagaggactgccagggaagggacagcgggcgcccagctccagcagggcttggggctttctgcatcccgcgcagtttctctgctccaggcacaaacgcggcccgagagccggcgccttgcagtcacacacggatccacgcatacagtagagctgtctagatccacattcttgcacaccgccccctcctccccccgcgctcccggagtcgctgagctgagcgagtgacaggcgcgtcccgccaacccgcgcccggacgggcagggaggagcggcgcgcggggccaactgcggcgcgtcttccggcgcccgcggaggaggcgagggtgggacgctgggcggagcccgagtttaggaagaggaggggacggctgtcatcaatgaagtcatattcataatctagtcctctctccctctgtttctgtactctgggtgactcagagagggaagagattcagccagcacactcctcgcgagcaaggtaaatataacttacaactcttttctcctctttcccctcccttcggccgccccgctgcagccgccgctcagacccctccggcaccacgccgccttcgcccgggattatccattattatcctaattattatttattgtgcatgcaagg

SEQ ID NO: 306309 - DNA, 733 bp, Homo sapiens
acgggtgcagtgtgcctttaagaaaagaggtgcctcactaaacttcgctgtagttgtgtttcaccgtctcggtagggaaggaaagtgttaatttcttatttgtacactttttttccccgacttccttcctattcacttcattaaatctagaggcagttgagcatgggagccgtctgtatgttgaattagggctcgcactcttgcgcaacacgtcaccagtcggaaactgggggtttgcttctgtgatttatttcattattgtgctggtaaaaggtttggaagggaattctttttgggggtagtactttagcattgtgtagcaagttttggggttttttttgtgtgtgaccccccagcccccagcgctgagtttgagtcagttgagccagtttagtaaataattttttaaaataaaagaacagtttaaaatctccatgaataattttacttacatgcaggagtaatcttactctactctttatgtgcgaaaagcattgggaagtgtttagtgaattgatttccattagaaaaagacccttagaaatcacagaacataaagcactgcatatggatgtgtttggggtctttggggaggagggaagatgttttgtagctctctgcattcctgcataaaaccttagtttgaggggaataatggtcagtactttgtgtgtttccttgtaattccaaaacctaaatttaataagaatctgcacgtattagcagttgtaat

SEQ ID NO: 306310 - DNA, 571 bp, Homo sapiens
tccccaaacagattctagtcttcctatgctgttaaacacacactgagagttttcttggacaacactgatagctcagaggacactggtcattggattttaagtatccttttcttccctttttggatcttctaggaatacctgaacagtattttgcaacatgcaaaagattttaaggaatatcatcggtctgtggccggaaagatccagaagctctccaaagcagtggcaacttggcatgccaacactgaaagagagcagaagaaggagacagagcggattgaaaaggagagaatgcggcgactgatggctgaagatgaggagggttatagaaaactgattgatcaaaagaaagacaggcgtttagcttaccttttgcagcagaccgatgagtatgtagccaatctgaccaatctggtttgggagcacaagcaagcccaggcagccaaagagaagaagaagaggaggaggaggaagaaggtgcgtatcctagtggtggtggctgagtccagggtgtatgggcagggataagtttttaaggcgagtattgctctttaagtactacttcttacac

SEQ ID NO: 306311 - DNA, 473 bp, Homo sapiens
ctagtacggtgatgctttggtgggctgatttgtgctttttctttcaaaagatctggccaacttcttctctctacatctgagcctcttcatccagtttgctacactcctaccagtcaaaatgcagactgtcaaggggaggacagagtggagagtggagttgtctgcacgcttatattatgctctcatcctgctcttctttccttaataggctgaagatgaggagggttatagaaaactgattgatcaaaagaaagacaggcgtttagcttaccttttgcagcagaccgatgagtatgtagccaatctgaccaatctggtttgggagcacaagcaagcccaggcagccaaagagaagaagaagaggaggaggaggaagaaggtgcgtatcctagtggtggtggctgagtccagggtgtatgggcagggataagtttttaaggcgagtattgctctttaagtactacttcttacac

SEQ ID NO: 306312 - DNA, 556 bp, Homo sapiens
acgggtgcagtgtgcctttaagaaaagaggtgcctcactaaacttcgctgtagttgtgtttcaccgtctcggtagggaaggaaagtgttaatttcttatttgtacactttttttccccgacttccttcctattcacttcattaaatctagaggcagttgagcatgggagccgtctgtatgttgaattagggctcgcactcttgcgcaacacgtcaccagtcggaaactgggggtttgcttctgtgatttatttcattattgtgctggtaaactgatgaagagactagcagctcgctgctttgctggcttgttaattttatccccactaactgtgatttctgatagccggcctgctgatagtggtaaggccatcgaagacggcaatttggaggaaatggaagaggaagtacggcttaagaagcgaaaaagacgaagaaatgtggataaagatcctgcgaagatgtggaccccaaactgacaaagcaaatgaaccctatcattgatactgtgataaactacgatagtttatggcgacagctcactggtcttcattcgt

SEQ ID NO: 306313 - DNA, 345 bp, Homo sapiens
gcacatctgtgaactgtatttggttgtaaagttttgtcatgtacatcatgtactaaaccgtgagagttaatcatcccaagaagattactgtaataaaccataattactttcagatagtgaaatccagaagaaaattgttaattatcatattgcaaggtttctgatgagagtaatacaaatgacaaatatcacacattctgcgtgctgctgactggctcgctgtgggctgctactgtgctgactgttcctgcaaagtcaggcaattacccggatgcccggggctgcctgctgtactttctcaacagaactggagcctttcagcagagcggtgggttctctactacc

SEQ ID NO: 306314 - DNA, 5851 bp, Homo sapiens
aaaaattttctgttaccaaattttacaacttctaataagactactataactttatgtaaactgatgaagatgtgctgattaacatattctgtgatatggtttacaacttttaatcataattgtccatgattttggaatgctgttatttatcagtaaatgtaaaatatttgaggcatttagccatacacacactagaactttttaaaactttgtcctatagtgtaattataaactgatgactattatcttcatacattgagtcttcatgcatcaatgaaatgaaaaatataggagtagatgtccacgcccacagaccctggtgcgatgccccacccagggccttcgccggggcctgggccttcccctgggccaattcttgggcctagtccaggaccaggaccatccccaggttccgtccacagcatgatggggccaagtcctggacctccaagtgtctcccatcctatgccgacgatggggtccacagacttcccacaggaaggcatgcatcaaatgcataagcccatcgatggtatacatgacaaggggattgtagaagacatccattgtggatccatgaagggcactggtatgcgaccacctcacccaggcatgggccctccccagagtccaatggatcaacacagccaaggttatatgtcaccacacccatctccattaggagccccagagcacgtctccagccctatgtctggaggaggcccaactccacctcagatgccaccaagccagccgggggccctcatcccaggtgatccgcaggccatgagccagcccaacagaggtccctcacctttcagtcctgtccagctgcatcagcttcgagctcagattttagcttataaaatgctggcccgaggccagcccctccccgaaacgctgcagcttgcagtccaggggaaaaggacgttgcctggcttgcagcaacaacagcagcagcaacagcagcagcagcagcagcagcagcagcagcagcagcagcaacagcagccgcagcagcagccgccgcaaccacagacgcagcaacaacagcagccggcccttgttaactacaacagaccatctggcccggggccggagctgagcggcccgagcaccccgcagaagctgccggtgcccgcgcccggcggccggccctcgcccgcgccccccgcagccgcgcagccgcccgcggccgcagtgcccgggccctcagtgccgcagccggccccggggcagccctcgcccgtcctccagctgcagcagaagcagagccgcatcagccccatccagaaaccgcaaggcctggaccccgtggaaattctgcaagagcgggaatacagacttcaggcccgcatagctcataggatacaagaactggaaaatctgcctggctctttgccaccagatttaagaaccaaagcaaccgtggaactaaaagcacttcggttactcaatttccagcgtcagctgagacaggaggtggtggcctgcatgcgcagggacacgaccctggagacggctctcaactccaaagcatacaaacggagcaagcgccagactctgagagaagctcgcatgaccgagaagctggagaagcagcagaagattgagcaggagaggaaacgccgtcagaaacaccaggaatacctgaacagtattttgcaacatgcaaaagattttaaggaatatcatcggtctgtggccggaaagatccagaagctctccaaagcagtggcaacttggcatgccaacactgaaagagagcagaagaaggagacagagcggattgaaaaggagagaatgcggcgactgatggctgaagatgaggagggttatagaaaactgattgatcaaaagaaagacaggcgtttagcttaccttttgcagcagaccgatgagtatgtagccaatctgaccaatctggtttgggagcacaagcaagcccaggcagccaaagagaagaagaagaggaggaggaggaagaagaaggctgaggagaatgcagagggtggggagtctgccctgggaccggatggagagcccatagatgagagcagccagatgagtgacctccctgtcaaagtgactcacacagaaaccggcaaggttctgttcggaccagaagcacccaaagcaagtcagctggacgcctggctggaaatgaatcctggttatgaagttgcccctagatctgacagtgaagagagtgattctgattatgaggaagaggatgaggaagaagagtccagtaggcaggaaaccgaagagaaaatactcctggatccaaatagcgaagaagtttctgagaaggatgctaagcagatcattgagacagctaagcaagacgtggatgatgaatacagcatgcagtacagtgccaggggctcccagtcctactacaccgtggctcatgccatctcggagagggtggagaaacagtctgccctcctaattaatgggaccctaaagcattaccagctccagggcctggaatggatggtttccctgtataataacaacttgaacggaatcttagccgatgaaatggggcttggaaagaccatacagaccattgcactcatcacttatctgatggagcacaaaagactcaatggcccctatctcatcattgttcccctttcgactctatctaactggacatatgaatttgacaaatgggctccttctgtggtgaagatttcttacaagggtactcctgccatgcgtcgctcccttgtcccccagctacggagtggcaaattcaatgtcctcttgactacttatgagtatattataaaagacaagcacattcttgcaaagattcggtggaaatacatgatagtggacgaaggccaccgaatgaagaatcaccactgcaagctgactcaggtcttgaacactcactatgtggcccccagaaggatcctcttgactgggaccccgctgcagaataagctccctgaactctgggccctcctcaacttcctcctcccaacaatttttaagagctgcagcacatttgaacaatggttcaatgctccatttgccatgactggtgaaagggtggacttaaatgaagaagaaactatattgatcatcaggcgtctacataaggtgttaagaccatttttactaaggagactgaagaaagaagttgaatcccagcttcccgaaaaagtggaatatgtgatcaagtgtgacatgtcagctctgcagaagattctgtatcgccatatgcaagccaaggggatccttctcacagatggttctgagaaagataagaaggggaaaggaggtgctaagacacttatgaacactattatgcagttgagaaaaatctgcaaccacccatatatgtttcagcacattgaggaatcctttgctgaacacctaggctattcaaatggggtcatcaatggggctgaactgtatcgggcctcagggaagtttgagctgcttgatcgtattctgccaaaattgagagcgactaatcaccgagtgctgcttttctgccagatgacatctctcatgaccatcatggaggattattttgcttttcggaacttcctttacctacgccttgatggcaccaccaagtctgaagatcgtgctgctttgctgaagaaattcaatgaacctggatcccagtatttcattttcttgctgagcacaagagctggtggcctgggcttaaatcttcaggcagctgatacagtggtcatctttgacagcgactggaatcctcatcaggatctgcaggcccaagaccgagctcaccgcatcgggcagcagaacgaggtccgggtactgaggctctgtaccgtgaacagcgtggaggaaaagatcctcgcggccgcaaaatacaagctgaacgtggatcagaaagtgatccaggcgggcatgtttgaccaaaagtcttcaagccacgagcggagggcattcctgcaggccatcttggagcatgaggaggaaaatgaggaagaagatgaagtaccggacgatgagactctgaaccaaatgattgctcgacgagaagaagaatttgacctttttatgcggatggacatggaccggcggagggaagatgcccggaacccgaaacggaagccccgtttaatggaggaggatgagctgccctcctggatcattaaggatgacgctgaagtagaaaggctcacctgtgaagaagaggaggagaaaatatttgggagggggtcccgccagcgccgtgacgtggactacagtgacgccctcacggagaagcagtggctaagggccatcgaagacggcaatttggaggaaatggaagaggaagtacggcttaagaagcgaaaaagacgaagaaatgtggataaagatcctgcaaaagaagatgtggaaaaagctaagaagagaagaggccgccctcccgctgagaaactgtcaccaaatccccccaaactgacaaagcagatgaacgctatcatcgatactgtgataaactacaaagatagttcagggcgacagctcagtgaagtcttcattcagttaccttcaaggaaagaattaccagaatactatgaattaattaggaagccagtggatttcaaaaaaataaaggaaaggattcgtaatcataagtaccggagcctaggcgacctggagaaggatgtcatgcttctctgtcacaacgctcagacgttcaacctggagggatcccagatctatgaagactccatcgtcttacagtcagtgtttaagagtgcccggcagaaaattgccaaagaggaagagagtgaggatgaaagcaatgaagaggaggaagaggaagatgaagaagagtcagagtccgaggcaaaatcagtcaaggtgaaaattaagctcaataaaaaagatgacaaaggccgggacaaagggaaaggcaagaaaaggccaaatcgaggaaaagccaaacctgtagtgagcgattttgacagcgatgaggagcaggatgaacgtgaacagtcagaaggaagtgggacggatgatgagtgatcagtatggacctttttccttggtagaactgaattccttcctcccctgtctcatttctacccagtgagttcatttgtcatataggcactgggttgtttctatatcatcatcgtctataaactagctttaggatagtgccagacaaacatatgatatcatggtgtaaaaaacacacacatacacaaatatttgtaacatattgtgaccaaatgggcctcaaagattcagattgaaacaaacaaaaagcttttgatggaaaatatgtgggtggatagtatatttctatgggtgggtctaatttggtaacggtttgattgtgcctggttttatcacctgttcagatgagaagatttttgtcttttgtagcactgataaccaggagaagccattaaaagccactggttattttatttttcatcaggcaattttcgaggtttttatttgttcggtattgtttttttacactgtggtacatataagcaactttaataggtgataaatgtacagtagttagatttcacctgcatatacatttttccattttatgctctatgatctgaacaaaagctttttgaattgtataagatttatgtctactgtaaacattgcttaatttttttgctcttgatttaaaaaaaagttttgttgaaagcgctattgaatattgcaatctatatagtgtattggatggcttcttttgtcaccctgatctcctatgttaccaatgtgtatcgtctccttctccctaaagtgtacttaatctttgctttctttgcacaatgtctttggttgcaagtcataagcctgaggcaaataaaattccagtaatttcgaa

SEQ ID NO: 306315 - DNA, 5901 bp, Homo sapiens
aaaaattttctgttaccaaattttacaacttctaataagactactataactttatgtaaactgatgaagatgtgctgattaacatattctgtgatatggtttacaacttttaatcataattgtccatgattttggaatgctgttatttatcagtaaatgtaaaatatttgaggcatttagccatacacacactagaactttttaaaactttgtcctatagtgtaattataaactgatgactattatcttcatacattgagtcttcatgcatcaatgaaatgaaaaatataggagtagatgtccacgcccacagaccctggtgcgatgccccacccagggccttcgccggggcctgggccttcccctgggccaattcttgggcctagtccaggaccaggaccatccccaggttccgtccacagcatgatggggccaagtcctggacctccaagtgtctcccatcctatgccgacgatggggtccacagacttcccacaggaaggcatgcatcaaatgcataagcccatcgatggtatacatgacaaggggattgtagaagacatccattgtggatccatgaagggcactggtatgcgaccacctcacccaggcatgggccctccccagagtccaatggatcaacacagccaaggttatatgtcaccacacccatctccattaggagccccagagcacgtctccagccctatgtctggaggaggcccaactccacctcagatgccaccaagccagccgggggccctcatcccaggtgatccgcaggccatgagccagcccaacagaggtccctcacctttcagtcctgtccagctgcatcagcttcgagctcagattttagcttataaaatgctggcccgaggccagcccctccccgaaacgctgcagcttgcagtccaggggaaaaggacgttgcctggcttgcagcaacaacagcagcagcaacagcagcagcagcagcagcagcagcagcagcagcagcagcaacagcagccgcagcagcagccgccgcaaccacagacgcagcaacaacagcagccggcccttgttaactacaacagaccatctggcccggggccggagctgagcggcccgagcaccccgcagaagctgccggtgcccgcgcccggcggccggccctcgcccgcgccccccgcagccgcgcagccgcccgcggccgcagtgcccgggccctcagtgccgcagccggccccggggcagccctcgcccgtcctccagctgcagcagaagcagagccgcatcagccccatccagaaaccgcaaggcctggaccccgtggaaattctgcaagagcgggaatacagacttcaggcccgcatagctcataggatacaagaactggaaaatctgcctggctctttgccaccagatttaagaaccaaagcaaccgtggaactaaaagcacttcggttactcaatttccagcgtcagctgagacaggaggtggtggcctgcatgcgcagggacacgaccctggagacggctctcaactccaaagcatacaaacggagcaagcgccagactctgagagaagctcgcatgaccgagaagctggagaagcagcagaagattgagcaggagaggaaacgccgtcagaaacaccaggaatacctgaacagtattttgcaacatgcaaaagattttaaggaatatcatcggtctgtggccggaaagatccagaagctctccaaagcagtggcaacttggcatgccaacactgaaagagagcagaagaaggagacagagcggattgaaaaggagagaatgcggcgactgatggctgaagatgaggagggttatagaaaactgattgatcaaaagaaagacaggcgtttagcttaccttttgcagcagaccgatgagtatgtagccaatctgaccaatctggtttgggagcacaagcaagcccaggcagccaaagagaagaagaagaggaggaggaggaagaagaaggctgaggagaatgcagagggtggggagtctgccctgggaccggatggagagcccatagatgagagcagccagatgagtgacctccctgtcaaagtgactcacacagaaaccggcaaggttctgttcggaccagaagcacccaaagcaagtcagctggacgcctggctggaaatgaatcctggttatgaagttgcccctagatctgacagtgaagagagtgattctgattatgaggaagaggatgaggaagaagagtccagtaggcaggaaaccgaagagaaaatactcctggatccaaatagcgaagaagtttctgagaaggatgctaagcagatcattgagacagctaagcaagacgtggatgatgaatacagcatgcagtacagtgccaggggctcccagtcctactacaccgtggctcatgccatctcggagagggtggagaaacagtctgccctcctaattaatgggaccctaaagcattaccagctccagggcctggaatggatggtttccctgtataataacaacttgaacggaatcttagccgatgaaatggggcttggaaagaccatacagaccattgcactcatcacttatctgatggagcacaaaagactcaatggcccctatctcatcattgttcccctttcgactctatctaactggacatatgaatttgacaaatgggctccttctgtggtgaagatttcttacaagggtactcctgccatgcgtcgctcccttgtcccccagctacggagtggcaaattcaatgtcctcttgactacttatgagtatattataaaagacaagcacattcttgcaaagattcggtggaaatacatgatagtggacgaaggccaccgaatgaagaatcaccactgcaagctgactcaggtcttgaacactcactatgtggcccccagaaggatcctcttgactgggaccccgctgcagaataagctccctgaactctgggccctcctcaacttcctcctcccaacaatttttaagagctgcagcacatttgaacaatggttcaatgctccatttgccatgactggtgaaagggtggacttaaatgaagaagaaactatattgatcatcaggcgtctacataaggtgttaagaccatttttactaaggagactgaagaaagaagttgaatcccagcttcccgaaaaagtggaatatgtgatcaagtgtgacatgtcagctctgcagaagattctgtatcgccatatgcaagccaaggggatccttctcacagatggttctgagaaagataagaaggggaaaggaggtgctaagacacttatgaacactattatgcagttgagaaaaatctgcaaccacccatatatgtttcagcacattgaggaatcctttgctgaacacctaggctattcaaatggggtcatcaatggggctgaactgtatcgggcctcagggaagtttgagctgcttgatcgtattctgccaaaattgagagcgactaatcaccgagtgctgcttttctgccagatgacatctctcatgaccatcatggaggattattttgcttttcggaacttcctttacctacgccttgatggcaccaccaagtctgaagatcgtgctgctttgctgaagaaattcaatgaacctggatcccagtatttcattttcttgctgagcacaagagctggtggcctgggcttaaatcttcaggcagctgatacagtggtcatctttgacagcgactggaatcctcatcaggatctgcaggcccaagaccgagctcaccgcatcgggcagcagaacgaggtccgggtactgaggctctgtaccgtgaacagcgtggaggaaaagatcctcgcggccgcaaaatacaagctgaacgtggatcagaaagtgatccaggcgggcatgtttgaccaaaagtcttcaagccacgagcggagggcattcctgcaggccatcttggagcatgaggaggaaaatgaggaagaagatgaagtaccggacgatgagactctgaaccaaatgattgctcgacgagaagaagaatttgacctttttatgcggatggacatggaccggcggagggaagatgcccggaacccgaaacggaagccccgtttaatggaggaggatgagctgccctcctggatcattaaggatgacgctgaagtagaaaggctcacctgtgaagaagaggaggagaaaatatttgggagggggtcccgccagcgccgtgacgtggactacagtgacgccctcacggagaagcagtggctaagggccatcgaagacggcaatttggaggaaatggaagaggaagtacggcttaagaagcgaaaaagacgaagaaatgtggataaagatcctgcaaaagaagatgtggaaaaagctaagaagagaagaggccgccctcccgctgagaaactgtcaccaaatccccccaaactgacaaagcagatgaacgctatcatcgatactgtgataaactacaaagatagttcagggcgacagctcagtgaagtcttcattcagttaccttcaaggaaagaattaccagaatactatgaattaattaggaagccagtggatttcaaaaaaataaaggaaaggattcgtaatcataagtaccggagcctaggcgacctggagaaggatgtcatgcttctctgtcacaacgctcagacgttcaacctggagggatcccagatctatgaagactccatcgtcttacagtcagtgtttaagagtgcccggcagaaaattgccaaagaggaagagagtgaggatgaaagcaatgaagaggaggaagaggaagatgaagaagagtcagagtccgaggcaaaatcagtcaaggtgaaaattaagctcaataaaaaagatgacaaaggccgggacaaagggaaaggcaagaaaaggccaaatcgaggaaaagccaaacctgtagtgagcgattttgacagcgatgaggagcaggatgaacgtgaacagtcagaaggaagtgggacggatgatgagtgatcagtatggacctttttccttggtagaactgaattccttcctcccctgtctcatttctacccagtgagttcatttgtcatataggcactgggttgtttctatatcatcatcgtctataaactagctttaggatagtgccagacaaacatatgatatcatggtgtaaaaaacacacacatacacaaatatttgtaacatattgtgaccaaatgggcctcaaagattcagattgaaacaaacaaaaagcttttgatggaaaatatgtgggtggatagtatatttctatgggtgggtctaatttggtaacggtttgattgtgcctggttttatcacctgttcagatgagaagatttttgtcttttgtagcactgataaccaggagaagccattaaaagccactggttattttatttttcatcaggcaattttcgaggtttttatttgttcggtattgtttttttacactgtggtacatataagcaactttaataggtgataaatgtacagtagttagatttcacctgcatatacatttttccattttatgctctatgatctgaacaaaagctttttgaattgtataagatttatgtctactgtaaacattgcttaatttttttgctcttgatttaaaaaaaagttttgttgaaagcgctattgaatattgcaatctatatagtgtattggatggcttcttttgtcaccctgatctcctatgttaccaatgtgtatcgtctccttctccctaaagtgtacttaatctttgctttctttgcacaatgtctttggttgcaagtcataagcctgaggcaaataaaattccagtaatttcgaagaatgtggtgttggtgctttcctaataaagaaataatttagcttgacaaa

SEQ ID NO: 306316 - DNA, 5930 bp, Homo sapiens
aaaaattttctgttaccaaattttacaacttctaataagactactataactttatgtaaactgatgaagatgtgctgattaacatattctgtgatatggtttacaacttttaatcataattgtccatgattttggaatgctgttatttatcagtaaatgtaaaatatttgaggcatttagccatacacacactagaactttttaaaactttgtcctatagtgtaattataaactgatgactattatcttcatacattgagtcttcatgcatcaatgaaatgaaaaatataggagtagatgtccacgcccacagaccctggtgcgatgccccacccagggccttcgccggggcctgggccttcccctgggccaattcttgggcctagtccaggaccaggaccatccccaggttccgtccacagcatgatggggccaagtcctggacctccaagtgtctcccatcctatgccgacgatggggtccacagacttcccacaggaaggcatgcatcaaatgcataagcccatcgatggtatacatgacaaggggattgtagaagacatccattgtggatccatgaagggcactggtatgcgaccacctcacccaggcatgggccctccccagagtccaatggatcaacacagccaaggttatatgtcaccacacccatctccattaggagccccagagcacgtctccagccctatgtctggaggaggcccaactccacctcagatgccaccaagccagccgggggccctcatcccaggtgatccgcaggccatgagccagcccaacagaggtccctcacctttcagtcctgtccagctgcatcagcttcgagctcagattttagcttataaaatgctggcccgaggccagcccctccccgaaacgctgcagcttgcagtccaggggaaaaggacgttgcctggcttgcagcaacaacagcagcagcaacagcagcagcagcagcagcagcagcagcagcagcagcagcaacagcagccgcagcagcagccgccgcaaccacagacgcagcaacaacagcagccggcccttgttaactacaacagaccatctggcccggggccggagctgagcggcccgagcaccccgcagaagctgccggtgcccgcgcccggcggccggccctcgcccgcgccccccgcagccgcgcagccgcccgcggccgcagtgcccgggccctcagtgccgcagccggccccggggcagccctcgcccgtcctccagctgcagcagaagcagagccgcatcagccccatccagaaaccgcaaggcctggaccccgtggaaattctgcaagagcgggaatacagacttcaggcccgcatagctcataggatacaagaactggaaaatctgcctggctctttgccaccagatttaagaaccaaagcaaccgtggaactaaaagcacttcggttactcaatttccagcgtcagctgagacaggaggtggtggcctgcatgcgcagggacacgaccctggagacggctctcaactccaaagcatacaaacggagcaagcgccagactctgagagaagctcgcatgaccgagaagctggagaagcagcagaagattgagcaggagaggaaacgccgtcagaaacaccaggaatacctgaacagtattttgcaacatgcaaaagattttaaggaatatcatcggtctgtggccggaaagatccagaagctctccaaagcagtggcaacttggcatgccaacactgaaagagagcagaagaaggagacagagcggattgaaaaggagagaatgcggcgactgatggctgaagatgaggagggttatagaaaactgattgatcaaaagaaagacaggcgtttagcttaccttttgcagcagaccgatgagtatgtagccaatctgaccaatctggtttgggagcacaagcaagcccaggcagccaaagagaagaagaagaggaggaggaggaagaagaaggctgaggagaatgcagagggtggggagtctgccctgggaccggatggagagcccatagatgagagcagccagatgagtgacctccctgtcaaagtgactcacacagaaaccggcaaggttctgttcggaccagaagcacccaaagcaagtcagctggacgcctggctggaaatgaatcctggttatgaagttgcccctagatctgacagtgaagagagtgattctgattatgaggaagaggatgaggaagaagagtccagtaggcaggaaaccgaagagaaaatactcctggatccaaatagcgaagaagtttctgagaaggatgctaagcagatcattgagacagctaagcaagacgtggatgatgaatacagcatgcagtacagtgccaggggctcccagtcctactacaccgtggctcatgccatctcggagagggtggagaaacagtctgccctcctaattaatgggaccctaaagcattaccagctccagggcctggaatggatggtttccctgtataataacaacttgaacggaatcttagccgatgaaatggggcttggaaagaccatacagaccattgcactcatcacttatctgatggagcacaaaagactcaatggcccctatctcatcattgttcccctttcgactctatctaactggacatatgaatttgacaaatgggctccttctgtggtgaagatttcttacaagggtactcctgccatgcgtcgctcccttgtcccccagctacggagtggcaaattcaatgtcctcttgactacttatgagtatattataaaagacaagcacattcttgcaaagattcggtggaaatacatgatagtggacgaaggccaccgaatgaagaatcaccactgcaagctgactcaggtcttgaacactcactatgtggcccccagaaggatcctcttgactgggaccccgctgcagaataagctccctgaactctgggccctcctcaacttcctcctcccaacaatttttaagagctgcagcacatttgaacaatggttcaatgctccatttgccatgactggtgaaagggtggacttaaatgaagaagaaactatattgatcatcaggcgtctacataaggtgttaagaccatttttactaaggagactgaagaaagaagttgaatcccagcttcccgaaaaagtggaatatgtgatcaagtgtgacatgtcagctctgcagaagattctgtatcgccatatgcaagccaaggggatccttctcacagatggttctgagaaagataagaaggggaaaggaggtgctaagacacttatgaacactattatgcagttgagaaaaatctgcaaccacccatatatgtttcagcacattgaggaatcctttgctgaacacctaggctattcaaatggggtcatcaatggggctgaactgtatcgggcctcagggaagtttgagctgcttgatcgtattctgccaaaattgagagcgactaatcaccgagtgctgcttttctgccagatgacatctctcatgaccatcatggaggattattttgcttttcggaacttcctttacctacgccttgatggcaccaccaagtctgaagatcgtgctgctttgctgaagaaattcaatgaacctggatcccagtatttcattttcttgctgagcacaagagctggtggcctgggcttaaatcttcaggcagctgatacagtggtcatctttgacagcgactggaatcctcatcaggatctgcaggcccaagaccgagctcaccgcatcgggcagcagaacgaggtccgggtactgaggctctgtaccgtgaacagcgtggaggaaaagatcctcgcggccgcaaaatacaagctgaacgtggatcagaaagtgatccaggcgggcatgtttgaccaaaagtcttcaagccacgagcggagggcattcctgcaggccatcttggagcatgaggaggaaaatgaggaagaagatgaagtaccggacgatgagactctgaaccaaatgattgctcgacgagaagaagaatttgacctttttatgcggatggacatggaccggcggagggaagatgcccggaacccgaaacggaagccccgtttaatggaggaggatgagctgccctcctggatcattaaggatgacgctgaagtagaaaggctcacctgtgaagaagaggaggagaaaatatttgggagggggtcccgccagcgccgtgacgtggactacagtgacgccctcacggagaagcagtggctaagggccatcgaagacggcaatttggaggaaatggaagaggaagtacggcttaagaagcgaaaaagacgaagaaatgtggataaagatcctgcaaaagaagatgtggaaaaagctaagaagagaagaggccgccctcccgctgagaaactgtcaccaaatccccccaaactgacaaagcagatgaacgctatcatcgatactgtgataaactacaaagatagttcagggcgacagctcagtgaagtcttcattcagttaccttcaaggaaagaattaccagaatactatgaattaattaggaagccagtggatttcaaaaaaataaaggaaaggattcgtaatcataagtaccggagcctaggcgacctggagaaggatgtcatgcttctctgtcacaacgctcagacgttcaacctggagggatcccagatctatgaagactccatcgtcttacagtcagtgtttaagagtgcccggcagaaaattgccaaagaggaagagagtgaggatgaaagcaatgaagaggaggaagaggaagatgaagaagagtcagagtccgaggcaaaatcagtcaaggtgaaaattaagctcaataaaaaagatgacaaaggccgggacaaagggaaaggcaagaaaaggccaaatcgaggaaaagccaaacctgtagtgagcgattttgacagcgatgaggagcaggatgaacgtgaacagtcagaaggaagtgggacggatgatgagtgatcagtatggacctttttccttggtagaactgaattccttcctcccctgtctcatttctacccagtgagttcatttgtcatataggcactgggttgtttctatatcatcatcgtctataaactagctttaggatagtgccagacaaacatatgatatcatggtgtaaaaaacacacacatacacaaatatttgtaacatattgtgaccaaatgggcctcaaagattcagattgaaacaaacaaaaagcttttgatggaaaatatgtgggtggatagtatatttctatgggtgggtctaatttggtaacggtttgattgtgcctggttttatcacctgttcagatgagaagatttttgtcttttgtagcactgataaccaggagaagccattaaaagccactggttattttatttttcatcaggcaattttcgaggtttttatttgttcggtattgtttttttacactgtggtacatataagcaactttaataggtgataaatgtacagtagttagatttcacctgcatatacatttttccattttatgctctatgatctgaacaaaagctttttgaattgtataagatttatgtctactgtaaacattgcttaatttttttgctcttgatttaaaaaaaagttttgttgaaagcgctattgaatattgcaatctatatagtgtattggatggcttcttttgtcaccctgatctcctatgttaccaatgtgtatcgtctccttctccctaaagtgtacttaatctttgctttctttgcacaatgtctttggttgcaagtcataagcctgaggcaaataaaattccagtaatttcgaagaatgtggtgttggtgctttcctaataaagaaataatttagcttgacaaaaaaaaaaaaaaaaaaaaaaaaaaaacaca

SEQ ID NO: 306317 - DNA, 5880 bp, Homo sapiens
aaaaattttctgttaccaaattttacaacttctaataagactactataactttatgtaaactgatgaagatgtgctgattaacatattctgtgatatggtttacaacttttaatcataattgtccatgattttggaatgctgttatttatcagtaaatgtaaaatatttgaggcatttagccatacacacactagaactttttaaaactttgtcctatagtgtaattataaactgatgactattatcttcatacattgagtcttcatgcatcaatgaaatgaaaaatataggagtagatgtccacgcccacagaccctggtgcgatgccccacccagggccttcgccggggcctgggccttcccctgggccaattcttgggcctagtccaggaccaggaccatccccaggttccgtccacagcatgatggggccaagtcctggacctccaagtgtctcccatcctatgccgacgatggggtccacagacttcccacaggaaggcatgcatcaaatgcataagcccatcgatggtatacatgacaaggggattgtagaagacatccattgtggatccatgaagggcactggtatgcgaccacctcacccaggcatgggccctccccagagtccaatggatcaacacagccaaggttatatgtcaccacacccatctccattaggagccccagagcacgtctccagccctatgtctggaggaggcccaactccacctcagatgccaccaagccagccgggggccctcatcccaggtgatccgcaggccatgagccagcccaacagaggtccctcacctttcagtcctgtccagctgcatcagcttcgagctcagattttagcttataaaatgctggcccgaggccagcccctccccgaaacgctgcagcttgcagtccaggggaaaaggacgttgcctggcttgcagcaacaacagcagcagcaacagcagcagcagcagcagcagcagcagcagcagcagcagcaacagcagccgcagcagcagccgccgcaaccacagacgcagcaacaacagcagccggcccttgttaactacaacagaccatctggcccggggccggagctgagcggcccgagcaccccgcagaagctgccggtgcccgcgcccggcggccggccctcgcccgcgccccccgcagccgcgcagccgcccgcggccgcagtgcccgggccctcagtgccgcagccggccccggggcagccctcgcccgtcctccagctgcagcagaagcagagccgcatcagccccatccagaaaccgcaaggcctggaccccgtggaaattctgcaagagcgggaatacagacttcaggcccgcatagctcataggatacaagaactggaaaatctgcctggctctttgccaccagatttaagaaccaaagcaaccgtggaactaaaagcacttcggttactcaatttccagcgtcagctgagacaggaggtggtggcctgcatgcgcagggacacgaccctggagacggctctcaactccaaagcatacaaacggagcaagcgccagactctgagagaagctcgcatgaccgagaagctggagaagcagcagaagattgagcaggagaggaaacgccgtcagaaacaccaggaatacctgaacagtattttgcaacatgcaaaagattttaaggaatatcatcggtctgtggccggaaagatccagaagctctccaaagcagtggcaacttggcatgccaacactgaaagagagcagaagaaggagacagagcggattgaaaaggagagaatgcggcgactgatggctgaagatgaggagggttatagaaaactgattgatcaaaagaaagacaggcgtttagcttaccttttgcagcagaccgatgagtatgtagccaatctgaccaatctggtttgggagcacaagcaagcccaggcagccaaagagaagaagaagaggaggaggaggaagaagaaggctgaggagaatgcagagggtggggagtctgccctgggaccggatggagagcccatagatgagagcagccagatgagtgacctccctgtcaaagtgactcacacagaaaccggcaaggttctgttcggaccagaagcacccaaagcaagtcagctggacgcctggctggaaatgaatcctggttatgaagttgcccctagatctgacagtgaagagagtgattctgattatgaggaagaggatgaggaagaagagtccagtaggcaggaaaccgaagagaaaatactcctggatccaaatagcgaagaagtttctgagaaggatgctaagcagatcattgagacagctaagcaagacgtggatgatgaatacagcatgcagtacagtgccaggggctcccagtcctactacaccgtggctcatgccatctcggagagggtggagaaacagtctgccctcctaattaatgggaccctaaagcattaccagctccagggcctggaatggatggtttccctgtataataacaacttgaacggaatcttagccgatgaaatggggcttggaaagaccatacagaccattgcactcatcacttatctgatggagcacaaaagactcaatggcccctatctcatcattgttcccctttcgactctatctaactggacatatgaatttgacaaatgggctccttctgtggtgaagatttcttacaagggtactcctgccatgcgtcgctcccttgtcccccagctacggagtggcaaattcaatgtcctcttgactacttatgagtatattataaaagacaagcacattcttgcaaagattcggtggaaatacatgatagtggacgaaggccaccgaatgaagaatcaccactgcaagctgactcaggtcttgaacactcactatgtggcccccagaaggatcctcttgactgggaccccgctgcagaataagctccctgaactctgggccctcctcaacttcctcctcccaacaatttttaagagctgcagcacatttgaacaatggttcaatgctccatttgccatgactggtgaaagggtggacttaaatgaagaagaaactatattgatcatcaggcgtctacataaggtgttaagaccatttttactaaggagactgaagaaagaagttgaatcccagcttcccgaaaaagtggaatatgtgatcaagtgtgacatgtcagctctgcagaagattctgtatcgccatatgcaagccaaggggatccttctcacagatggttctgagaaagataagaaggggaaaggaggtgctaagacacttatgaacactattatgcagttgagaaaaatctgcaaccacccatatatgtttcagcacattgaggaatcctttgctgaacacctaggctattcaaatggggtcatcaatggggctgaactgtatcgggcctcagggaagtttgagctgcttgatcgtattctgccaaaattgagagcgactaatcaccgagtgctgcttttctgccagatgacatctctcatgaccatcatggaggattattttgcttttcggaacttcctttacctacgccttgatggcaccaccaagtctgaagatcgtgctgctttgctgaagaaattcaatgaacctggatcccagtatttcattttcttgctgagcacaagagctggtggcctgggcttaaatcttcaggcagctgatacagtggtcatctttgacagcgactggaatcctcatcaggatctgcaggcccaagaccgagctcaccgcatcgggcagcagaacgaggtccgggtactgaggctctgtaccgtgaacagcgtggaggaaaagatcctcgcggccgcaaaatacaagctgaacgtggatcagaaagtgatccaggcgggcatgtttgaccaaaagtcttcaagccacgagcggagggcattcctgcaggccatcttggagcatgaggaggaaaatgaggaagaagatgaagtaccggacgatgagactctgaaccaaatgattgctcgacgagaagaagaatttgacctttttatgcggatggacatggaccggcggagggaagatgcccggaacccgaaacggaagccccgtttaatggaggaggatgagctgccctcctggatcattaaggatgacgctgaagtagaaaggctcacctgtgaagaagaggaggagaaaatatttgggagggggtcccgccagcgccgtgacgtggactacagtgacgccctcacggagaagcagtggctaagggccatcgaagacggcaatttggaggaaatggaagaggaagtacggcttaagaagcgaaaaagacgaagaaatgtggataaagatcctgcaaaagaagatgtggaaaaagctaagaagagaagaggccgccctcccgctgagaaactgtcaccaaatccccccaaactgacaaagcagatgaacgctatcatcgatactgtgataaactacaaagatagttcagggcgacagctcagtgaagtcttcattcagttaccttcaaggaaagaattaccagaatactatgaattaattaggaagccagtggatttcaaaaaaataaaggaaaggattcgtaatcataagtaccggagcctaggcgacctggagaaggatgtcatgcttctctgtcacaacgctcagacgttcaacctggagggatcccagatctatgaagactccatcgtcttacagtcagtgtttaagagtgcccggcagaaaattgccaaagaggaagagagtgaggatgaaagcaatgaagaggaggaagaggaagatgaagaagagtcagagtccgaggcaaaatcagtcaaggtgaaaattaagctcaataaaaaagatgacaaaggccgggacaaagggaaaggcaagaaaaggccaaatcgaggaaaagccaaacctgtagtgagcgattttgacagcgatgaggagcaggatgaacgtgaacagtcagaaggaagtgggacggatgatgagtgatcagtatggacctttttccttggtagaactgaattccttcctcccctgtctcatttctacccagtgagttcatttgtcatataggcactgggttgtttctatatcatcatcgtctataaactagctttaggatagtgccagacaaacatatgatatcatggtgtaaaaaacacacacatacacaaatatttgtaacatattgtgaccaaatgggcctcaaagattcagattgaaacaaacaaaaagcttttgatggaaaatatgtgggtggatagtatatttctatgggtgggtctaatttggtaacggtttgattgtgcctggttttatcacctgttcagatgagaagatttttgtcttttgtagcactgataaccaggagaagccattaaaagccactggttattttatttttcatcaggcaattttcgaggtttttatttgttcggtattgtttttttacactgtggtacatataagcaactttaataggtgataaatgtacagtagttagatttcacctgcatatacatttttccattttatgctctatgatctgaacaaaagctttttgaattgtataagatttatgtctactgtaaacattgcttaatttttttgctcttgatttaaaaaaaagttttgttgaaagcgctattgaatattgcaatctatatagtgtattggatggcttcttttgtcaccctgatctcctatgttaccaatgtgtatcgtctccttctccctaaagtgtacttaatctttgctttctttgcacaatgtctttggttgcaagtcataagcctgaggcaaataaaattccagtaatttcgaaaaaaaaaaaaaaaaaaaaaaaaaaacaca

SEQ ID NO: 306318 - DNA, 5796 bp, Homo sapiens
aaaaattttctgttaccaaattttacaacttctaataagactactataactttatgtaaactgatgaagatgtgctgattaacatattctgtgatatggtttacaacttttaatcataattgtccatgattttggaatgctgttatttatcagtaaatgtaaaatatttgaggcatttagccatacacacactagaactttttaaaactttgtcctatagtgtaattataaactgatgactattatcttcatacattgagtcttcatgcatcaatgaaatgaaaaatataggagtagatgtccacgcccacagaccctggtgcgatgccccacccagggccttcgccggggcctgggccttcccctgggccaattcttgggcctagtccaggaccaggaccatccccaggttccgtccacagcatgatggggccaagtcctggacctccaagtgtctcccatcctatgccgacgatggggtccacagacttcccacaggaaggcatgcatcaaatgcataagcccatcgatggtatacatgacaaggggattgtagaagacatccattgtggatccatgaagggcactggtatgcgaccacctcacccaggcatgggccctccccagagtccaatggatcaacacagccaaggttatatgtcaccacacccatctccattaggagccccagagcacgtctccagccctatgtctggaggaggcccaactccacctcagatgccaccaagccagccgggggccctcatcccaggtgatccgcaggccatgagccagcccaacagaggtccctcacctttcagtcctgtccagctgcatcagcttcgagctcagattttagcttataaaatgctggcccgaggccagcccctccccgaaacgctgcagcttgcagtccaggggaaaaggacgttgcctggcttgcagcaacaacagcagcagcaacagcagcagcagcagcagcagcagcagcagcagcagcagcaacagcagccgcagcagcagccgccgcaaccacagacgcagcaacaacagcagccggcccttgttaactacaacagaccatctggcccggggccggagctgagcggcccgagcaccccgcagaagctgccggtgcccgcgcccggcggccggccctcgcccgcgccccccgcagccgcgcagccgcccgcggccgcagtgcccgggccctcagtgccgcagccggccccggggcagccctcgcccgtcctccagctgcagcagaagcagagccgcatcagccccatccagaaaccgcaaggcctggaccccgtggaaattctgcaagagcgggaatacagacttcaggcccgcatagctcataggatacaagaactggaaaatctgcctggctctttgccaccagatttaagaaccaaagcaaccgtggaactaaaagcacttcggttactcaatttccagcgtcagctgagacaggaggtggtggcctgcatgcgcagggacacgaccctggagacggctctcaactccaaagcatacaaacggagcaagcgccagactctgagagaagctcgcatgaccgagaagctggagaagcagcagaagattgagcaggagaggaaacgccgtcagaaacaccaggaatacctgaacagtattttgcaacatgcaaaagattttaaggaatatcatcggtctgtggccggaaagatccagaagctctccaaagcagtggcaacttggcatgccaacactgaaagagagcagaagaaggagacagagcggattgaaaaggagagaatgcggcgactgatggctgaagatgaggagggttatagaaaactgattgatcaaaagaaagacaggcgtttagcttaccttttgcagcagaccgatgagtatgtagccaatctgaccaatctggtttgggagcacaagcaagcccaggcagccaaagagaagaagaagaggaggaggaggaagaagaaggctgaggagaatgcagagggtggggagtctgccctgggaccggatggagagcccatagatgagagcagccagatgagtgacctccctgtcaaagtgactcacacagaaaccggcaaggttctgttcggaccagaagcacccaaagcaagtcagctggacgcctggctggaaatgaatcctggttatgaagttgcccctagatctgacagtgaagagagtgattctgattatgaggaagaggatgaggaagaagagtccagtaggcaggaaaccgaagagaaaatactcctggatccaaatagcgaagaagtttctgagaaggatgctaagcagatcattgagacagctaagcaagacgtggatgatgaatacagcatgcagtacagtgccaggggctcccagtcctactacaccgtggctcatgccatctcggagagggtggagaaacagtctgccctcctaattaatgggaccctaaagcattaccagctccagggcctggaatggatggtttccctgtataataacaacttgaacggaatcttagccgatgaaatggggcttggaaagaccatacagaccattgcactcatcacttatctgatggagcacaaaagactcaatggcccctatctcatcattgttcccctttcgactctatctaactggacatatgaatttgacaaatgggctccttctgtggtgaagatttcttacaagggtactcctgccatgcgtcgctcccttgtcccccagctacggagtggcaaattcaatgtcctcttgactacttatgagtatattataaaagacaagcacattcttgcaaagattcggtggaaatacatgatagtggacgaaggccaccgaatgaagaatcaccactgcaagctgactcaggtcttgaacactcactatgtggcccccagaaggatcctcttgactgggaccccgctgcagaataagctccctgaactctgggccctcctcaacttcctcctcccaacaatttttaagagctgcagcacatttgaacaatggttcaatgctccatttgccatgactggtgaaagggtggacttaaatgaagaagaaactatattgatcatcaggcgtctacataaggtgttaagaccatttttactaaggagactgaagaaagaagttgaatcccagcttcccgaaaaagtggaatatgtgatcaagtgtgacatgtcagctctgcagaagattctgtatcgccatatgcaagccaaggggatccttctcacagatggttctgagaaagataagaaggggaaaggaggtgctaagacacttatgaacactattatgcagttgagaaaaatctgcaaccacccatatatgtttcagcacattgaggaatcctttgctgaacacctaggctattcaaatggggtcatcaatggggctgaactgtatcgggcctcagggaagtttgagctgcttgatcgtattctgccaaaattgagagcgactaatcaccgagtgctgcttttctgccagatgacatctctcatgaccatcatggaggattattttgcttttcggaacttcctttacctacgccttgatggcaccaccaagtctgaagatcgtgctgctttgctgaagaaattcaatgaacctggatcccagtatttcattttcttgctgagcacaagagctggtggcctgggcttaaatcttcaggcagctgatacagtggtcatctttgacagcgactggaatcctcatcaggatctgcaggcccaagaccgagctcaccgcatcgggcagcagaacgaggtccgggtactgaggctctgtaccgtgaacagcgtggaggaaaagatcctcgcggccgcaaaatacaagctgaacgtggatcagaaagtgatccaggcgggcatgtttgaccaaaagtcttcaagccacgagcggagggcattcctgcaggccatcttggagcatgaggaggaaaatgaggaagaagatgaagtaccggacgatgagactctgaaccaaatgattgctcgacgagaagaagaatttgacctttttatgcggatggacatggaccggcggagggaagatgcccggaacccgaaacggaagccccgtttaatggaggaggatgagctgccctcctggatcattaaggatgacgctgaagtagaaaggctcacctgtgaagaagaggaggagaaaatatttgggagggggtcccgccagcgccgtgacgtggactacagtgacgccctcacggagaagcagtggctaagggccatcgaagacggcaatttggaggaaatggaagaggaagtacggcttaagaagcgaaaaagacgaagaaatgtggataaagatcctgcaaaagaagatgtggaaaaagctaagaagagaagaggccgccctcccgctgagaaactgtcaccaaatccccccaaactgacaaagcagatgaacgctatcatcgatactgtgataaactacaaagatagttcagggcgacagctcagtgaagtcttcattcagttaccttcaaggaaagaattaccagaatactatgaattaattaggaagccagtggatttcaaaaaaataaaggaaaggattcgtaatcataagtaccggagcctaggcgacctggagaaggatgtcatgcttctctgtcacaacgctcagacgttcaacctggagggatcccagatctatgaagactccatcgtcttacagtcagtgtttaagagtgcccggcagaaaattgccaaagaggaagagagtgaggatgaaagcaatgaagaggaggaagaggaagatgaagaagagtcagagtccgaggcaaaatcagtcaaggtgaaaattaagctcaataaaaaagatgacaaaggccgggacaaagggaaaggcaagaaaaggccaaatcgaggaaaagccaaacctgtagtgagcgattttgacagcgatgaggagcaggatgaacgtgaacagtcagaaggaagtgggacggatgatgagtgatcagtatggacctttttccttggtagaactgaattccttcctcccctgtctcatttctacccagtgagttcatttgtcatataggcactgggttgtttctatatcatcatcgtctataaactagctttaggatagtgccagacaaacatatgatatcatggtgtaaaaaacacacacatacacaaatatttgtaacatattgtgaccaaatgggcctcaaagattcagattgaaacaaacaaaaagcttttgatggaaaatatgtgggtggatagtatatttctatgggtgggtctaatttggtaacggtttgattgtgcctggttttatcacctgttcagatgagaagatttttgtcttttgtagcactgataaccaggagaagccattaaaagccactggttattttatttttcatcaggcaattttcgaggtttttatttgttcggtattgtttttttacactgtggtacatataagcaactttaataggtgataaatgtacagtagttagatttcacctgcatatacatttttccattttatgctctatgatctgaacaaaagctttttgaattgtataagatttatgtctactgtaaacattgcttaatttttttgctcttgatttaaaagcttcttttgtcaccctgatctcctatgttaccaatgtgtatcgtctccttctccctaaagtgtacttaatctttgctttctttgcacaatgtctttggttgcaagtcataagcctgaggcaaataaaattccagtaatttcgaa

SEQ ID NO: 306319 - DNA, 6716 bp, Homo sapiens
gtagaaaataagagatttattcccctttttaaatcaaaaccagattccatgcttcagccgccccctaacccgccagccccgcccccagggtttgtttttccatatttttgtatatattttagcgaagatggcaggtgagggaaggttatagtgctgtacctagtccacgaagtaaacagagaggttagggtgggtttacttatttataaggcgttcagcctctcagctgtttctccctcgttggcatttggaagcttgcagtccttcagggaagagacagatttggcaggaacgttctttgtgcccgcctcccttttctattttttatttttttacctggaatagggggcagatttataatgacagccttagggaagggggagaaaaagtttcagccggcacgacaatgcccgttttttccacagtccacactgtgccacaaacagctttggtgccactcggagcccgtcccccgtcccctccctctctctctgcaggctcgcactggcaggcggaggcacagttaaattccagcaccttctccacatacccccgaactactacgcgctattactacggctgccctccgttttcgcttcgcctcctccccttccgcagtctccctggaggagccccgcggcgcccgaggaagaggactgccagggaagggacagcgggcgcccagctccagcagggcttggggctttctgcatcccgcgcagtttctctgctccaggcacaaacgcggcccgagagccggcgccttgcagtcacacacggatccacgcatacagtagagctgtctagatccacattcttgcacaccgccccctcctccccccgcgctcccggagtcgctgagctgagcgagtgacaggcgcgtcccgccaacccgcgcccggacgggcagggaggagcggcgcgcggggccaactgcggcgcgtcttccggcgcccgcggaggaggcgagggtgggacgctgggcggagcccgagtttaggaagaggaggggacggctgtcatcaatgaagtcatattcataatctagtcctctctccctctgtttctgtactctgggtgactcagagagggaagagattcagccagcacactcctcgcgagcaagcattactctactgactggcagagacaggagaggtagatgtccacgcccacagaccctggtgcgatgccccacccagggccttcgccggggcctgggccttcccctgggccaattcttgggcctagtccaggaccaggaccatccccaggttccgtccacagcatgatggggccaagtcctggacctccaagtgtctcccatcctatgccgacgatggggtccacagacttcccacaggaaggcatgcatcaaatgcataagcccatcgatggtatacatgacaaggggattgtagaagacatccattgtggatccatgaagggcactggtatgcgaccacctcacccaggcatgggccctccccagagtccaatggatcaacacagccaaggttatatgtcaccacacccatctccattaggagccccagagcacgtctccagccctatgtctggaggaggcccaactccacctcagatgccaccaagccagccgggggccctcatcccaggtgatccgcaggccatgagccagcccaacagaggtccctcacctttcagtcctgtccagctgcatcagcttcgagctcagattttagcttataaaatgctggcccgaggccagcccctccccgaaacgctgcagcttgcagtccaggggaaaaggacgttgcctggcttgcagcaacaacagcagcagcaacagcagcagcagcagcagcagcagcagcagcagcagcagcaacagcagccgcagcagcagccgccgcaaccacagacgcagcaacaacagcagccggcccttgttaactacaacagaccatctggcccggggccggagctgagcggcccgagcaccccgcagaagctgccggtgcccgcgcccggcggccggccctcgcccgcgccccccgcagccgcgcagccgcccgcggccgcagtgcccgggccctcagtgccgcagccggccccggggcagccctcgcccgtcctccagctgcagcagaagcagagccgcatcagccccatccagaaaccgcaaggcctggaccccgtggaaattctgcaagagcgggaatacagacttcaggcccgcatagctcataggatacaagaactggaaaatctgcctggctctttgccaccagatttaagaaccaaagcaaccgtggaactaaaagcacttcggttactcaatttccagcgtcagctgagacaggaggtggtggcctgcatgcgcagggacacgaccctggagacggctctcaactccaaagcatacaaacggagcaagcgccagactctgagagaagctcgcatgaccgagaagctggagaagcagcagaagattgagcaggagaggaaacgccgtcagaaacaccaggaatacctgaacagtattttgcaacatgcaaaagattttaaggaatatcatcggtctgtggccggaaagatccagaagctctccaaagcagtggcaacttggcatgccaacactgaaagagagcagaagaaggagacagagcggattgaaaaggagagaatgcggcgactgatggctgaagatgaggagggttatagaaaactgattgatcaaaagaaagacaggcgtttagcttaccttttgcagcagaccgatgagtatgtagccaatctgaccaatctggtttgggagcacaagcaagcccaggcagccaaagagaagaagaagaggaggaggaggaagaagaaggctgaggagaatgcagagggtggggagtctgccctgggaccggatggagagcccatagatgagagcagccagatgagtgacctccctgtcaaagtgactcacacagaaaccggcaaggttctgttcggaccagaagcacccaaagcaagtcagctggacgcctggctggaaatgaatcctggttatgaagttgcccctagatctgacagtgaagagagtgattctgattatgaggaagaggatgaggaagaagagtccagtaggcaggaaaccgaagagaaaatactcctggatccaaatagcgaagaagtttctgagaaggatgctaagcagatcattgagacagctaagcaagacgtggatgatgaatacagcatgcagtacagtgccaggggctcccagtcctactacaccgtggctcatgccatctcggagagggtggagaaacagtctgccctcctaattaatgggaccctaaagcattaccagctccagggcctggaatggatggtttccctgtataataacaacttgaacggaatcttagccgatgaaatggggcttggaaagaccatacagaccattgcactcatcacttatctgatggagcacaaaagactcaatggcccctatctcatcattgttcccctttcgactctatctaactggacatatgaatttgacaaatgggctccttctgtggtgaagatttcttacaagggtactcctgccatgcgtcgctcccttgtcccccagctacggagtggcaaattcaatgtcctcttgactacttatgagtatattataaaagacaagcacattcttgcaaagattcggtggaaatacatgatagtggacgaaggccaccgaatgaagaatcaccactgcaagctgactcaggtcttgaacactcactatgtggcccccagaaggatcctcttgactgggaccccgctgcagaataagctccctgaactctgggccctcctcaacttcctcctcccaacaatttttaagagctgcagcacatttgaacaatggttcaatgctccatttgccatgactggtgaaagggtggacttaaatgaagaagaaactatattgatcatcaggcgtctacataaggtgttaagaccatttttactaaggagactgaagaaagaagttgaatcccagcttcccgaaaaagtggaatatgtgatcaagtgtgacatgtcagctctgcagaagattctgtatcgccatatgcaagccaaggggatccttctcacagatggttctgagaaagataagaaggggaaaggaggtgctaagacacttatgaacactattatgcagttgagaaaaatctgcaaccacccatatatgtttcagcacattgaggaatcctttgctgaacacctaggctattcaaatggggtcatcaatggggctgaactgtatcgggcctcagggaagtttgagctgcttgatcgtattctgccaaaattgagagcgactaatcaccgagtgctgcttttctgccagatgacatctctcatgaccatcatggaggattattttgcttttcggaacttcctttacctacgccttgatggcaccaccaagtctgaagatcgtgctgctttgctgaagaaattcaatgaacctggatcccagtatttcattttcttgctgagcacaagagctggtggcctgggcttaaatcttcaggcagctgatacagtggtcatctttgacagcgactggaatcctcatcaggatctgcaggcccaagaccgagctcaccgcatcgggcagcagaacgaggtccgggtactgaggctctgtaccgtgaacagcgtggaggaaaagatcctcgcggccgcaaaatacaagctgaacgtggatcagaaagtgatccaggcgggcatgtttgaccaaaagtcttcaagccacgagcggagggcattcctgcaggccatcttggagcatgaggaggaaaatgaggaagaagatgaagtaccggacgatgagactctgaaccaaatgattgctcgacgagaagaagaatttgacctttttatgcggatggacatggaccggcggagggaagatgcccggaacccgaaacggaagccccgtttaatggaggaggatgagctgccctcctggatcattaaggatgacgctgaagtagaaaggctcacctgtgaagaagaggaggagaaaatatttgggagggggtcccgccagcgccgtgacgtggactacagtgacgccctcacggagaagcagtggctaagggccatcgaagacggcaatttggaggaaatggaagaggaagtacggcttaagaagcgaaaaagacgaagaaatgtggataaagatcctgcaaaagaagatgtggaaaaagctaagaagagaagaggccgccctcccgctgagaaactgtcaccaaatccccccaaactgacaaagcagatgaacgctatcatcgatactgtgataaactacaaagatagttcagggcgacagctcagtgaagtcttcattcagttaccttcaaggaaagaattaccagaatactatgaattaattaggaagccagtggatttcaaaaaaataaaggaaaggattcgtaatcataagtaccggagcctaggcgacctggagaaggatgtcatgcttctctgtcacaacgctcagacgttcaacctggagggatcccagatctatgaagactccatcgtcttacagtcagtgtttaagagtgcccggcagaaaattgccaaagaggaagagagtgaggatgaaagcaatgaagaggaggaagaggaagatgaagaagagtcagagtccgaggcaaaatcagtcaaggtgaaaattaagctcaataaaaaagatgacaaaggccgggacaaagggaaaggcaagaaaaggccaaatcgaggaaaagccaaacctgtagtgagcgattttgacagcgatgaggagcaggatgaacgtgaacagtcagaaggaagtgggacggatgatgagtgatcagtatggacctttttccttggtagaactgaattccttcctcccctgtctcatttctacccagtgagttcatttgtcatataggcactgggttgtttctatatcatcatcgtctataaactagctttaggatagtgccagacaaacatatgatatcatggtgtaaaaaacacacacatacacaaatatttgtaacatattgtgaccaaatgggcctcaaagattcagattgaaacaaacaaaaagcttttgatggaaaatatgtgggtggatagtatatttctatgggtgggtctaatttggtaacggtttgattgtgcctggttttatcacctgttcagatgagaagatttttgtcttttgtagcactgataaccaggagaagccattaaaagccactggttattttatttttcatcaggcaattttcgaggtttttatttgttcggtattgtttttttacactgtggtacatataagcaactttaataggtgataaatgtacagtagttagatttcacctgcatatacatttttccattttatgctctatgatctgaacaaaagctttttgaattgtataagatttatgtctactgtaaacattgcttaatttttttgctcttgatttaaaaaaaagttttgttgaaagcgctattgaatattgcaatctatatagtgtattggatggcttcttttgtcaccctgatctcctatgttaccaatgtgtatcgtctccttctccctaaagtgtacttaatctttgctttctttgcacaatgtctttggttgcaagtcataagcctgaggcaaataaaattccagtaatttcgaa

SEQ ID NO: 306320 - DNA, 6462 bp, Homo sapiens
gtagaaaataagagatttattcccctttttaaatcaaaaccagattccatgcttcagccgccccctaacccgccagccccgcccccagggtttgtttttccatatttttgtatatattttagcgaagatggcaggtgagggaaggttatagtgctgtacctagtccacgaagtaaacagagaggttagggtgggtttacttatttataaggcgttcagcctctcagctgtttctccctcgttggcatttggaagcttgcagtccttcagggaagagacagatttggcaggaacgttctttgtgcccgcctcccttttctattttttatttttttacctggaatagggggcagatttataatgacagccttagggaagggggagaaaaagtttcagccggcacgacaatgcccgttttttccacagtccacactgtgccacaaacagctttggtgccactcggagcccgtcccccgtcccctccctctctctctgcaggctcgcactggcaggcggaggcacagttaaattccagcaccttctccacatacccccgaactactacgcgctattactacggctgccctccgttttcgcttcgcctcctccccttccgcagtctccctggaggagccccgcggcgcccgaggaagaggactgccagggaagggacagcgggcgcccagctccagcagggcttggggctttctgcatcccgcgcagtttctctgctccaggcacaaacgcggcccgagagccggcgccttgcagtcacacacggatccacgcatacagtagagctgtctagatccacattcttgcacaccgccccctcctccccccgcgctcccggagtcgctgagctgagcgagtgacaggcgcgtcccgccaacccgcgcccggacgggcagggaggagcggcgcgcggggccaactgcggcgcgtcttccggcgcccgcggaggaggcgagggtgggacgctgggcggagcccgagtttaggaagaggaggggacggctgtcatcaatgaagtcatattcataatctagtcctctctccctctgtttctgtactctgggtgactcagagagggaagagattcagccagcacactcctcgcgagcaagcattactctactgactggcagagacaggagaggtagatgtccacgcccacagaccctggtgcgatgccccacccagggccttcgccggggcctgggccttcccctgggccaattcttgggcctagtccaggaccaggaccatccccaggttccgtccacagcatgatggggccaagtcctggacctccaagtgtctcccatcctatgccgacgatggggtccacagacttcccacaggaaggcatgcatcaaatgcataagcccatcgatggtatacatgacaaggggattgtagaagacatccattgtggatccatgaagggcactggtatgcgaccacctcacccaggcatgggccctccccagagtccaatggatcaacacagccaaggttatatgtcaccacacccatctccattaggagccccagagcacgtctccagccctatgtctggaggaggcccaactccacctcagatgccaccaagccagccgggggccctcatcccaggtgatccgcaggccatgagccagcccaacagaggtccctcacctttcagtcctgtccagctgcatcagcttcgagctcagattttagcttataaaatgctggcccgaggccagcccctccccgaaacgctgcagcttgcagtccaggggaaaaggacgttgcctggcttgcagcaacaacagcagcagcaacagcagcagcagcagcagcagcagcagcagcagcagcagcaacagcagccgcagcagcagccgccgcaaccacagacgcagcaacaacagcagccggcccttgttaactacaacagaccatctggcccggggccggagctgagcggcccgagcaccccgcagaagctgccggtgcccgcgcccggcggccggccctcgcccgcgccccccgcagccgcgcagccgcccgcggccgcagtgcccgggccctcagtgccgcagccggccccggggcagccctcgcccgtcctccagctgcagcagaagcagagccgcatcagccccatccagaaaccgcaaggcctggaccccgtggaaattctgcaagagcgggaatacagacttcaggcccgcatagctcataggatacaagaactggaaaatctgcctggctctttgccaccagatttaagaaccaaagcaaccgtggaactaaaagcacttcggttactcaatttccagcgtcagctgagacaggaggtggtggcctgcatgcgcagggacacgaccctggagacggctctcaactccaaagcatacaaacggagcaagcgccagactctgagagaagctcgcatgaccgagaagctggagaagcagcagaagattgagcaggagaggaaacgccgtcagaaacaccaggaatacctgaacagtattttgcaacatgcaaaagattttaaggaatatcatcggtctgtggccggaaagatccagaagctctccaaagcagtggcaacttggcatgccaacactgaaagagagcagaagaaggagacagagcggattgaaaaggagagaatgcggcgactgatggctgaagatgaggagggttatagaaaactgattgatcaaaagaaagacaggcgtttagcttaccttttgcagcagaccgatgagtatgtagccaatctgaccaatctggtttgggagcacaagcaagcccaggcagccaaagagaagaagaagaggaggaggaggaagaagaaggctgaggagaatgcagagggtggggagtctgccctgggaccggatggagagcccatagatgagagcagccagatgagtgacctccctgtcaaagtgactcacacagaaaccggcaaggttctgttcggaccagaagcacccaaagcaagtcagctggacgcctggctggaaatgaatcctggttatgaagttgcccctagatctgacagtgaagagagtgattctgattatgaggaagaggatgaggaagaagagtccagtaggcaggaaaccgaagagaaaatactcctggatccaaatagcgaagaagtttctgagaaggatgctaagcagatcattgagacagctaagcaagacgtggatgatgaatacagcatgcagtacagtgccaggggctcccagtcctactacaccgtggctcatgccatctcggagagggtggagaaacagtctgccctcctaattaatgggaccctaaagcattaccagctccagggcctggaatggatggtttccctgtataataacaacttgaacggaatcttagccgatgaaatggggcttggaaagaccatacagaccattgcactcatcacttatctgatggagcacaaaagactcaatggcccctatctcatcattgttcccctttcgactctatctaactggacatatgaatttgacaaatgggctccttctgtggtgaagatttcttacaagggtactcctgccatgcgtcgctcccttgtcccccagctacggagtggcaaattcaatgtcctcttgactacttatgagtatattataaaagacaagcacattcttgcaaagattcggtggaaatacatgatagtggacgaaggccaccgaatgaagaatcaccactgcaagctgactcaggtcttgaacactcactatgtggcccccagaaggatcctcttgactgggaccccgctgcagaataagctccctgaactctgggccctcctcaacttcctcctcccaacaatttttaagagctgcagcacatttgaacaatggttcaatgctccatttgccatgactggtgaaagggtggacttaaatgaagaagaaactatattgatcatcaggcgtctacataaggtgttaagaccatttttactaaggagactgaagaaagaagttgaatcccagcttcccgaaaaagtggaatatgtgatcaagtgtgacatgtcagctctgcagaagattctgtatcgccatatgcaagccaaggggatccttctcacagatgacatctctcatgaccatcatggaggattattttgcttttcggaacttcctttacctacgccttgatggcaccaccaagtctgaagatcgtgctgctttgctgaagaaattcaatgaacctggatcccagtatttcattttcttgctgagcacaagagctggtggcctgggcttaaatcttcaggcagctgatacagtggtcatctttgacagcgactggaatcctcatcaggatctgcaggcccaagaccgagctcaccgcatcgggcagcagaacgaggtccgggtactgaggctctgtaccgtgaacagcgtggaggaaaagatcctcgcggccgcaaaatacaagctgaacgtggatcagaaagtgatccaggcgggcatgtttgaccaaaagtcttcaagccacgagcggagggcattcctgcaggccatcttggagcatgaggaggaaaatgaggaagaagatgaagtaccggacgatgagactctgaaccaaatgattgctcgacgagaagaagaatttgacctttttatgcggatggacatggaccggcggagggaagatgcccggaacccgaaacggaagccccgtttaatggaggaggatgagctgccctcctggatcattaaggatgacgctgaagtagaaaggctcacctgtgaagaagaggaggagaaaatatttgggagggggtcccgccagcgccgtgacgtggactacagtgacgccctcacggagaagcagtggctaagggccatcgaagacggcaatttggaggaaatggaagaggaagtacggcttaagaagcgaaaaagacgaagaaatgtggataaagatcctgcaaaagaagatgtggaaaaagctaagaagagaagaggccgccctcccgctgagaaactgtcaccaaatccccccaaactgacaaagcagatgaacgctatcatcgatactgtgataaactacaaagatagttcagggcgacagctcagtgaagtcttcattcagttaccttcaaggaaagaattaccagaatactatgaattaattaggaagccagtggatttcaaaaaaataaaggaaaggattcgtaatcataagtaccggagcctaggcgacctggagaaggatgtcatgcttctctgtcacaacgctcagacgttcaacctggagggatcccagatctatgaagactccatcgtcttacagtcagtgtttaagagtgcccggcagaaaattgccaaagaggaagagagtgaggatgaaagcaatgaagaggaggaagaggaagatgaagaagagtcagagtccgaggcaaaatcagtcaaggtgaaaattaagctcaataaaaaagatgacaaaggccgggacaaagggaaaggcaagaaaaggccaaatcgaggaaaagccaaacctgtagtgagcgattttgacagcgatgaggagcaggatgaacgtgaacagtcagaaggaagtgggacggatgatgagtgatcagtatggacctttttccttggtagaactgaattccttcctcccctgtctcatttctacccagtgagttcatttgtcatataggcactgggttgtttctatatcatcatcgtctataaactagctttaggatagtgccagacaaacatatgatatcatggtgtaaaaaacacacacatacacaaatatttgtaacatattgtgaccaaatgggcctcaaagattcagattgaaacaaacaaaaagcttttgatggaaaatatgtgggtggatagtatatttctatgggtgggtctaatttggtaacggtttgattgtgcctggttttatcacctgttcagatgagaagatttttgtcttttgtagcactgataaccaggagaagccattaaaagccactggttattttatttttcatcaggcaattttcgaggtttttatttgttcggtattgtttttttacactgtggtacatataagcaactttaataggtgataaatgtacagtagttagatttcacctgcatatacatttttccattttatgctctatgatctgaacaaaagctttttgaattgtataagatttatgtctactgtaaacattgcttaatttttttgctcttgatttaaaaaaaagttttgttgaaagcgctattgaatattgcaatctatatagtgtattggatggcttcttttgtcaccctgatctcctatgttaccaatgtgtatcgtctccttctccctaaagtgtacttaatctttgctttctttgcacaatgtctttggttgcaagtcataagcctgaggcaaataaaattccagtaatttcgaa

SEQ ID NO: 306321 - DNA, 4259 bp, Homo sapiens
tactgaggggacatatcctagggttttcaaataaaacaatcagaaacaccaggaatacctgaacagtattttgcaacatgcaaaagattttaaggaatatcatcggtctgtggccggaaagatccagaagctctccaaagcagtggcaacttggcatgccaacactgaaagagagcagaagaaggagacagagcggattgaaaaggagagaatgcggcgactgatggctgaagatgaggagggttatagaaaactgattgatcaaaagaaagacaggcgtttagcttaccttttgcagcagaccgatgagtatgtagccaatctgaccaatctggtttgggagcacaagcaagcccaggcagccaaagagaagaagaagaggaggaggaggaagaagaaggctgaggagaatgcagagggtggggagtctgccctgggaccggatggagagcccatagatgagagcagccagatgagtgacctccctgtcaaagtgactcacacagaaaccggcaaggttctgttcggaccagaagcacccaaagcaagtcagctggacgcctggctggaaatgaatcctggttatgaagttgcccctagatctgacagtgaagagagtgattctgattatgaggaagaggatgaggaagaagagtccagtaggcaggaaaccgaagagaaaatactcctggatccaaatagcgaagaagtttctgagaaggatgctaagcagatcattgagacagctaagcaagacgtggatgatgaatacagcatgcagtacagtgccaggggctcccagtcctactacaccgtggctcatgccatctcggagagggtggagaaacagtctgccctcctaattaatgggaccctaaagcattaccagctccagggcctggaatggatggtttccctgtataataacaacttgaacggaatcttagccgatgaaatggggcttggaaagaccatacagaccattgcactcatcacttatctgatggagcacaaaagactcaatggcccctatctcatcattgttcccctttcgactctatctaactggacatatgaatttgacaaatgggctccttctgtggtgaagatttcttacaagggtactcctgccatgcgtcgctcccttgtcccccagctacggagtggcaaattcaatgtcctcttgactacttatgagtatattataaaagacaagcacattcttgcaaagattcggtggaaatacatgatagtggacgaaggccaccgaatgaagaatcaccactgcaagctgactcaggtcttgaacactcactatgtggcccccagaaggatcctcttgactgggaccccgctgcagaataagctccctgaactctgggccctcctcaacttcctcctcccaacaatttttaagagctgcagcacatttgaacaatggttcaatgctccatttgccatgactggtgaaagggtggacttaaatgaagaagaaactatattgatcatcaggcgtctacataaggtgttaagaccatttttactaaggagactgaagaaagaagttgaatcccagcttcccgaaaaagtggaatatgtgatcaagtgtgacatgtcagctctgcagaagattctgtatcgccatatgcaagccaaggggatccttctcacagatggttctgagaaagataagaaggggaaaggaggtgctaagacacttatgaacactattatgcagttgagaaaaatctgcaaccacccatatatgtttcagcacattgaggaatcctttgctgaacacctaggctattcaaatggggtcatcaatggggctgaactgtatcgggcctcagggaagtttgagctgcttgatcgtattctgccaaaattgagagcgactaatcaccgagtgctgcttttctgccagatgacatctctcatgaccatcatggaggattattttgcttttcggaacttcctttacctacgccttgatggcaccaccaagtctgaagatcgtgctgctttgctgaagaaattcaatgaacctggatcccagtatttcattttcttgctgagcacaagagctggtggcctgggcttaaatcttcaggcagctgatacagtggtcatctttgacagcgactggaatcctcatcaggatctgcaggcccaagaccgagctcaccgcatcgggcagcagaacgaggtccgggtactgaggctctgtaccgtgaacagcgtggaggaaaagatcctcgcggccgcaaaatacaagctgaacgtggatcagaaagtgatccaggcgggcatgtttgaccaaaagtcttcaagccacgagcggagggcattcctgcaggccatcttggagcatgaggaggaaaatgaggaagaagatgaagtaccggacgatgagactctgaaccaaatgattgctcgacgagaagaagaatttgacctttttatgcggatggacatggaccggcggagggaagatgcccggaacccgaaacggaagccccgtttaatggaggaggatgagctgccctcctggatcattaaggatgacgctgaagtagaaaggctcacctgtgaagaagaggaggagaaaatatttgggagggggtcccgccagcgccgtgacgtggactacagtgacgccctcacggagaagcagtggctaagggccatcgaagacggcaatttggaggaaatggaagaggaagtacggcttaagaagcgaaaaagacgaagaaatgtggataaagatcctgcaaaagaagatgtggaaaaagctaagaagagaagaggccgccctcccgctgagaaactgtcaccaaatccccccaaactgacaaagcagatgaacgctatcatcgatactgtgataaactacaaagatagttcagggcgacagctcagtgaagtcttcattcagttaccttcaaggaaagaattaccagaatactatgaattaattaggaagccagtggatttcaaaaaaataaaggaaaggattcgtaatcataagtaccggagcctaggcgacctggagaaggatgtcatgcttctctgtcacaacgctcagacgttcaacctggagggatcccagatctatgaagactccatcgtcttacagtcagtgtttaagagtgcccggcagaaaattgccaaagaggaagagagtgaggatgaaagcaatgaagaggaggaagaggaagatgaagaagagtcagagtccgaggcaaaatcagtcaaggtgaaaattaagctcaataaaaaagatgacaaaggccgggacaaagggaaaggcaagaaaaggccaaatcgaggaaaagccaaacctgtagtgagcgattttgacagcgatgaggagcaggatgaacgtgaacagtcagaaggaagtgggacggatgatgagtgatcagtatggacctttttccttggtagaactgaattccttcctcccctgtctcatttctacccagtgagttcatttgtcatataggcactgggttgtttctatatcatcatcgtctataaactagctttaggatagtgccagacaaacatatgatatcatggtgtaaaaaacacacacatacacaaatatttgtaacatattgtgaccaaatgggcctcaaagattcagattgaaacaaacaaaaagcttttgatggaaaatatgtgggtggatagtatatttctatgggtgggtctaatttggtaacggtttgattgtgcctggttttatcacctgttcagatgagaagatttttgtcttttgtagcactgataaccaggagaagccattaaaagccactggttattttatttttcatcaggcaattttcgaggtttttatttgttcggtattgtttttttacactgtggtacatataagcaactttaataggtgataaatgtacagtagttagatttcacctgcatatacatttttccattttatgctctatgatctgaacaaaagctttttgaattgtataagatttatgtctactgtaaacattgcttaatttttttgctcttgatttaaaaaaaagttttgttgaaagcgctattgaatattgcaatctatatagtgtattggatggcttcttttgtcaccctgatctcctatgttaccaatgtgtatcgtctccttctccctaaagtgtacttaatctttgctttctttgcacaatgtctttggttgcaagtcataagcctgaggcaaataaaattccagtaatttcgaa

SEQ ID NO: 306322 - DNA, 6488 bp, Homo sapiens
gtagaaaataagagatttattcccctttttaaatcaaaaccagattccatgcttcagccgccccctaacccgccagccccgcccccagggtttgtttttccatatttttgtatatattttagcgaagatggcaggtgagggaaggttatagtgctgtacctagtccacgaagtaaacagagaggttagggtgggtttacttatttataaggcgttcagcctctcagctgtttctccctcgttggcatttggaagcttgcagtccttcagggaagagacagatttggcaggaacgttctttgtgcccgcctcccttttctattttttatttttttacctggaatagggggcagatttataatgacagccttagggaagggggagaaaaagtttcagccggcacgacaatgcccgttttttccacagtccacactgtgccacaaacagctttggtgccactcggagcccgtcccccgtcccctccctctctctctgcaggctcgcactggcaggcggaggcacagttaaattccagcaccttctccacatacccccgaactactacgcgctattactacggctgccctccgttttcgcttcgcctcctccccttccgcagtctccctggaggagccccgcggcgcccgaggaagaggactgccagggaagggacagcgggcgcccagctccagcagggcttggggctttctgcatcccgcgcagtttctctgctccaggcacaaacgcggcccgagagccggcgccttgcagtcacacacggatccacgcatacagtagagctgtctagatccacattcttgcacaccgccccctcctccccccgcgctcccggagtcgctgagctgagcgagtgacaggcgcgtcccgccaacccgcgcccggacgggcagggaggagcggcgcgcggggccaactgcggcgcgtcttccggcgcccgcggaggaggcgagggtgggacgctgggcggagcccgagtttaggaagaggaggggacggctgtcatcaatgaagtcatattcataatctagtcctctctccctctgtttctgtactctgggtgactcagagagggaagagattcagccagcacactcctcgcgagcaagcattactctactgactggcagagacaggagaggtagatgtccacgcccacagaccctggtgcgatgccccacccagggccttcgccggggcctgggccttcccctgggccaattcttgggcctagtccaggaccaggaccatccccaggttccgtccacagcatgatggggccaagtcctggacctccaagtgtctcccatcctatgccgacgatggggtccacagacttcccacaggaaggcatgcatcaaatgcataagcccatcgatggtatacatgacaaggggattgtagaagacatccattgtggatccatgaagggcactggtatgcgaccacctcacccaggcatgggccctccccagagtccaatggatcaacacagccaaggttatatgtcaccacacccatctccattaggagccccagagcacgtctccagccctatgtctggaggaggcccaactccacctcagatgccaccaagccagccgggggccctcatcccaggtgatccgcaggccatgagccagcccaacagaggtccctcacctttcagtcctgtccagctgcatcagcttcgagctcagattttagcttataaaatgctggcccgaggccagcccctccccgaaacgctgcagcttgcagtccaggggaaaaggacgttgcctggcttgcagcaacaacagcagcagcaacagcagcagcagcagcagcagcagcagcagcagcagcagcaacagcagccgcagcagcagccgccgcaaccacagacgcagcaacaacagcagccggcccttgttaactacaacagaccatctggcccggggccggagctgagcggcccgagcaccccgcagaagctgccggtgcccgcgcccggcggccggccctcgcccgcgccccccgcagccgcgcagccgcccgcggccgcagtgcccgggccctcagtgccgcagccggccccggggcagccctcgcccgtcctccagctgcagcagaagcagagccgcatcagccccatccagaaaccgcaaggcctggaccccgtggaaattctgcaagagcgggaatacagacttcaggcccgcatagctcataggatacaagaactggaaaatctgcctggctctttgccaccagatttaagaaccaaagcaaccgtggaactaaaagcacttcggttactcaatttccagcgtcagctgagacaggaggtggtggcctgcatgcgcagggacacgaccctggagacggctctcaactccaaagcatacaaacggagcaagcgccagactctgagagaagctcgcatgaccgagaagctggagaagcagcagaagattgagcaggagaggaaacgccgtcagaaacaccaggaatacctgaacagtattttgcaacatgcaaaagattttaaggaatatcatcggtctgtggccggaaagatccagaagctctccaaagcagtggcaacttggcatgccaacactgaaagagagcagaagaaggagacagagcggattgaaaaggagagaatgcggcgactgatggctgaagatgaggagggttatagaaaactgattgatcaaaagaaagacaggcgtttagcttaccttttgcagcagaccgatgagtatgtagccaatctgaccaatctggtttgggagcacaagcaagcccaggcagccaaagagaagaagaagaggaggaggaggaagaagaaggctgaggagaatgcagagggtggggagtctgccctgggaccggatggagagcccatagatgagagcagccagatgagtgacctccctgtcaaagtgactcacacagaaaccggcaaggttctgttcggaccagaagcacccaaagcaagtcagctggacgcctggctggaaatgaatcctggttatgaagttgcccctagatctgacagtgaagagagtgattctgattatgaggaagaggatgaggaagaagagtccagtaggcaggaaaccgaagagaaaatactcctggatccaaatagcgaagaagtttctgagaaggatgctaagcagatcattgagacagctaagcaagacgtggatgatgaatacagcatgcagtacagtgccaggggctcccagtcctactacaccgtggctcatgccatctcggagagggtggagaaacagtctgccctcctaattaatgggaccctaaagcattaccagctccagggcctggaatggatggtttccctgtataataacaacttgaacggaatcttagccgatgaaatggggcttggaaagaccatacagaccattgcactcatcacttatctgatggagcacaaaagactcaatggcccctatctcatcattgttcccctttcgactctatctaactggacatatgaatttgacaaatgggctccttctgtggtgaagatttcttacaagggtactcctgccatgcgtcgctcccttgtcccccagctacggagtggcaaattcaatgtcctcttgactacttatgagtatattataaaagacaagcacattcttgcaaagattcggtggaaatacatgatagtggacgaaggccaccgaatgaagaatcaccactgcaagctgactcaggtcttgaacactcactatgtggcccccagaaggatcctcttgactgggaccccgctgcagaataagctccctgaactctgggccctcctcaacttcctcctcccaacaatttttaagagctgcagcacatttgaacaatggttcaatgctccatttgccatgactggtgaaagggtggacttaaatgaagaagaaactatattgatcatcaggcgtctacataaggtgttaagaccatttttactaaggagactgaagaaagaagttgaatcccagcttcccgaaaaagtggaatatgtgatcaagtgtgacatgtcagctctgcagaagattctgtatcgccatatgcaagccaaggggatccttctcacagatggttctgagaaagataagaaggggaaaggaggtgctaagacacttatgaacactattatgcagttgagaaaaatctgcaaccacccatatatgtttcagcacattgaggaatcctttgctgaacacctaggctattcaaatggggtcatcaatggggctgaactgtatcgggcctcagggaagtttgagctgcttgatcgtattctgccaaaattgagagcgactaatcaccgagtgctgcttttctgccagatgacatctctcatgaccatcatggaggattattttgcttttcggaacttcctttacctacgccttgatggcaccaccaagtctgaagatcgtgctgctttgctgaagaaattcaatgaacctggatcccagtatttcattttcttgctgagcacaagagctggtggcctgggcttaaatcttcaggcagctgatacagtggtcatctttgacagcgactggaatcctcatcaggaagaagatgaagtaccggacgatgagactctgaaccaaatgattgctcgacgagaagaagaatttgacctttttatgcggatggacatggaccggcggagggaagatgcccggaacccgaaacggaagccccgtttaatggaggaggatgagctgccctcctggatcattaaggatgacgctgaagtagaaaggctcacctgtgaagaagaggaggagaaaatatttgggagggggtcccgccagcgccgtgacgtggactacagtgacgccctcacggagaagcagtggctaagggccatcgaagacggcaatttggaggaaatggaagaggaagtacggcttaagaagcgaaaaagacgaagaaatgtggataaagatcctgcaaaagaagatgtggaaaaagctaagaagagaagaggccgccctcccgctgagaaactgtcaccaaatccccccaaactgacaaagcagatgaacgctatcatcgatactgtgataaactacaaagatagttcagggcgacagctcagtgaagtcttcattcagttaccttcaaggaaagaattaccagaatactatgaattaattaggaagccagtggatttcaaaaaaataaaggaaaggattcgtaatcataagtaccggagcctaggcgacctggagaaggatgtcatgcttctctgtcacaacgctcagacgttcaacctggagggatcccagatctatgaagactccatcgtcttacagtcagtgtttaagagtgcccggcagaaaattgccaaagaggaagagagtgaggatgaaagcaatgaagaggaggaagaggaagatgaagaagagtcagagtccgaggcaaaatcagtcaaggtgaaaattaagctcaataaaaaagatgacaaaggccgggacaaagggaaaggcaagaaaaggccaaatcgaggaaaagccaaacctgtagtgagcgattttgacagcgatgaggagcaggatgaacgtgaacagtcagaaggaagtgggacggatgatgagtgatcagtatggacctttttccttggtagaactgaattccttcctcccctgtctcatttctacccagtgagttcatttgtcatataggcactgggttgtttctatatcatcatcgtctataaactagctttaggatagtgccagacaaacatatgatatcatggtgtaaaaaacacacacatacacaaatatttgtaacatattgtgaccaaatgggcctcaaagattcagattgaaacaaacaaaaagcttttgatggaaaatatgtgggtggatagtatatttctatgggtgggtctaatttggtaacggtttgattgtgcctggttttatcacctgttcagatgagaagatttttgtcttttgtagcactgataaccaggagaagccattaaaagccactggttattttatttttcatcaggcaattttcgaggtttttatttgttcggtattgtttttttacactgtggtacatataagcaactttaataggtgataaatgtacagtagttagatttcacctgcatatacatttttccattttatgctctatgatctgaacaaaagctttttgaattgtataagatttatgtctactgtaaacattgcttaatttttttgctcttgatttaaaaaaaagttttgttgaaagcgctattgaatattgcaatctatatagtgtattggatggcttcttttgtcaccctgatctcctatgttaccaatgtgtatcgtctccttctccctaaagtgtacttaatctttgctttctttgcacaatgtctttggttgcaagtcataagcctgaggcaaataaaattccagtaatttcgaa

SEQ ID NO: 306323 - DNA, 2432 bp, Homo sapiens
tctgacattggacattggtgtcttgtttaatgttttagatatggactaaatctgatggggaacctagagacagataaaaacaatatgatacctggatttcaaaacctgagatgtatttcagttggcttggttaatttcaacccaggtttcttcaactaggaatgacactgaatttttccaaacgtagcttgtgtgtttttaaaatgtaggcaaaatcttaccttagtgaaggtgaaatacagaacccttccatatttccctctggggtggggtccggttttggatgcctatgccaggcatctcagtcctcatagcatattgaccccccaaacaggatctgcaggcccaagaccgagctcaccgcatcgggcagcagaacgaggtccgggtactgaggctctgtaccgtgaacagcgtggaggaaaagatcctcgcggccgcaaaatacaagctgaacgtggatcagaaagtgatccaggcgggcatgtttgaccaaaagtcttcaagccacgagcggagggcattcctgcaggccatcttggagcatgaggaggaaaatgaggaagaagatgaagtaccggacgatgagactctgaaccaaatgattgctcgacgagaagaagaatttgacctttttatgcggatggacatggaccggcggagggaagatgcccggaacccgaaacggaagccccgtttaatggaggaggatgagctgccctcctggatcattaaggatgacgctgaagtagaaaggctcacctgtgaagaagaggaggagaaaatatttgggagggggtcccgccagcgccgtgacgtggactacagtgacgccctcacggagaagcagtggctaagggccatcgaagacggcaatttggaggaaatggaagaggaagtacggcttaagaagcgaaaaagacgaagaaatgtggataaagatcctgcaaaagaagatgtggaaaaagctaagaagagaagaggccgccctcccgctgagaaactgtcaccaaatccccccaaactgacaaagcagatgaacgctatcatcgatactgtgataaactacaaagatagttcagggcgacagctcagtgaagtcttcattcagttaccttcaaggaaagaattaccagaatactatgaattaattaggaagccagtggatttcaaaaaaataaaggaaaggattcgtaatcataagtaccggagcctaggcgacctggagaaggatgtcatgcttctctgtcacaacgctcagacgttcaacctggagggatcccagatctatgaagactccatcgtcttacagtcagtgtttaagagtgcccggcagaaaattgccaaagaggaagagagtgaggatgaaagcaatgaagaggaggaagaggaagatgaagaagagtcagagtccgaggcaaaatcagtcaaggtgaaaattaagctcaataaaaaagatgacaaaggccgggacaaagggaaaggcaagaaaaggccaaatcgaggaaaagccaaacctgtagtgagcgattttgacagcgatgaggagcaggatgaacgtgaacagtcagaaggaagtgggacggatgatgagtgatcagtatggacctttttccttggtagaactgaattccttcctcccctgtctcatttctacccagtgagttcatttgtcatataggcactgggttgtttctatatcatcatcgtctataaactagctttaggatagtgccagacaaacatatgatatcatggtgtaaaaaacacacacatacacaaatatttgtaacatattgtgaccaaatgggcctcaaagattcagattgaaacaaacaaaaagcttttgatggaaaatatgtgggtggatagtatatttctatgggtgggtctaatttggtaacggtttgattgtgcctggttttatcacctgttcagatgagaagatttttgtcttttgtagcactgataaccaggagaagccattaaaagccactggttattttatttttcatcaggcaattttcgaggtttttatttgttcggtattgtttttttacactgtggtacatataagcaactttaataggtgataaatgtacagtagttagatttcacctgcatatacatttttccattttatgctctatgatctgaacaaaagctttttgaattgtataagatttatgtctactgtaaacattgcttaatttttttgctcttgatttaaaaaaaagttttgttgaaagcgctattgaatattgcaatctatatagtgtattggatggcttcttttgtcaccctgatctcctatgttaccaatgtgtatcgtctccttctccctaaagtgtacttaatctttgctttctttgcacaatgtctttggttgcaagtcataagcctgaggcaaataaaattccagtaatttcgaa

SEQ ID NO: 306324 - DNA, 5661 bp, Homo sapiens
gtagaaaataagagatttattcccctttttaaatcaaaaccagattccatgcttcagccgccccctaacccgccagccccgcccccagggtttgtttttccatatttttgtatatattttagcgaagatggcaggtgagggaaggttatagtgctgtacctagtccacgaagtaaacagagaggttagggtgggtttacttatttataaggcgttcagcctctcagctgtttctccctcgttggcatttggaagcttgcagtccttcagggaagagacagatttggcaggaacgttctttgtgcccgcctcccttttctattttttatttttttacctggaatagggggcagatttataatgacagccttagggaagggggagaaaaagtttcagccggcacgacaatgcccgttttttccacagtccacactgtgccacaaacagctttggtgccactcggagcccgtcccccgtcccctccctctctctctgcaggctcgcactggcaggcggaggcacagttaaattccagcaccttctccacatacccccgaactactacgcgctattactacggctgccctccgttttcgcttcgcctcctccccttccgcagtctccctggaggagccccgcggcgcccgaggaagaggactgccagggaagggacagcgggcgcccagctccagcagggcttggggctttctgcatcccgcgcagtttctctgctccaggcacaaacgcggcccgagagccggcgccttgcagtcacacacggatccacgcatacagtagagctgtctagatccacattcttgcacaccgccccctcctccccccgcgctcccggagtcgctgagctgagcgagtgacaggcgcgtcccgccaacccgcgcccggacgggcagggaggagcggcgcgcggggccaactgcggcgcgtcttccggcgcccgcggaggaggcgagggtgggacgctgggcggagcccgagtttaggaagaggaggggacggctgtcatcaatgaagtcatattcataatctagtcctctctccctctgtttctgtactctgggtgactcagagagggaagagattcagccagcacactcctcgcgagcaagcattactctactgactggcagagacaggagaggtagatgtccacgcccacagaccctggtgcgatgccccacccagggccttcgccggggcctgggccttcccctgggccaattcttgggcctagtccaggaccaggaccatccccaggttccgtccacagcatgatggggccaagtcctggacctccaagtgtctcccatcctatgccgacgatggggtccacagacttcccacaggaaggcatgcatcaaatgcataagcccatcgatggtatacatgacaaggggattgtagaagacatccattgtggatccatgaagggcactggtatgcgaccacctcacccaggcatgggccctccccagagtccaatggatcaacacagccaaggttatatgtcaccacacccatctccattaggagccccagagcacgtctccagccctatgtctggaggaggcccaactccacctcagatgccaccaagccagccgggggccctcatcccaggtgatccgcaggccatgagccagcccaacagaggtccctcacctttcagtcctgtccagctgcatcagcttcgagctcagattttagcttataaaatgctggcccgaggccagcccctccccgaaacgctgcagcttgcagtccaggggaaaaggacgttgcctggcttgcagcaacaacagcagcagcaacagcagcagcagcagcagcagcagcagcagcagcagcagcaacagcagccgcagcagcagccgccgcaaccacagacgcagcaacaacagcagccggcccttgttaactacaacagaccatctggcccggggccggagctgagcggcccgagcaccccgcagaagctgccggtgcccgcgcccggcggccggccctcgcccgcgccccccgcagccgcgcagccgcccgcggccgcagtgcccgggccctcagtgccgcagccggccccggggcagccctcgcccgtcctccagctgcagcagaagcagagccgcatcagccccatccagaaaccgcaaggcctggaccccgtggaaattctgcaagagcgggaatacagacttcaggcccgcatagctcataggatacaagaactggaaaatctgcctggctctttgccaccagatttaagaaccaaagcaaccgtggaactaaaagcacttcggttactcaatttccagcgtcagctgagacaggaggtggtggcctgcatgcgcagggacacgaccctggagacggctctcaactccaaagcatacaaacggagcaagcgccagactctgagagaagctcgcatgaccgagaagctggagaagcagcagaagattgagcaggagaggaaacgccgtcagaaacaccaggaatacctgaacagtattttgcaacatgcaaaagattttaaggaatatcatcggtctgtggccggaaagatccagaagctctccaaagcagtggcaacttggcatgccaacactgaaagagagcagaagaaggagacagagcggattgaaaaggagagaatgcggcgactgatggctgaagatgaggagggttatagaaaactgattgatcaaaagaaagacaggcgtttagcttaccttttgcagcagaccgatgagtatgtagccaatctgaccaatctggtttgggagcacaagcaagcccaggcagccaaagagaagaagaagaggaggaggaggaagaagaaggctgaggagaatgcagagggtggggagtctgccctgggaccggatggagagcccatagatgagagcagccagatgagtgacctccctgtcaaagtgactcacacagaaaccggcaaggttctgttcggaccagaagcacccaaagcaagtcagctggacgcctggctggaaatgaatcctggttatgaagttgcccctagatctgacagtgaagagagtgattctgattatgaggaagaggatgaggaagaagagtccagtaggcaggaaaccgaagagaaaatactcctggatccaaatagcgaagaagtttctgagaaggatgctaagcagatcattgagacagctaagcaagacgtggatgatgaatacagcatgcagtacagtgccaggggctcccagtcctactacaccgtggctcatgccatctcggagagggtggagaaacagtctgccctcctaattaatgggaccctaaagcattaccagctccagggcctggaatggatggtttccctgtataataacaacttgaacggaatcttagccgatgaaatggggcttggaaagaccatacagaccattgcactcatcacttatctgatggagcacaaaagactcaatggcccctatctcatcattgttcccctttcgactctatctaactggacatatgaatttgacaaatgggctccttctgtggtgaagatttcttacaagggtactcctgccatgcgtcgctcccttgtcccccagctacggagtggcaaattcaatgtcctcttgactacttatgagtatattataaaagacaagcacattcttgcaaagattcggtggaaatacatgatagtggacgaaggccaccgaatgaagaatcaccactgcaagctgactcaggtcttgaacactcactatgtggcccccagaaggatcctcttgactgggaccccgctgcagaataagctccctgaactctgggccctcctcaacttcctcctcccaacaatttttaagagctgcagcacatttgaacaatggttcaatgctccatttgccatgactggtgaaagggtggacttaaatgaagaagaaactatattgatcatcaggcgtctacataaggtgttaagaccatttttactaaggagactgaagaaagaagttgaatcccagcttcccgaaaaagtggaatatgtgatcaagtgtgacatgtcagctctgcagaagattctgtatcgccatatgcaagccaaggggatccttctcacagatggttctgagaaagataagaaggggaaaggaggtgctaagacacttatgaacactattatgcagttgagaaaaatctgcaaccacccatatatgtttcagcacattgaggaatcctttgctgaacacctaggctattcaaatggggtcatcaatggggctgaactgtatcgggcctcagggaagtttgagctgcttgatcgtattctgccaaaattgagagcgactaatcaccgagtgctgcttttctgccagatgacatctctcatgaccatcatggaggattattttgcttttcggaacttcctttacctacgccttgatggcaccaccaagtctgaagatcgtgctgctttgctgaagaaattcaatgaacctggatcccagtatttcattttcttgctgagcacaagagctggtggcctgggcttaaatcttcaggcagctgatacagtggtcatctttgacagcgactggaatcctcatcaggatctgcaggcccaagaccgagctcaccgcatcgggcagcagaacgaggtccgggtactgaggctctgtaccgtgaacagcgtggaggaaaagatcctcgcggccgcaaaatacaagctgaacgtggatcagaaagtgatccaggcgggcatgtttgaccaaaagtcttcaagccacgagcggagggcattcctgcaggccatcttggagcatgaggaggaaaatgaggaagaagatgaagtaccggacgatgagactctgaaccaaatgattgctcgacgagaagaagaatttgacctttttatgcggatggacatggaccggcggagggaagatgcccggaacccgaaacggaagccccgtttaatggaggaggatgagctgccctcctggatcattaaggatgacgctgaagtagaaaggctcacctgtgaagaagaggaggagaaaatatttgggagggggtcccgccagcgccgtgacgtggactacagtgacgccctcacggagaagcagtggctaagggccatcgaagacggcaatttggaggaaatggaagaggaagtacggcttaagaagcgaaaaagacgaagaaatgtggataaagatcctgcaaaagaagatgtggaaaaagctaagaagagaagaggccgccctcccgctgagaaactgtcaccaaatccccccaaactgacaaagcagatgaacgctatcatcgatactgtgataaactacaaagatagttcagggcgacagctcagtgaagtcttcattcagttaccttcaaggaaagaattaccagaatactatgaattaattaggaagccagtggatttcaaaaaaataaaggaaaggattcgtaatcataagtaccggagcctaggcgacctggagaaggatgtcatgcttctctgtcacaacgctcagacgttcaacctggagggatcccagatctatgaagactccatcgtcttacagtcagtgtttaagagtgcccggcagaaaattgccaaaaaaaaaaaaaaaaaaaaaaaaaaaacaca

SEQ ID NO: 306325 - DNA, 1940 bp, Homo sapiens
acgggtgcagtgtgcctttaagaaaagaggtgcctcactaaacttcgctgtagttgtgtttcaccgtctcggtagggaaggaaagtgttaatttcttatttgtacactttttttccccgacttccttcctattcacttcattaaatctagaggcagttgagcatgggagccgtctgtatgttgaattagggctcgcactcttgcgcaacacgtcaccagtcggaaactgggggtttgcttctgtgatttatttcattattgtgctggtaaactgatgaagagactagcagctcgctgctttgctggcttgttaattttatccccactaactgtgatttctgatagccggcctgctgatagtggtaaggccatcgaagacggcaatttggaggaaatggaagaggaagtacggcttaagaagcgaaaaagacgaagaaatgtggataaagatcctgcaaaagaagatgtggaaaaagctaagaagagaagaggccgccctcccgctgagaaactgtcaccaaatccccccaaactgacaaagcagatgaacgctatcatcgatactgtgataaactacaaagatagttcagggcgacagctcagtgaagtcttcattcagttaccttcaaggaaagaattaccagaatactatgaattaattaggaagccagtggatttcaaaaaaataaaggaaaggattcgtaatcataagtaccggagcctaggcgacctggagaaggatgtcatgcttctctgtcacaacgctcagacgttcaacctggagggatcccagatctatgaagactccatcgtcttacagtcagtgtttaagagtgcccggcagaaaattgccaaagaggaagagagtgaggatgaaagcaatgaagaggaggaagaggaagatgaagaagagtcagagtccgaggcaaaatcagtcaaggtgaaaattaagctcaataaaaaagatgacaaaggccgggacaaagggaaaggcaagaaaaggccaaatcgaggaaaagccaaacctgtagtgagcgattttgacagcgatgaggagcaggatgaacgtgaacagtcagaaggaagtgggacggatgatgagtgatcagtatggacctttttccttggtagaactgaattccttcctcccctgtctcatttctacccagtgagttcatttgtcatataggcactgggttgtttctatatcatcatcgtctataaactagctttaggatagtgccagacaaacatatgatatcatggtgtaaaaaacacacacatacacaaatatttgtaacatattgtgaccaaatgggcctcaaagattcagattgaaacaaacaaaaagcttttgatggaaaatatgtgggtggatagtatatttctatgggtgggtctaatttggtaacggtttgattgtgcctggttttatcacctgttcagatgagaagatttttgtcttttgtagcactgataaccaggagaagccattaaaagccactggttattttatttttcatcaggcaattttcgaggtttttatttgttcggtattgtttttttacactgtggtacatataagcaactttaataggtgataaatgtacagtagttagatttcacctgcatatacatttttccattttatgctctatgatctgaacaaaagctttttgaattgtataagatttatgtctactgtaaacattgcttaatttttttgctcttgatttaaaaaaaagttttgttgaaagcgctattgaatattgcaatctatatagtgtattggatggcttcttttgtcaccctgatctcctatgttaccaatgtgtatcgtctccttctccctaaagtgtacttaatctttgctttctttgcacaatgtctttggttgcaagtcataagcctgaggcaaataaaattccagtaatttcgaa

SEQ ID NO: 306326 - DNA, 1975 bp, Homo sapiens
acgggtgcagtgtgcctttaagaaaagaggtgcctcactaaacttcgctgtagttgtgtttcaccgtctcggtagggaaggaaagtgttaatttcttatttgtacactttttttccccgacttccttcctattcacttcattaaatctagaggcagttgagcatgggagccgtctgtatgttgaattagggctcgcactcttgcgcaacacgtcaccagtcggaaactgggggtttgcttctgtgatttatttcattattgtgctggtaaactgatgaagagactagcagctcgctgctttgctggcttgttaattttatccccactaactgtgatttctgatagccggcctgctgatagtggtaagtgctgctggctctggtttaaagcaagcgtttgcaggccatcgaagacggcaatttggaggaaatggaagaggaagtacggcttaagaagcgaaaaagacgaagaaatgtggataaagatcctgcaaaagaagatgtggaaaaagctaagaagagaagaggccgccctcccgctgagaaactgtcaccaaatccccccaaactgacaaagcagatgaacgctatcatcgatactgtgataaactacaaagatagttcagggcgacagctcagtgaagtcttcattcagttaccttcaaggaaagaattaccagaatactatgaattaattaggaagccagtggatttcaaaaaaataaaggaaaggattcgtaatcataagtaccggagcctaggcgacctggagaaggatgtcatgcttctctgtcacaacgctcagacgttcaacctggagggatcccagatctatgaagactccatcgtcttacagtcagtgtttaagagtgcccggcagaaaattgccaaagaggaagagagtgaggatgaaagcaatgaagaggaggaagaggaagatgaagaagagtcagagtccgaggcaaaatcagtcaaggtgaaaattaagctcaataaaaaagatgacaaaggccgggacaaagggaaaggcaagaaaaggccaaatcgaggaaaagccaaacctgtagtgagcgattttgacagcgatgaggagcaggatgaacgtgaacagtcagaaggaagtgggacggatgatgagtgatcagtatggacctttttccttggtagaactgaattccttcctcccctgtctcatttctacccagtgagttcatttgtcatataggcactgggttgtttctatatcatcatcgtctataaactagctttaggatagtgccagacaaacatatgatatcatggtgtaaaaaacacacacatacacaaatatttgtaacatattgtgaccaaatgggcctcaaagattcagattgaaacaaacaaaaagcttttgatggaaaatatgtgggtggatagtatatttctatgggtgggtctaatttggtaacggtttgattgtgcctggttttatcacctgttcagatgagaagatttttgtcttttgtagcactgataaccaggagaagccattaaaagccactggttattttatttttcatcaggcaattttcgaggtttttatttgttcggtattgtttttttacactgtggtacatataagcaactttaataggtgataaatgtacagtagttagatttcacctgcatatacatttttccattttatgctctatgatctgaacaaaagctttttgaattgtataagatttatgtctactgtaaacattgcttaatttttttgctcttgatttaaaaaaaagttttgttgaaagcgctattgaatattgcaatctatatagtgtattggatggcttcttttgtcaccctgatctcctatgttaccaatgtgtatcgtctccttctccctaaagtgtacttaatctttgctttctttgcacaatgtctttggttgcaagtcataagcctgaggcaaataaaattccagtaatttcgaa

SEQ ID NO: 306327 - DNA, 1607 bp, Homo sapiens
agattcagtagaactacatcccaggcatgtgtaggccatcgaagacggcaatttggaggaaatggaagaggaagtacggcttaagaagcgaaaaagacgaagaaatgtggataaagatcctgcaaaagaagatgtggaaaaagctaagaagagaagaggccgccctcccgctgagaaactgtcaccaaatccccccaaactgacaaagcagatgaacgctatcatcgatactgtgataaactacaaagatagttcagggcgacagctcagtgaagtcttcattcagttaccttcaaggaaagaattaccagaatactatgaattaattaggaagccagtggatttcaaaaaaataaaggaaaggattcgtaatcataagtaccggagcctaggcgacctggagaaggatgtcatgcttctctgtcacaacgctcagacgttcaacctggagggatcccagatctatgaagactccatcgtcttacagtcagtgtttaagagtgcccggcagaaaattgccaaagaggaagagagtgaggatgaaagcaatgaagaggaggaagaggaagatgaagaagagtcagagtccgaggcaaaatcagtcaaggtgaaaattaagctcaataaaaaagatgacaaaggccgggacaaagggaaaggcaagaaaaggccaaatcgaggaaaagccaaacctgtagtgagcgattttgacagcgatgaggagcaggatgaacgtgaacagtcagaaggaagtgggacggatgatgagtgatcagtatggacctttttccttggtagaactgaattccttcctcccctgtctcatttctacccagtgagttcatttgtcatataggcactgggttgtttctatatcatcatcgtctataaactagctttaggatagtgccagacaaacatatgatatcatggtgtaaaaaacacacacatacacaaatatttgtaacatattgtgaccaaatgggcctcaaagattcagattgaaacaaacaaaaagcttttgatggaaaatatgtgggtggatagtatatttctatgggtgggtctaatttggtaacggtttgattgtgcctggttttatcacctgttcagatgagaagatttttgtcttttgtagcactgataaccaggagaagccattaaaagccactggttattttatttttcatcaggcaattttcgaggtttttatttgttcggtattgtttttttacactgtggtacatataagcaactttaataggtgataaatgtacagtagttagatttcacctgcatatacatttttccattttatgctctatgatctgaacaaaagctttttgaattgtataagatttatgtctactgtaaacattgcttaatttttttgctcttgatttaaaaaaaagttttgttgaaagcgctattgaatattgcaatctatatagtgtattggatggcttcttttgtcaccctgatctcctatgttaccaatgtgtatcgtctccttctccctaaagtgtacttaatctttgctttctttgcacaatgtctttggttgcaagtcataagcctgaggcaaataaaattccagtaatttcgaa

SEQ ID NO: 306328 - DNA, 1769 bp, Homo sapiens
ttaaagatgcatttatccaatatggtagcattccttttttcttcttcctccactgattactgttaacttttacttttttttggttaatttctttcattttattctaattgttggagctatatataaatatacacatactttttttgtcttggttattctcttgtcttgaatttgtctcctttgtttccaacgaacagccatcgaagacggcaatttggaggaaatggaagaggaagtacggcttaagaagcgaaaaagacgaagaaatgtggataaagatcctgcaaaagaagatgtggaaaaagctaagaagagaagaggccgccctcccgctgagaaactgtcaccaaatccccccaaactgacaaagcagatgaacgctatcatcgatactgtgataaactacaaagatagttcagggcgacagctcagtgaagtcttcattcagttaccttcaaggaaagaattaccagaatactatgaattaattaggaagccagtggatttcaaaaaaataaaggaaaggattcgtaatcataagtaccggagcctaggcgacctggagaaggatgtcatgcttctctgtcacaacgctcagacgttcaacctggagggatcccagatctatgaagactccatcgtcttacagtcagtgtttaagagtgcccggcagaaaattgccaaagaggaagagagtgaggatgaaagcaatgaagaggaggaagaggaagatgaagaagagtcagagtccgaggcaaaatcagtcaaggtgaaaattaagctcaataaaaaagatgacaaaggccgggacaaagggaaaggcaagaaaaggccaaatcgaggaaaagccaaacctgtagtgagcgattttgacagcgatgaggagcaggatgaacgtgaacagtcagaaggaagtgggacggatgatgagtgatcagtatggacctttttccttggtagaactgaattccttcctcccctgtctcatttctacccagtgagttcatttgtcatataggcactgggttgtttctatatcatcatcgtctataaactagctttaggatagtgccagacaaacatatgatatcatggtgtaaaaaacacacacatacacaaatatttgtaacatattgtgaccaaatgggcctcaaagattcagattgaaacaaacaaaaagcttttgatggaaaatatgtgggtggatagtatatttctatgggtgggtctaatttggtaacggtttgattgtgcctggttttatcacctgttcagatgagaagatttttgtcttttgtagcactgataaccaggagaagccattaaaagccactggttattttatttttcatcaggcaattttcgaggtttttatttgttcggtattgtttttttacactgtggtacatataagcaactttaataggtgataaatgtacagtagttagatttcacctgcatatacatttttccattttatgctctatgatctgaacaaaagctttttgaattgtataagatttatgtctactgtaaacattgcttaatttttttgctcttgatttaaaaaaaagttttgttgaaagcgctattgaatattgcaatctatatagtgtattggatggcttcttttgtcaccctgatctcctatgttaccaatgtgtatcgtctccttctccctaaagtgtacttaatctttgctttctttgcacaatgtctttggttgcaagtcataagcctgaggcaaataaaattccagtaatttcgaa

SEQ ID NO: 306329 - DNA, 1933 bp, Homo sapiens
acgggtgcagtgtgcctttaagaaaagaggtgcctcactaaacttcgctgtagttgtgtttcaccgtctcggtagggaaggaaagtgttaatttcttatttgtacactttttttccccgacttccttcctattcacttcattaaatctagaggcagttgagcatgggagccgtctgtatgttgaattagggctcgcactcttgcgcaacacgtcaccagtcggaaactgggggtttgcttctgtgatttatttcattattgtgctggtaaatgctgctggctctggtttaaagcaagcgtttgcaggccatcgaagacggcaatttggaggaaatggaagaggaagtacggcttaagaagcgaaaaagacgaagaaatgtggataaagatcctgcaaaagaagatgtggaaaaagctaagaagagaagaggccgccctcccgctgagaaactgtcaccaaatccccccaaactgacaaagcagatgaacgctatcatcgatactgtgataaactacaaagataggtgtaacgtggagaaggtgcccagtaattctcagttggaaatagaaggaaacagttcagggcgacagctcagtgaagtcttcattcagttaccttcaaggaaagaattaccagaatactatgaattaattaggaagccagtggatttcaaaaaaataaaggaaaggattcgtaatcataagtaccggagcctaggcgacctggagaaggatgtcatgcttctctgtcacaacgctcagacgttcaacctggagggatcccagatctatgaagactccatcgtcttacagtcagtgtttaagagtgcccggcagaaaattgccaaagaggaagagagtgaggatgaaagcaatgaagaggaggaagaggaagatgaagaagagtcagagtccgaggcaaaatcagtcaaggtgaaaattaagctcaataaaaaagatgacaaaggccgggacaaagggaaaggcaagaaaaggccaaatcgaggaaaagccaaacctgtagtgagcgattttgacagcgatgaggagcaggatgaacgtgaacagtcagaaggaagtgggacggatgatgagtgatcagtatggacctttttccttggtagaactgaattccttcctcccctgtctcatttctacccagtgagttcatttgtcatataggcactgggttgtttctatatcatcatcgtctataaactagctttaggatagtgccagacaaacatatgatatcatggtgtaaaaaacacacacatacacaaatatttgtaacatattgtgaccaaatgggcctcaaagattcagattgaaacaaacaaaaagcttttgatggaaaatatgtgggtggatagtatatttctatgggtgggtctaatttggtaacggtttgattgtgcctggttttatcacctgttcagatgagaagatttttgtcttttgtagcactgataaccaggagaagccattaaaagccactggttattttatttttcatcaggcaattttcgaggtttttatttgttcggtattgtttttttacactgtggtacatataagcaactttaataggtgataaatgtacagtagttagatttcacctgcatatacatttttccattttatgctctatgatctgaacaaaagctttttgaattgtataagatttatgtctactgtaaacattgcttaatttttttgctcttgatttaaaaaaaagttttgttgaaagcgctattgaatattgcaatctatatagtgtattggatggcttcttttgtcaccctgatctcctatgttaccaatgtgtatcgtctccttctccctaaagtgtacttaatctttgctttctttgcacaatgtctttggttgcaagtcataagcctgaggcaaataaaattccagtaatttcgaa

SEQ ID NO: 306330 - DNA, 1838 bp, Homo sapiens
cttggagaggcggaggtggaaacgatgcgcaggagttggcttggggctttttgtttgcgtgtccctgtttacctattcataatcatggatcccctctgctttgtgatactgtgaaccacgcataacagcaattctttacaccaccgggttgagaagaaggcgcctgaggctgactttctggacctgccgtcacgcagtaaagatgtggttggccatcgaagacggcaatttggaggaaatggaagaggaagtacggcttaagaagcgaaaaagacgaagaaatgtggataaagatcctgcaaaagaagatgtggaaaaagctaagaagagaagaggccgccctcccgctgagaaactgtcaccaaatccccccaaactgacaaagcagatgaacgctatcatcgatactgtgataaactacaaagataggtgtaacgtggagaaggtgcccagtaattctcagttggaaatagaaggaaacagttcagggcgacagctcagtgaagtcttcattcagttaccttcaaggaaagaattaccagaatactatgaattaattaggaagccagtggatttcaaaaaaataaaggaaaggattcgtaatcataagtaccggagcctaggcgacctggagaaggatgtcatgcttctctgtcacaacgctcagacgttcaacctggagggatcccagatctatgaagactccatcgtcttacagtcagtgtttaagagtgcccggcagaaaattgccaaagaggaagagagtgaggatgaaagcaatgaagaggaggaagaggaagatgaagaagagtcagagtccgaggcaaaatcagtcaaggtgaaaattaagctcaataaaaaagatgacaaaggccgggacaaagggaaaggcaagaaaaggccaaatcgaggaaaagccaaacctgtagtgagcgattttgacagcgatgaggagcaggatgaacgtgaacagtcagaaggaagtgggacggatgatgagtgatcagtatggacctttttccttggtagaactgaattccttcctcccctgtctcatttctacccagtgagttcatttgtcatataggcactgggttgtttctatatcatcatcgtctataaactagctttaggatagtgccagacaaacatatgatatcatggtgtaaaaaacacacacatacacaaatatttgtaacatattgtgaccaaatgggcctcaaagattcagattgaaacaaacaaaaagcttttgatggaaaatatgtgggtggatagtatatttctatgggtgggtctaatttggtaacggtttgattgtgcctggttttatcacctgttcagatgagaagatttttgtcttttgtagcactgataaccaggagaagccattaaaagccactggttattttatttttcatcaggcaattttcgaggtttttatttgttcggtattgtttttttacactgtggtacatataagcaactttaataggtgataaatgtacagtagttagatttcacctgcatatacatttttccattttatgctctatgatctgaacaaaagctttttgaattgtataagatttatgtctactgtaaacattgcttaatttttttgctcttgatttaaaaaaaagttttgttgaaagcgctattgaatattgcaatctatatagtgtattggatggcttcttttgtcaccctgatctcctatgttaccaatgtgtatcgtctccttctccctaaagtgtacttaatctttgctttctttgcacaatgtctttggttgcaagtcataagcctgaggcaaataaaattccagtaatttcgaa

SEQ ID NO: 306331 - DNA, 1446 bp, Homo sapiens
aaacttacaaaagagtagggtgtagacgtgggacgaaaggggtcgcccccaagctaactatcagtcaagttatgggcaaatagaaggaaacttcagggcgacagctcagtgaagtcttcattcagttaccttcaaggaaagaattaccagaatactatgaattaattaggaagccagtggatttcaaaaaaataaaggaaaggattcgtaatcataagtaccggagcctaggcgacctggagaaggatgtcatgcttctctgtcacaacgctcagacgttcaacctggagggatcccagatctatgaagactccatcgtcttacagtcagtgtttaagagtgcccggcagaaaattgccaaagaggaagagagtgaggatgaaagcaatgaagaggaggaagaggaagatgaagaagagtcagagtccgaggcaaaatcagtcaaggtgaaaattaagctcaataaaaaagatgacaaaggccgggacaaagggaaaggcaagaaaaggccaaatcgaggaaaagccaaacctgtagtgagcgattttgacagcgatgaggagcaggatgaacgtgaacagtcagaaggaagtgggacggatgatgagtgatcagtatggacctttttccttggtagaactgaattccttcctcccctgtctcatttctacccagtgagttcatttgtcatataggcactgggttgtttctatatcatcatcgtctataaactagctttaggatagtgccagacaaacatatgatatcatggtgtaaaaaacacacacatacacaaatatttgtaacatattgtgaccaaatgggcctcaaagattcagattgaaacaaacaaaaagcttttgatggaaaatatgtgggtggatagtatatttctatgggtgggtctaatttggtaacggtttgattgtgcctggttttatcacctgttcagatgagaagatttttgtcttttgtagcactgataaccaggagaagccattaaaagccactggttattttatttttcatcaggcaattttcgaggtttttatttgttcggtattgtttttttacactgtggtacatataagcaactttaataggtgataaatgtacagtagttagatttcacctgcatatacatttttccattttatgctctatgatctgaacaaaagctttttgaattgtataagatttatgtctactgtaaacattgcttaatttttttgctcttgatttaaaaaaaagttttgttgaaagcgctattgaatattgcaatctatatagtgtattggatggcttcttttgtcaccctgatctcctatgttaccaatgtgtatcgtctccttctccctaaagtgtacttaatctttgctttctttgcacaatgtctttggttgcaagtcataagcctgaggcaaataaaattccagtaatttcgaa

SEQ ID NO: 306332 - DNA, 1183 bp, Homo sapiens
gaaaggggtcgctgactagacagaaccacacagaacaggcataaaccgggaatgttctgggcactctgggatgtttgtgttgtctgtaggttggtgatagtcttaccacctatacaaagatctccttgtgattactcactggtgtctatttcatttgctttggttttagcaaaatcagtcaaggtgaaaattaagctcaataaaaaagatgacaaaggccgggacaaagggaaaggcaagaaaaggccaaatcgaggaaaagccaaacctgtagtgagcgattttgacagcgatgaggagcaggatgaacgtgaacagtcagaaggaagtgggacggatgatgagtgatcagtatggacctttttccttggtagaactgaattccttcctcccctgtctcatttctacccagtgagttcatttgtcatataggcactgggttgtttctatatcatcatcgtctataaactagctttaggatagtgccagacaaacatatgatatcatggtgtaaaaaacacacacatacacaaatatttgtaacatattgtgaccaaatgggcctcaaagattcagattgaaacaaacaaaaagcttttgatggaaaatatgtgggtggatagtatatttctatgggtgggtctaatttggtaacggtttgattgtgcctggttttatcacctgttcagatgagaagatttttgtcttttgtagcactgataaccaggagaagccattaaaagccactggttattttatttttcatcaggcaattttcgaggtttttatttgttcggtattgtttttttacactgtggtacatataagcaactttaataggtgataaatgtacagtagttagatttcacctgcatatacatttttccattttatgctctatgatctgaacaaaagctttttgaattgtataagatttatgtctactgtaaacattgcttaatttttttgctcttgatttaaaaaaaagttttgttgaaagcgctattgaatattgcaatctatatagtgtattggatggcttcttttgtcaccctgatctcctatgttaccaatgtgtatcgtctccttctccctaaagtgtacttaatctttgctttctttgcacaatgtctttggttgcaagtcataagcctgaggcaaataaaattccagtaatttcgaa

SEQ ID NO: 306333 - DNA, 5772 bp, Homo sapiens
gtagaaaataagagatttattcccctttttaaatcaaaaccagattccatgcttcagccgccccctaacccgccagccccgcccccagggtttgtttttccatatttttgtatatattttagcgaagatggcaggtgagggaaggttatagtgctgtacctagtccacgaagtaaacagagaggttagggtgggtttacttatttataaggcgttcagcctctcagctgtttctccctcgttggcatttggaagcttgcagtccttcagggaagagacagatttggcaggaacgttctttgtgcccgcctcccttttctattttttatttttttacctggaatagggggcagatttataatgacagccttagggaagggggagaaaaagtttcagccggcacgacaatgcccgttttttccacagtccacactgtgccacaaacagctttggtgccactcggagcccgtcccccgtcccctccctctctctctgcaggctcgcactggcaggcggaggcacagttaaattccagcaccttctccacatacccccgaactactacgcgctattactacggctgccctccgttttcgcttcgcctcctccccttccgcagtctccctggaggagccccgcggcgcccgaggaagaggactgccagggaagggacagcgggcgcccagctccagcagggcttggggctttctgcatcccgcgcagtttctctgctccaggcacaaacgcggcccgagagccggcgccttgcagtcacacacggatccacgcatacagtagagctgtctagatccacattcttgcacaccgccccctcctccccccgcgctcccggagtcgctgagctgagcgagtgacaggcgcgtcccgccaacccgcgcccggacgggcagggaggagcggcgcgcggggccaactgcggcgcgtcttccggcgcccgcggaggaggcgagggtgggacgctgggcggagcccgagtttaggaagaggaggggacggctgtcatcaatgaagtcatattcataatctagtcctctctccctctgtttctgtactctgggtgactcagagagggaagagattcagccagcacactcctcgcgagcaagcattactctactgactggcagagacaggagaggtagatgtccacgcccacagaccctggtgcgatgccccacccagggccttcgccggggcctgggccttcccctgggccaattcttgggcctagtccaggaccaggaccatccccaggttccgtccacagcatgatggggccaagtcctggacctccaagtgtctcccatcctatgccgacgatggggtccacagacttcccacaggaaggcatgcatcaaatgcataagcccatcgatggtatacatgacaaggggattgtagaagacatccattgtggatccatgaagggcactggtatgcgaccacctcacccaggcatgggccctccccagagtccaatggatcaacacagccaaggttatatgtcaccacacccatctccattaggagccccagagcacgtctccagccctatgtctggaggaggcccaactccacctcagatgccaccaagccagccgggggccctcatcccaggtgatccgcaggccatgagccagcccaacagaggtccctcacctttcagtcctgtccagctgcatcagcttcgagctcagattttagcttataaaatgctggcccgaggccagcccctccccgaaacgctgcagcttgcagtccaggggaaaaggacgttgcctggcttgcagcaacaacagcagcagcaacagcagcagcagcagcagcagcagcagcagcagcagcagcaacagcagccgcagcagcagccgccgcaaccacagacgcagcaacaacagcagccggcccttgttaactacaacagaccatctggcccggggccggagctgagcggcccgagcaccccgcagaagctgccggtgcccgcgcccggcggccggccctcgcccgcgccccccgcagccgcgcagccgcccgcggccgcagtgcccgggccctcagtgccgcagccggccccggggcagccctcgcccgtcctccagctgcagcagaagcagagccgcatcagccccatccagaaaccgcaaggcctggaccccgtggaaattctgcaagagcgggaatacagacttcaggcccgcatagctcataggatacaagaactggaaaatctgcctggctctttgccaccagatttaagaaccaaagcaaccgtggaactaaaagcacttcggttactcaatttccagcgtcagctgagacaggaggtggtggcctgcatgcgcagggacacgaccctggagacggctctcaactccaaagcatacaaacggagcaagcgccagactctgagagaagctcgcatgaccgagaagctggagaagcagcagaagattgagcaggagaggaaacgccgtcagaaacaccaggaatacctgaacagtattttgcaacatgcaaaagattttaaggaatatcatcggtctgtggccggaaagatccagaagctctccaaagcagtggcaacttggcatgccaacactgaaagagagcagaagaaggagacagagcggattgaaaaggagagaatgcggcgactgatggctgaagatgaggagggttatagaaaactgattgatcaaaagaaagacaggcgtttagcttaccttttgcagcagaccgatgagtatgtagccaatctgaccaatctggtttgggagcacaagcaagcccaggcagccaaagagaagaagaagaggaggaggaggaagaagaaggctgaggagaatgcagagggtggggagtctgccctgggaccggatggagagcccatagatgagagcagccagatgagtgacctccctgtcaaagtgactcacacagaaaccggcaaggttctgttcggaccagaagcacccaaagcaagtcagctggacgcctggctggaaatgaatcctggttatgaagttgcccctagatctgacagtgaagagagtgattctgattatgaggaagaggatgaggaagaagagtccagtaggcaggaaaccgaagagaaaatactcctggatccaaatagcgaagaagtttctgagaaggatgctaagcagatcattgagacagctaagcaagacgtggatgatgaatacagcatgcagtacagtgccaggggctcccagtcctactacaccgtggctcatgccatctcggagagggtggagaaacagtctgccctcctaattaatgggaccctaaagcattaccagctccagggcctggaatggatggtttccctgtataataacaacttgaacggaatcttagccgatgaaatggggcttggaaagaccatacagaccattgcactcatcacttatctgatggagcacaaaagactcaatggcccctatctcatcattgttcccctttcgactctatctaactggacatatgaatttgacaaatgggctccttctgtggtgaagatttcttacaagggtactcctgccatgcgtcgctcccttgtcccccagctacggagtggcaaattcaatgtcctcttgactacttatgagtatattataaaagacaagcacattcttgcaaagattcggtggaaatacatgatagtggacgaaggccaccgaatgaagaatcaccactgcaagctgactcaggtcttgaacactcactatgtggcccccagaaggatcctcttgactgggaccccgctgcagaataagctccctgaactctgggccctcctcaacttcctcctcccaacaatttttaagagctgcagcacatttgaacaatggttcaatgctccatttgccatgactggtgaaagggtggacttaaatgaagaagaaactatattgatcatcaggcgtctacataaggtgttaagaccatttttactaaggagactgaagaaagaagttgaatcccagcttcccgaaaaagtggaatatgtgatcaagtgtgacatgtcagctctgcagaagattctgtatcgccatatgcaagccaaggggatccttctcacagatggttctgagaaagataagaaggggaaaggaggtgctaagacacttatgaacactattatgcagttgagaaaaatctgcaaccacccatatatgtttcagcacattgaggaatcctttgctgaacacctaggctattcaaatggggtcatcaatggggctgaactgtatcgggcctcagggaagtttgagctgcttgatcgtattctgccaaaattgagagcgactaatcaccgagtgctgcttttctgccagatgacatctctcatgaccatcatggaggattattttgcttttcggaacttcctttacctacgccttgatggcaccaccaagtctgaagatcgtgctgctttgctgaagaaattcaatgaacctggatcccagtatttcattttcttgctgagcacaagagctggtggcctgggcttaaatcttcaggcagctgatacagtggtcatctttgacagcgactggaatcctcatcaggatctgcaggcccaagaccgagctcaccgcatcgggcagcagaacgaggtccgggtactgaggctctgtaccgtgaacagcgtggaggaaaagatcctcgcggccgcaaaatacaagctgaacgtggatcagaaagtgatccaggcgggcatgtttgaccaaaagtcttcaagccacgagcggagggcattcctgcaggccatcttggagcatgaggaggaaaatgaggaagaagatgaagtaccggacgatgagactctgaaccaaatgattgctcgacgagaagaagaatttgacctttttatgcggatggacatggaccggcggagggaagatgcccggaacccgaaacggaagccccgtttaatggaggaggatgagctgccctcctggatcattaaggatgacgctgaagtagaaaggctcacctgtgaagaagaggaggagaaaatatttgggagggggtcccgccagcgccgtgacgtggactacagtgacgccctcacggagaagcagtggctaaggtcgctactccaggtggagtcagctggtcgtcagaaatgcagaagtctgaaaagacatctcaagacaccaatcttaggttctacgatagtaatattgtctacaggagtaactggggaagtcacaaatcttgtaacatcagggaaaaatacctggttattgtttcacttacatacatcttagcagaattcaggcccctctcataatcctaacctgtgggctttcattagttttacaaaggttgtttagttttgggaagggctattatcatccttgcatgaaggttaaactacaaactaaatttctcccaaagttagcttgacctattcccaggaatgactaaggacagcttggcagtcagaagcaaaatggagtcaactatgtcagatttctcttactgtcgtaatttgcaaaggcggttttgctactttccttgcaaattagttggggacttcagcagttctgcatagaccaagaccaagagttttctagtactctcatcaagaagtcacctactctggtcccattttaaatcccctgcatactgtctagaagaatatataacagatgctaacaggatccaatttgttcattgaaatatatcaagttttctccaaattttcaagaccata

SEQ ID NO: 306334 - DNA, 5176 bp, Homo sapiens
gtagaaaataagagatttattcccctttttaaatcaaaaccagattccatgcttcagccgccccctaacccgccagccccgcccccagggtttgtttttccatatttttgtatatattttagcgaagatggcaggtgagggaaggttatagtgctgtacctagtccacgaagtaaacagagaggttagggtgggtttacttatttataaggcgttcagcctctcagctgtttctccctcgttggcatttggaagcttgcagtccttcagggaagagacagatttggcaggaacgttctttgtgcccgcctcccttttctattttttatttttttacctggaatagggggcagatttataatgacagccttagggaagggggagaaaaagtttcagccggcacgacaatgcccgttttttccacagtccacactgtgccacaaacagctttggtgccactcggagcccgtcccccgtcccctccctctctctctgcaggctcgcactggcaggcggaggcacagttaaattccagcaccttctccacatacccccgaactactacgcgctattactacggctgccctccgttttcgcttcgcctcctccccttccgcagtctccctggaggagccccgcggcgcccgaggaagaggactgccagggaagggacagcgggcgcccagctccagcagggcttggggctttctgcatcccgcgcagtttctctgctccaggcacaaacgcggcccgagagccggcgccttgcagtcacacacggatccacgcatacagtagagctgtctagatccacattcttgcacaccgccccctcctccccccgcgctcccggagtcgctgagctgagcgagtgacaggcgcgtcccgccaacccgcgcccggacgggcagggaggagcggcgcgcggggccaactgcggcgcgtcttccggcgcccgcggaggaggcgagggtgggacgctgggcggagcccgagtttaggaagaggaggggacggctgtcatcaatgaagtcatattcataatctagtcctctctccctctgtttctgtactctgggtgactcagagagggaagagattcagccagcacactcctcgcgagcaagcattactctactgactggcagagacaggagaggtagatgtccacgcccacagaccctggtgcgatgccccacccagggccttcgccggggcctgggccttcccctgggccaattcttgggcctagtccaggaccaggaccatccccaggttccgtccacagcatgatggggccaagtcctggacctccaagtgtctcccatcctatgccgacgatggggtccacagacttcccacaggaaggcatgcatcaaatgcataagcccatcgatggtatacatgacaaggggattgtagaagacatccattgtggatccatgaagggcactggtatgcgaccacctcacccaggcatgggccctccccagagtccaatggatcaacacagccaaggttatatgtcaccacacccatctccattaggagccccagagcacgtctccagccctatgtctggaggaggcccaactccacctcagatgccaccaagccagccgggggccctcatcccaggtgatccgcaggccatgagccagcccaacagaggtccctcacctttcagtcctgtccagctgcatcagcttcgagctcagattttagcttataaaatgctggcccgaggccagcccctccccgaaacgctgcagcttgcagtccaggggaaaaggacgttgcctggcttgcagcaacaacagcagcagcaacagcagcagcagcagcagcagcagcagcagcagcagcagcaacagcagccgcagcagcagccgccgcaaccacagacgcagcaacaacagcagccggcccttgttaactacaacagaccatctggcccggggccggagctgagcggcccgagcaccccgcagaagctgccggtgcccgcgcccggcggccggccctcgcccgcgccccccgcagccgcgcagccgcccgcggccgcagtgcccgggccctcagtgccgcagccggccccggggcagccctcgcccgtcctccagctgcagcagaagcagagccgcatcagccccatccagaaaccgcaaggcctggaccccgtggaaattctgcaagagcgggaatacagacttcaggcccgcatagctcataggatacaagaactggaaaatctgcctggctctttgccaccagatttaagaaccaaagcaaccgtggaactaaaagcacttcggttactcaatttccagcgtcagctgagacaggaggtggtggcctgcatgcgcagggacacgaccctggagacggctctcaactccaaagcatacaaacggagcaagcgccagactctgagagaagctcgcatgaccgagaagctggagaagcagcagaagattgagcaggagaggaaacgccgtcagaaacaccaggaatacctgaacagtattttgcaacatgcaaaagattttaaggaatatcatcggtctgtggccggaaagatccagaagctctccaaagcagtggcaacttggcatgccaacactgaaagagagcagaagaaggagacagagcggattgaaaaggagagaatgcggcgactgatggctgaagatgaggagggttatagaaaactgattgatcaaaagaaagacaggcgtttagcttaccttttgcagcagaccgatgagtatgtagccaatctgaccaatctggtttgggagcacaagcaagcccaggcagccaaagagaagaagaagaggaggaggaggaagaagaaggctgaggagaatgcagagggtggggagtctgccctgggaccggatggagagcccatagatgagagcagccagatgagtgacctccctgtcaaagtgactcacacagaaaccggcaaggttctgttcggaccagaagcacccaaagcaagtcagctggacgcctggctggaaatgaatcctggttatgaagttgcccctagatctgacagtgaagagagtgattctgattatgaggaagaggatgaggaagaagagtccagtaggcaggaaaccgaagagaaaatactcctggatccaaatagcgaagaagtttctgagaaggatgctaagcagatcattgagacagctaagcaagacgtggatgatgaatacagcatgcagtacagtgccaggggctcccagtcctactacaccgtggctcatgccatctcggagagggtggagaaacagtctgccctcctaattaatgggaccctaaagcattaccagctccagggcctggaatggatggtttccctgtataataacaacttgaacggaatcttagccgatgaaatggggcttggaaagaccatacagaccattgcactcatcacttatctgatggagcacaaaagactcaatggcccctatctcatcattgttcccctttcgactctatctaactggacatatgaatttgacaaatgggctccttctgtggtgaagatttcttacaagggtactcctgccatgcgtcgctcccttgtcccccagctacggagtggcaaattcaatgtcctcttgactacttatgagtatattataaaagacaagcacattcttgcaaagattcggtggaaatacatgatagtggacgaaggccaccgaatgaagaatcaccactgcaagctgactcaggtcttgaacactcactatgtggcccccagaaggatcctcttgactgggaccccgctgcagaataagctccctgaactctgggccctcctcaacttcctcctcccaacaatttttaagagctgcagcacatttgaacaatggttcaatgctccatttgccatgactggtgaaagggtggacttaaatgaagaagaaactatattgatcatcaggcgtctacataaggtgttaagaccatttttactaaggagactgaagaaagaagttgaatcccagcttcccgaaaaagtggaatatgtgatcaagtgtgacatgtcagctctgcagaagattctgtatcgccatatgcaagccaaggggatccttctcacagatggttctgagaaagataagaaggggaaaggaggtgctaagacacttatgaacactattatgcagttgagaaaaatctgcaaccacccatatatgtttcagcacattgaggaatcctttgctgaacacctaggctattcaaatggggtcatcaatggggctgaactgtatcgggcctcagggaagtttgagctgcttgatcgtattctgccaaaattgagagcgactaatcaccgagtgctgcttttctgccagatgacatctctcatgaccatcatggaggattattttgcttttcggaacttcctttacctacgccttgatggcaccaccaagtctgaagatcgtgctgctttgctgaagaaattcaatgaacctggatcccagtatttcattttcttgctgagcacaagagctggtggcctgggcttaaatcttcaggcagctgatacagtggtcatctttgacagcgactggaatcctcatcaggtctgcatgtcccactcaggtgcccaggcctccctctggagagcaactaaaagatgatcagtttcattattcacatttacaggacagagcaaatatctaaacgagtgggctgttgctttcttggagccaattcttctggctgttttcttatctcccttagagcatagatacgaggtcccacatatgcctttgaagagctgaagtttgaggtagaaaaacttagtttctccttagttttaatcccatctcttgggattgccattgaacaaagtatatttaatgagggataagtcaaaaatgttgcaaaatcatagcagtaagaacaatagcaaccatcattcatgggacccttaatctgtgtcagcctcttgggcattttttcattcagttttacgacaaccctgtcagacggttaatatgatttgaatctttgcagtcaaggaaactgaatcctaggcagggtaagtaacttccccaaggccaaatagtattacagtagttaaccttttattttgtgttttatttaaagtcatcatcaaaacatattctaatgagcat

SEQ ID NO: 306335 - DNA, 1007 bp, Homo sapiens
acgggtgcagtgtgcctttaagaaaagaggtgcctcactaaacttcgctgtagttgtgtttcaccgtctcggtagggaaggaaagtgttaatttcttatttgtacactttttttccccgacttccttcctattcacttcattaaatctagaggcagttgagcatgggagccgtctgtatgttgaattagggctcgcactcttgcgcaacacgtcaccagtcggaaactgggggtttgcttctgtgatttatttcattattgtgctggtaaactgatgaagagactagcagctcgctgctttgctggcttgttaattttatccccactaactgtgatttctgatagccggcctgctgatagtggtaaggccatcgaagacggcaatttggaggaaatggaagaggaagtacggcttaagaagcgaaaaagacgaagaaatgtggataaagatcctgcaaaagaagatgtggaaaaagctaagaagagaagaggccgccctcccgctgagaaactgtcaccaaatccccccaaactgacaaagcagatgaacgctatcatcgatactgtgataaactacaaagataggtgtaacgtggagaaggtgcccagtaattctcagttggaaatagaaggaaacagttcagggcgacagctcagtgaagtcttcattcagttaccttcaaggaaagaattaccagaatactatgaattaattaggaagccagtggatttcaaaaaaataaaggaaaggattcgtaatcataagtaccggagcctaggcgacctggagaaggatgtcatgcttctctgtcacaacgctcagacgttcaacctggagggatcccagatctatgaagactccatcgtcttacagtcagtgtttaagagtgcccggcagaaaattgccaaagaggaagagagtgaggatgaaagcaatgaagaggaggaagaggaagatgaagaagagtcagagtccgagggtaagcccagacattcgggtcctgtac

SEQ ID NO: 306336 - DNA, 588 bp, Homo sapiens
acgggtgcagtgtgcctttaagaaaagaggtgcctcactaaacttcgctgtagttgtgtttcaccgtctcggtagggaaggaaagtgttaatttcttatttgtacactttttttccccgacttccttcctattcacttcattaaatctagaggcagttgagcatgggagccgtctgtatgttgaattagggctcgcactcttgcgcaacacgtcaccagtcggaaactgggggtttgcttctgtgatttatttcattattgtgctggtaaactgatgaagagactagcagctcgctgctttgctggcttgttaattttatccccactaactgtgatttctgatagccggcctgctgatagtggtaagtgctgctggctctggtttaaagcaagcgtttgcaggtaattggaaaaaagtgtttattgtttgtgagtgtgtgtgttctttatcgaatgatttaagtgcgtttaccaaggaatgtggctttgtactttcccgtttccttgtttactaattgccacgttagaacaaaaatctagatggaattttgatttatattgttaatcatgaataaattgatgcaaaac

SEQ ID NO: 306337 - DNA, 418 bp, Homo sapiens
ggcagccctcgcccgtcctccagctgcagcagaagcagagccgcatcagccccatccagaaaccgcaaggcctggaccccgtggaaattctgcaagagcgggaatacaggtaacgcaccccgccagcaaggggccccctgcggtgtgctagcacctgccgcccaagccgaggggggtgaggcgcctgcctccttggttggccaaactgtgattttcacccgtgcggtcggaaaactttcatccactcctggggccttcccggtgctgaggggaggcaccggggttttgaagatcaaaagccgacggggacttcctgtggacccgagagagtgatcatctcacactgcgactgtggaatacactgtccgtgtttgtgcttgtgcggttcggtgatgacggaggggctgggacgctgagt

SEQ ID NO: 306338 - DNA, 381 bp, Homo sapiens
agcacccaaagcaagtcagctggacgcctggctggaaatgaatcctgggtaaggcatgaaagcagcgttcatggtgttcttttagctttttagattttggtaatcttgtacgatctcgaaactaaaactacacagcctttgctgagatggttgaagttgttacttggatttgtcttttatacatagaatgtgctattaagtcatgtgtgtctttattgtattgtaatttaaaaaactaagccccctcctcttcctcactctttttccttagttatgaagttgcccctagatctgacagtgaagagagtgattctgattatgaggaagaggtatgtatgtatctctgtttggggtttattggtttgaaagttatcagaggaa

SEQ ID NO: 306339 - DNA, 408 bp, Homo sapiens
ctctctatatttatgtattctttagtttttttcttacaagatttttttatgaaccacaaacttgtcatgttttgtgacagtttgttttgaacttatctcctatttccacacctttaaaataaatatcttgttgagatatgttatattctgtagcccctttcaaggtgaggcctgaacatgaataagaacatctttttaaccattgatttttatacaaatgtcttttttctgttgttttttttttttgttccataggactctatctaactggacatatgaatttgacaaatgggctccttctgtggtgaagatttcttacaaggtttggaatgctgtatttatatataaatgtggaaaagcaaaaaatagaccctattttcttcattccatatgcacatctgtgaactg

SEQ ID NO: 306340 - DNA, 276 bp, Homo sapiens
cctggttgtttttatagctattttattatctctctgcattagtgctgctggctctggtttaaagcaagcgtttgcaggtaattggaaaaaagtgtttattgtttgtgagtgtgtgtgttctttatcgaatgatttaagtgcgtttaccaaggaatgtggctttgtactttcccgtttccttgtttactaattgccacgttagaacaaaaatctagatggaattttgatttatattgttaatcatgaataaattgatgcaaaacctgaagaaaaggt

SEQ ID NO: 306341 - DNA, 371 bp, Homo sapiens
gtagcgtaagttaatcacaagaaagacattatgtctaactcaggaactgctatataattaaagaagctttgaaccacaaggtgtgtaggtgactgaaaaaacctatggtcctttgtcctttgtataagaagcccagtgtgaaggatctgaaatgtctgaccagttaataattaattctatttttccctttccactggttcttaggggaaaggaggtgctaagacacttatgaacactattatgcagttgagaaaaatctgcaaccacccatatatgtttcagcacattgaggtaagtctgtattgtgtgttttgagcctgattgtgctaatcatactaatgctagttaaaaaaaaacaaacaaacaggaaa

SEQ ID NO: 306342 - DNA, 413 bp, Homo sapiens
ataataagcctctcttacaggtggacttaaatgaagaagaaactatattgatcatcaggcgtctacataaggtgttaagaccatttttactaaggagactgaagaaagaagttgaatcccagcttcccgaaaaagtatgttgcacaaccaaaagttgtgggttttttttttcctccagcaaatatatttgaagtacctgcctctgaaattgtgtttctgaaacagcagactcatattgtagttaatagtatcttgaaaatatcttaaattgtttttttgtttgatagggctagagagagcagggaaattatagcatttgcagcctgttttccaaaagcgttcgagcagattttatgaaattatcaaattcactgagtctcatttacattttaattttagattttttttttttt

SEQ ID NO: 306343 - DNA, 162 bp, Homo sapiens
tggaaaaagctaagaagagaagaggccgccctcccgctgagaaactgtcaccaaatccccccaaactgacaaagcagatgaacgctatcatcgatactgtgataaactacaaagataggtgagtgtttggttccttcaccttgatcatctctcaccaagacg

SEQ ID NO: 306344 - DNA, 842 bp, Homo sapiens
tggaattcggacccgagtagcataactcagtctagtgtgctatgtctgactgggcagcaaggtagaagagtgggcagaagctcctaataccttgccttttgaaatacccttcatttcatccattcactttccagaggatggtttcctggcacccacattattttctttctggaaagataaatttcccttttcctagtttgattttccttcaacacattaccattttggtaaaatttcagaattatgatctcaccccagccttaacccttgatgcaagcattttcaaatacatttttctttaggagatgtcaaatgcagggtatttttttttctcccatgaattttctaaaacctggggctgaaaaagagaaaatattagccataaacctttcaagccaaagtgaaagggcacaaacaatagcttagagggtgggctttgctttggggtttttcagtaagaaaaacttctcagcttagagactgtcgatgcctctttaatgtgtttctgtcctcccacggaaagagatttggcgagttgtttccaaaatgtcattttttcctactggcctcttgatggtttgttgttatatcttctttttcttgcatgtgatgttacttcattttatcttcttatttttacttttaggaacagtcagaaggaagtgggacggatgatgagtgatcagtatggacctttttccttggtagaactgaattccttcctcccctgtctcatttctacccagtgagttcatttgtcatataggcactgggttgtttctatatcatcatcgtctataaactagctttaggatagtgccagacaaacatatgatatcatg

SEQ ID NO: 306345 - DNA, 4106 bp, Homo sapiens
gccgggagggcgggctcggctccccggaagaagggagtgggaaggcggccaaaggggctgaaggggcgggccgggccggcttgggaggggacgcggagggggcgggccgggctgcgttcgctccagccgcggctctacagcagcgggcggcgggacccgggacccagcttggcgacggcgatctcgacgcgggcccccaggatctcccggcgccccacctctggagcagcccctgccgccagcgtcaggtccaccccggaatcccagggactctcggcgccgaacggacccgggccgggtgcaacggggtccccggactggagaagacgcgggtggcaccgtgcgagctccaggagccccgggtccactgcgaggcctcggggggcgcagacctgcagagactgcggccaacgggaagaaataaagggattatagtccacccaattcacagacttctgagactcagacacgaggagagatagagaaccgccaatctctagatcaacaagcaaaggaggtgccaagcctgtttgtcttcattgtgacactggagtctagatgctgggaagtccaagatcagggtgccggcatggtcagttcctggcgaagcctctcttctaggtttcagactgccctcttctttgttgtgtcctcgaatggcagaaaaaggggtggctgttggaggaagggaggagagtaaatgaagagaaagaactggaataaccccttgcagaaaaaaaaaaaaagggaagcaagcttagctgtacaccctgagtcttgcaaaagctgcagccccacccaggagcagggtggtggctggggcgatggtggacgccctgaagatgtcccatggctactgaaggggctgcccagttagggaacagagtggcgggcatggtgtgtagcctatgggtgctgctcctggtgtcttcagttctggctctggaagaggtattgctggacaccaccggagagacatctgagattggctggctcacctacccaccaggggggtgggacgaggtgagtgttctggacgaccagcgacgcctgactcggacctttgaggcatgtcatgtggcaggggcccctccaggcaccgggcaggacaattggttgcagacacactttgtggagcggcgcggggcccagagggcgcacattcgactccacttctctgtgcgggcatgctccagcctgggtgtgagcggcggcacctgccgggagaccttcaccctttactaccgtcaggctgaggagcccgacagccctgacagcgtttcctcctggcacctcaaacgctggaccaaggtggacacaattgcagcagacgagagctttccctcctcctcctcctcctcctcctcttcttcctctgcagcgtgggctgtgggaccccacggggctgggcagcgggctggactgcaactgaacgtcaaagagcggagctttgggcctctcacccaacgcggcttctacgtggccttccaggacacgggggcctgcctggccctggtcgctgtcaggctcttctcctacacctgccctgccgtgctccgatcctttgcttcctttccagagacgcaggccagtggggctgggggggcctccctggtggcagctgtgggcacctgtgtggctcatgcagagccagaggaggatggagtagggggccaggcaggaggcagcccccccaggctgcactgcaacggggagggcaagtggatggtagctgtcgggggctgccgctgccagcctggataccaaccagcacgaggagacaaggcctgccaagcctgcccacgggggctctataagtcttctgctgggaatgctccctgctcaccatgccctgcccgcagtcacgctcccaacccagcagcccccgtttgcccctgcctggagggcttctaccgggccagttccgacccaccagaggccccctgcactggtcctccatcggctccccaggagctttggtttgaggtgcaaggctcagcactcatgctacactggcgcctgcctcgggagctggggggtcgaggggacctgctcttcaatgtcgtgtgcaaggagtgtgaaggccgccaggaacctgccagcggtggtgggggcacttgtcaccgctgcagggatgaggtccacttcgaccctcgccagagaggcctgactgagagccgagtgttagtggggggactccgggcacacgtaccctacatcttagaggtgcaggctgttaatggggtgtctgagctcagccctgaccctcctcaggctgcagccatcaatgtcagcaccagccatgaagtgccctctgctgtccctgtggtgcaccaggtgagccgggcatccaacagcatcacggtgtcctggccgcagcccgaccagaccaatgggaacatcctggactatcagctccgctactatgaccaggcagaagacgaatcccactccttcaccctgaccagcgagaccaacactgccaccgtgacacagctgagccctggccacatctatggtttccaggtgcgggcccggactgctgccggccacggcccctacgggggcaaagtctatttccagacacttcctcaaggggagctgtcttcccagcttccggaaagactctccttggtgatcggctccatcctgggggctttggccttcctcctgctggcagccatcaccgtgctggcggtcgtcttccagcggaagcggcgtgggactggctacacggagcagctgcagcaatacagcagcccaggactcggggtgaagtattacatcgacccctccacctacgaggacccctgtcaggccatccgagaacttgcccgggaagtcgatcctgcttatatcaagattgaggaggtcattgggacaggctcttttggagaagtgcgccagggccgcctgcagccacggggacggagggagcagactgtggccatccaggccctgtgggccgggggcgccgaaagcctgcagatgaccttcctgggccgggccgcagtgctgggtcagttccagcaccccaacatcctgcggctggagggcgtggtcaccaagagccgacccctcatggtgctgacggagttcatggagcttggccccctggacagcttcctcaggcagcgggagggccagttcagcagcctgcagctggtggccatgcagcggggagtggctgctgccatgcagtacctgtccagctttgccttcgtccatcgctcgctgtctgcccacagcgtgctggtgaatagccacttggtgtgcaaggtggcccgtcttggccacagtcctcagggcccaagttgtttgcttcgctgggcagccccagaggtcattgcacatggaaagcatacaacatccagtgatgtctggagctttgggatactcatgtgggaagtgatgagttatggagaacggccttactgggacatgagtgagcaggaggtactaaatgcaatagagcaggagttccggctgcccccgcctccaggctgtcctcctggattacatctacttatgttggacacttggcagaaggaccgtgcccggcggcctcattttgaccagctggtggctgcatttgacaagatgatccgcaagccagataccctgcaggctggcggggacccaggggaaaggccttcccaggcccttctgacccctgtggccctggactttccttgtctggactcaccccaggcctggctttcagccattggactggagtgctaccaggacaacttctccaagtttggcctctgtaccttcagtgatgtggctcagctcagcctagaagacctgcctgccctgggcatcaccctggctggccaccagaagaagctgctgcaccacatccagctccttcagcaacacctgaggcagcagggctcagtggaggtctgagaatgacgatacccgtgactcagccctggacactggtccgagaagggacatgtgggacgtgagccgggctccaacagcctctgtgagagatgccccacaccaaacccaaccctcccgatggctgcattccctggtcctccgcctctccaccagccccctcctcattaaagggaaagaagggaatttgcaaa

SEQ ID NO: 306346 - DNA, 717 bp, Homo sapiens
  misc_feature (101)..(101): n is a, c, g, or t
taccgcatccgaacgatcccaagcgaattacccctttaggaacaaactgagtcacgcgttcggcgtttagccgccgatcccggctcaagattgggacaacncggctttcacacgggcggcgggacccgggacccagcttggcgacggcgatctcgacgcgggcccccaggatctcccggcgccccacctctggagcagcccctgccgccagcgtcaggtccaccccggaatcccagggactctcggcgccgaacggacccgggccgggtgcaacggggtccccggactggagaagacgcgggtggcaccgtgcgagctccaggagccccgggtccactgcgaggcctcggggggcgcagacctgcagagactgcggccaacgggaagaaataaagggattatagtccacccaattcacagacttctgagactcagacacgaggagagatagagaaccgccaatctctagatcaacaagcaaaggaggtgccaagcctgtttgtcttcattgtgacactggagtctagatgctgggaagtccaagatcagggtgccggcatggtcagttcctggcgaagcctctcttctaggtttcagactgccctcttctttgttgtgtcctcgaatggcagaaaaaggggtggctgttggaggaagggaggagagtaaatgaagagaaagaactggaataaccccttgcagaaaaaaaaaaaaagg

SEQ ID NO: 306347 - DNA, 252 bp, Homo sapiens
ataacaaagtgcaatagacctagtagcttatacacaatagaaatatctttctcacagtctagatgctgggaagtccaagatcagggtgccggcatggtcagttcctggcgaagcctctcttctaggtttcagactgccctcttctttgttgtgtcctcgaatggcagaaaaaggggtggctgttggaggaagggaggagagtaaatgaagagaaagaactggaataaccccttgcagaaaaaaaaaaaaagg

SEQ ID NO: 306348 - DNA, 3838 bp, Homo sapiens
gccgggagggcgggctcggctccccggaagaagggagtgggaaggcggccaaaggggctgaaggggcgggccgggccggcttgggaggggacgcggagggggcgggccgggctgcgttcgctccagccgcggctctacagcagcgggcggcgggacccgggacccagcttggcgacggcgatctcgacgcgggcccccaggatctcccggcgccccacctctggagcagcccctgccgccagcgtcaggtccaccccggaatcccagggactctcggcgccgaacggacccgggccgggtgcaacggggtccccggactggagaagacgcgggtggcaccgtgcgagctccaggagccccgggtccactgcgaggcctcggggggcgcagacctgcagagactgcggccaacgggaagaaataaagggattatagtccacccaattcacagacttctgagactcagacacgaggagagatagagaaccgccaatctctagatcaacaagcaaaggaggtgccaagcctgtttgtcttcattgtgacactggagtctagatgctgggaagtccaagatcagggtgccggcatggtcagttcctggcgaagcctctcttctaggtttcagactgccctcttctttgttgtgtcctcgaatggcagaaaaaggggtggctgttggaggaagggaggagagtaaatgaagagaaagaactggaataaccccttgcagaaaaaaaaaaaaagggaagcaagcttagctgtacaccctgagtcttgcaaaagctgcagccccacccaggagcagggtggtggctggggcgatggtggacgccctgaagatgtcccatggctactgaaggggctgcccagttagggaacagagtggcgggcatggtgtgtagcctatgggtgctgctcctggtgtcttcagttctggctctggaagaggtattgctggacaccaccggagagacatctgagattggctggctcacctacccaccaggggggtgggacgaggtgagtgttctggacgaccagcgacgcctgactcggacctttgaggcatgtcatgtggcaggggcccctccaggcaccgggcaggacaattggttgcagacacactttgtggagcggcgcggggcccagagggcgcacattcgactccacttctctgtgcgggcatgctccagcctgggtgtgagcggcggcacctgccgggagaccttcaccctttactaccgtcaggctgaggagcccgacagccctgacagcgtttcctcctggcacctcaaacgctggaccaagagacgcaggccagtggggctgggggggcctccctggtggcagctgtgggcacctgtgtggctcatgcagagccagaggaggatggagtagggggccaggcaggaggcagcccccccaggctgcactgcaacggggagggcaagtggatggtagctgtcgggggctgccgctgccagcctggataccaaccagcacgaggagacaaggcctgccaagcctgcccacgggggctctataagtcttctgctgggaatgctccctgctcaccatgccctgcccgcagtcacgctcccaacccagcagcccccgtttgcccctgcctggagggcttctaccgggccagttccgacccaccagaggccccctgcactggtcctccatcggctccccaggagctttggtttgaggtgcaaggctcagcactcatgctacactggcgcctgcctcgggagctggggggtcgaggggacctgctcttcaatgtcgtgtgcaaggagtgtgaaggccgccaggaacctgccagcggtggtgggggcacttgtcaccgctgcagggatgaggtccacttcgaccctcgccagagaggcctgactgagagccgagtgttagtggggggactccgggcacacgtaccctacatcttagaggtgcaggctgttaatggggtgtctgagctcagccctgaccctcctcaggctgcagccatcaatgtcagcaccagccatgaagtgccctctgctgtccctgtggtgcaccaggtgagccgggcatccaacagcatcacggtgtcctggccgcagcccgaccagaccaatgggaacatcctggactatcagctccgctactatgaccaggcagaagacgaatcccactccttcaccctgaccagcgagaccaacactgccaccgtgacacagctgagccctggccacatctatggtttccaggtgcgggcccggactgctgccggccacggcccctacgggggcaaagtctatttccagacacttcctcaaggggagctgtcttcccagcttccggaaagactctccttggtgatcggctccatcctgggggctttggccttcctcctgctggcagccatcaccgtgctggcggtcgtcttccagcggaagcggcgtgggactggctacacggagcagctgcagcaatacagcagcccaggactcggggtgaagtattacatcgacccctccacctacgaggacccctgtcaggccatccgagaacttgcccgggaagtcgatcctgcttatatcaagattgaggaggtcattgggacaggctcttttggagaagtgcgccagggccgcctgcagccacggggacggagggagcagactgtggccatccaggccctgtgggccgggggcgccgaaagcctgcagatgaccttcctgggccgggccgcagtgctgggtcagttccagcaccccaacatcctgcggctggagggcgtggtcaccaagagccgacccctcatggtgctgacggagttcatggagcttggccccctggacagcttcctcaggcagcgggagggccagttcagcagcctgcagctggtggccatgcagcggggagtggctgctgccatgcagtacctgtccagctttgccttcgtccatcgctcgctgtctgcccacagcgtgctggtgaatagccacttggtgtgcaaggtggcccgtcttggccacagtcctcagggcccaagttgtttgcttcgctgggcagccccagaggtcattgcacatggaaagcatacaacatccagtgatgtctggagctttgggatactcatgtgggaagtgatgagttatggagaacggccttactgggacatgagtgagcaggaggtactaaatgcaatagagcaggagttccggctgcccccgcctccaggctgtcctcctggattacatctacttatgttggacacttggcagaaggaccgtgcccggcggcctcattttgaccagctggtggctgcatttgacaagatgatccgcaagccagataccctgcaggctggcggggacccaggggaaaggccttcccaggcccttctgacccctgtggccctggactttccttgtctggactcaccccaggcctggctttcagccattggactggagtgctaccaggacaacttctccaagtttggcctctgtaccttcagtgatgtggctcagctcagcctagaagacctgcctgccctgggcatcaccctggctggccaccagaagaagctgctgcaccacatccagctccttcagcaacacctgaggcagcagggctcagtggaggtctgagaatgacgatacccgtgactcagccctggacactggtccgagaagggacatgtgggacgtgagccgggctccaacagcctctgtgagagatgccccacaccaaacccaaccctcccgatggctgcattccctggtcctccgcctctccaccagccccctcctcattaaagggaaagaagggaatttgcaaa

SEQ ID NO: 306349 - DNA, 2308 bp, Homo sapiens
ggtcaggcactgaagcctggtcaggcactgaagcctggtcaggcactgaagcctggtcaggcactgaagcctggtcaggcactgaagcctggtcaggcactgaagcctggtcaggcactgaagcccggtcaggcactgaagcctggtcaggcactgaggcctggtcaggcactgaagcctggtcaggcactgaagcctggtcaggcactgaagcctggcgcctgcctcgggagctggggggtcgaggggacctgctcttcaatgtcgtgtgcaaggagtgtgaaggccgccaggaacctgccagcggtggtgggggcacttgtcaccgctgcagggatgaggtccacttcgaccctcgccagagaggcctgactgagagccgagtgttagtggggggactccgggcacacgtaccctacatcttagaggtgcaggctgttaatggggtgtctgagctcagccctgaccctcctcaggctgcagccatcaatgtcagcaccagccatgaagtgccctctgctgtccctgtggtgcaccaggtgagccgggcatccaacagcatcacggtgtcctggccgcagcccgaccagaccaatgggaacatcctggactatcagctccgctactatgaccaggcagaagacgaatcccactccttcaccctgaccagcgagaccaacactgccaccgtgacacagctgagccctggccacatctatggtttccaggtgcgggcccggactgctgccggccacggcccctacgggggcaaagtctatttccagacacttcctcaaggggagctgtcttcccagcttccggaaagactctccttggtgatcggctccatcctgggggctttggccttcctcctgctggcagccatcaccgtgctggcggtcgtcttccagcggaagcggcgtgggactggctacacggagcagctgcagcaatacagcagcccaggactcggggtgaagtattacatcgacccctccacctacgaggacccctgtcaggccatccgagaacttgcccgggaagtcgatcctgcttatatcaagattgaggaggtcattgggacaggctcttttggagaagtgcgccagggccgcctgcagccacggggacggagggagcagactgtggccatccaggccctgtgggccgggggcgccgaaagcctgcagatgaccttcctgggccgggccgcagtgctgggtcagttccagcaccccaacatcctgcggctggagggcgtggtcaccaagagccgacccctcatggtgctgacggagttcatggagcttggccccctggacagcttcctcaggcagcgggagggccagttcagcagcctgcagctggtggccatgcagcggggagtggctgctgccatgcagtacctgtccagctttgccttcgtccatcgctcgctgtctgcccacagcgtgctggtgaatagccacttggtgtgcaaggtggcccgtcttggccacagtcctcagggcccaagttgtttgcttcgctgggcagccccagaggtcattgcacatggaaagcatacaacatccagtgatgtctggagctttgggatactcatgtgggaagtgatgagttatggagaacggccttactgggacatgagtgagcaggaggtactaaatgcaatagagcaggagttccggctgcccccgcctccaggctgtcctcctggattacatctacttatgttggacacttggcagaaggaccgtgcccggcggcctcattttgaccagctggtggctgcatttgacaagatgatccgcaagccagataccctgcaggctggcggggacccaggggaaaggccttcccaggcccttctgacccctgtggccctggactttccttgtctggactcaccccaggcctggctttcagccattggactggagtgctaccaggacaacttctccaagtttggcctctgtaccttcagtgatgtggctcagctcagcctagaagacctgcctgccctgggcatcaccctggctggccaccagaagaagctgctgcaccacatccagctccttcagcaacacctgaggcagcagggctcagtggaggtctgagaatgacgatacccgtgactcagccctggacactggtccgagaagggacatgtgggacgtgagccgggctccaacagcctctgtgagagatgccccacaccaaacccaaccctcccgatggctgcattccctggtcctccgcctctccaccagccccctcctcattaaagggaaagaagggaatttgcaaa

SEQ ID NO: 306350 - DNA, 3118 bp, Homo sapiens
gccgggagggcgggctcggctccccggaagaagggagtgggaaggcggccaaaggggctgaaggggcgggccgggccggcttgggaggggacgcggagggggcgggccgggctgcgttcgctccagccgcggctctacagcagcgggcggcgggacccgggacccagcttggcgacggcgatctcgacgcgggcccccaggatctcccggcgccccacctctggagcagcccctgccgccagcgtcaggtccaccccggaatcccagggactctcggcgccgaacggacccgggccgggtgcaacggggtccccggactggagaagacgcgggtggcaccgtgcgagctccaggagccccgggtccactgcgaggcctcggggggcgcagacctgcagagactgcggccaacgggaagaaataaagggattatagtccacccaattcacagacttctgagactcagacacgaggagagatagagaaccgccaatctctagatcaacaagcaaaggaggtgccaagcctgtttgtcttcattgtgacactggagtctagatgctgggaagtccaagatcagggtgccggcatggtcagttcctggcgaagcctctcttctaggtttcagactgccctcttctttgttgtgtcctcgaatggcagaaaaaggggtggctgttggaggaagggaggagagtaaatgaagagaaagaactggaataaccccttgcagaaaaaaaaaaaaagggaagcaagcttagctgtacaccctgagtcttgcaaaagctgcagccccacccaggagcagggtggtggctggggcgatggtggacgccctgaagatgtcccatggctactgaaggggctgcccagttagggaacagagtggcgggcatggtgtgtagcctatgggtgctgctcctggtgtcttcagttctggctctggaagaggtattgctggacaccaccggagagacatctgagattggctggctcacctacccaccaggggggtgggacgaggtgagtgttctggacgaccagcgacgcctgactcggacctttgaggcatgtcatgtggcaggggcccctccaggcaccgggcaggacaattggttgcagacacactttgtggagcggcgcggggcccagagggcgcacattcgactccacttctctgtgcgggcatgctccagcctgggtgtgagcggcggcacctgccgggagaccttcaccctttactaccgtcaggctgaggagcccgacagccctgacagcgtttcctcctggcacctcaaacgctggaccaaggtggacacaattgcagcagacgagagctttccctcctcctcctcctcctcctcctcttcttcctctgcagcgtgggctgtgggaccccacggggctgggcagcgggctggactgcaactgaacgtcaaagagcggagctttgggcctctcacccaacgcggcttctacgtggccttccaggacacgggggcctgcctggccctggtcgctgtcaggctcttctcctacacctgccctgccgtgctccgatcctttgcttcctttccagagacgcaggccagtggggctgggggggcctccctggtggcagctgtgggcacctgtgtggctcatgcagagccagaggaggatggagtagggggccaggcaggaggcagcccccccaggctgcactgcaacggggagggcaagtggatggtagctgtcgggggctgccgctgccagcctggataccaaccagcacgaggagacaaggcctgccaagcctgcccacgggggctctataagtcttctgctgggaatgctccctgctcaccatgccctgcccgcagtcacgctcccaacccagcagcccccgtttgcccctgcctggagggcttctaccgggccagttccgacccaccagaggccccctgcactggtcctccatcggctccccaggagctttggtttgaggtgcaaggctcagcactcatgctacactggcgcctgcctcgggagctggggggtcgaggggacctgctcttcaatgtcgtgtgcaaggagtgtgaaggccgccaggaacctgccagcggtggtgggggcacttgtcaccgctgcagggatgaggtccacttcgaccctcgccagagaggcctgactgagagccgagtgttagtggggggactccgggcacacgtaccctacatcttagaggtgcaggctgttaatggggtgtctgagctcagccctgaccctcctcaggctgcagccatcaatgtcagcaccagccatgaagtgccctctgctgtccctgtggtgcaccaggtgagccgggcatccaacagcatcacggtgtcctggccgcagcccgaccagaccaatgggaacatcctggactatcagctccgctactatgaccaggcagaagacgaatcccactccttcaccctgaccagcgagaccaacactgccaccgtgacacagctgagccctggccacatctatggtttccaggtgcgggcccggactgctgccggccacggcccctacgggggcaaagtctatttccagacacttcctcaaggggagctgtcttcccagcttccggaaagactctccttggtgatcggctccatcctgggggctttggccttcctcctgctggcagccatcaccgtgctggcggtcgtcttccagcggaagcggcgtgggactggctacacggagcagctgcagcaatacagcagcccaggactcggggtgaagtattacatcgacccctccacctacgaggacccctgtcaggccatccgagaacttgcccgggaagtcgatcctgcttatatcaagattgaggaggtcattgggacaggctcttttggagaagtgcgccagggccgcctgcagccacggggacggagggagcagactgtggccatccaggccctgtgggccgggggcgccgaaagcctgcagatgaccttcctgggccgggccgcagtgctgggtcagttccagcaccccaacatcctgcggctggagggcgtggtcctccgcctctccaccagccccctcctcattaaagggaaagaagggaatttgcaaa

SEQ ID NO: 306351 - DNA, 600 bp, Homo sapiens
  misc_feature (101)..(101): n is a, c, g, or t
taccgcatccgaacgatcccaagcgaattacccctttaggaacaaactgagtcacgcgttcggcgtttagccgccgatcccggctcaagattgggacaacncggctttcacacgggcggcgggacccgggacccagcttggcgacggcgatctcgacgcgggcccccaggatctcccggcgccccacctctggagcagcccctgccgccagcgtcaggtccaccccggaatcccagggactctcggcgccgaacggacccgggccgggtgcaacggggtccccggactggagaagacgcgggtggcaccgtgcgagctccaggagccccgggtccactgcgaggcctcggggggcgcagacctgcagagactgcggccaacgggaagaaataaagggattatagtccacccaattcacagacttctgagactcagacacgaggagagatagagaaccgccaatctctagatcaacaagcaaaggaggtgccaagcctgtttgtcttcattgtgacactggagggtggctgttggaggaagggaggagagtaaatgaagagaaagaactggaataaccccttgcagaaaaaaaaaaaaagg

SEQ ID NO: 306352 - DNA, 6231 bp, Homo sapiens
agcttcgtcgagaacggaggacaccggcggtccagggtcctgggcagtcgcgccagagctgagcggagggcgcggcgcgagaacgaatctttgtgacattctctctcagcattctttatcccctgtttgctgaagacttcgaccaaagctggtcttagctgttggcattctcctgagaaaaggatagcttcagaaatcagaaaaacatttgggaggtgtctagcccagtggaccttctgaagagcaatgctaagaagacgtttggtttaaagaattaaaaggaagaacaacttaagagcttcttcaaagtttcccgcatgaaaattacttaaacgttgcacacaacgtttcacaaaatcttttgtgaaagaagaaaaggaaattcagtgtgtgagtctcagcaggagttaagctaatgcagcttaaaataatgccgaaaaagaagcgcttatctgcgggcagagtgcccctgattctcttcctgtgccagatgattagtgcactggaagtacctcttgatccaaaacttcttgaagacttggtacagcctccaaccatcacccaacagtctccaaaagattacattattgaccctcgggagaatattgtaatccagtgtgaagccaaagggaaaccgcccccaagcttttcctggacccgtaatgggactcattttgacatcgataaagaccctctggtcaccatgaagcctggcacaggaacgctcataattaacatcatgagcgaagggaaagctgagacctatgaaggagtctatcagtgtacagcaaggaacgaacgcggagctgcagtttctaataacattgttgtccgcccatccagatcaccattgtggaccaaagaaaaacttgaaccaatcacacttcaaagtggtcagtctttagtacttccctgcagacccccaattggattaccaccacctataatattttggatggataattcctttcaaagacttccacaaagtgagagagtttctcaaggtttgaatggggacctttatttttccaatgtcctcccagaggacacccgcgaagactatatctgttatgctagatttaatcatactcaaaccatacagcagaagcaacctatttctgtgaaggtgatttcagctaaatcaagtagagagaggccaccaacatttttaactccagaaggcaatgcaagtaacaaagaggaattaagaggaaatgtgctttcactggagtgcattgcagaaggactgcctaccccaattatttactgggcaaaggaagatggaatgctacccaaaaacaggacagtttataagaactttgagaaaaccttgcagatcattcatgtttcagaagcagactctggaaattaccaatgtatagcaaaaaatgcattaggagccatccaccataccatttctgttagagttaaagcggctccatactggatcacagcccctcaaaatcttgtgctgtccccaggagaggatgggaccttgatctgcagagctaatggcaaccccaaacccagaattagctggttaacaaatggagtcccaatagaaattgcccctgatgaccccagcagaaaaatagatggcgataccattattttttcaaatgttcaagaaagatcaagtgcagtctatcagtgcaatgcctctaatgaatatggatatttactggcaaacgcatttgtaaatgtgctggctgagccaccacgaatcctcacacctgcaaacacactctaccaggtcattgcaaacaggcctgctttactagactgtgccttctttgggtctcctctcccaaccatcgagtggtttaaaggagctaaaggaagtgctcttcatgaagatatttatgttttacatgaaaatggaactttggaaattcctgtggcccaaaaggacagtacaggaacttatacgtgtgttgcaaggaataaattagggatggcgaagaatgaagttcacttagaaatcaaagatcctacatggatcgttaaacagcccgaatatgcagttgtgcaaagagggagcatggtgtcctttgaatgcaaagtgaaacatgatcacaccttatccctcactgtcctgtggctgaaggacaacagggaactgcccagtgatgaaaggttcactgttgacaaggatcatctagtggtagctgatgtcagtgacgatgacagcgggacctacacgtgtgtggccaacaccactctggacagcgtctccgccagcgctgtgcttagcgttgttgctcctactccaactccagctcccgtttacgatgtcccaaatcctccctttgacttagaactgacagatcaacttgacaaaagtgttcagctgtcatggaccccaggcgatgacaacaatagccccattacaaaattcatcatcgaatatgaagatgcaatgcacaagccagggctgtggcaccaccaaactgaagtttctggaacacagaccacagcccagctgaagctgtctccttacgtgaactactccttccgcgtgatggcagtgaacagcattgggaagagcttgcccagcgaggcgtctgagcagtatttgacgaaagcctcagaaccagataaaaaccccacagctgtggaaggactgggatcagagcctgataatttggtgattacgtggaagcccttgaatggtttcgaatctaatgggccaggccttcagtacaaagttagctggcgccagaaagatggtgatgatgaatggacatctgtggttgtggcaaatgtatccaaatatattgtctcaggcacgccaacctttgttccatacctgatcaaagttcaggccctgaatgacatggggtttgcccccgagccagctgtagtcatgggacattctggagaagacctcccaatggtggctcctgggaacgtgcgtgtgaatgtggtgaacagtaccttagccgaggtgcactgggacccagtacctctgaaaagcatccgaggacacctacaaggctatcggatttactattggaagacccagagttcatctaaaagaaacagacgtcacattgagaaaaagatcctcaccttccaaggcagcaagactcatggcatgttgccggggctagagccctttagccactacacactgaatgtccgagtggtcaatgggaaaggggagggcccagccagccctgacagagtctttaatactccagaaggagtccccagtgctccctcgtctttgaagattgtgaatccaacactggactctctcactttggaatgggatccaccgagccacccgaatggcattttgacagagtacaccttaaagtatcagccaattaacagcacacatgaattaggccctctggtagatttgaaaattcctgccaacaagacacggtggactttaaaaaatttaaatttcagcactcgatataagttttatttctatgcacaaacatcagcaggatcaggaagtcaaattacagaggaagcagtaacaactgtggatgaagcgatggcaagccggcaggtggatattgcaactcagggctggttcattggtctgatgtgtgctgttgctctccttatcttaattttgctgattgtttgcttcatcagaagaaacaagggtggtaaatatccagttaaagaaaaggaagatgcccatgctgaccctgaaatccagcctatgaaggaagatgatgggacatttggagaatacagtgatgcagaagaccacaagcctttgaaaaaaggaagtcgaactccttcagacaggactgtgaaaaaagaagatagtgacgacagcctagttgactatggagaaggggttaatggccagttcaatgaggatggctcctttattggacaatacagtggtaagaaagagaaagagccggctgaaggaaacgaaagctcagaggcaccttctcctgtcaacgccatgaattcctttgtttaatttttaagctctttgccaatattccatttctctagaatgtttatcctaagcacttgtttgtcagccctctcatactatgaacatatgggtagagagtatattttctgctgtatgttagtattatgagaatagttacagcaaaaacataactcagtcaaatgatatgttaatatgaactggaatgcaaagtgcatactttttcattcaaaatgggtattcttgatttcctcagaactgataaaaaataatgcaacatcaccaacagatcctgttatttcctctgcaggatacagttcaatatgatgcatgaaaaatgctccacatttaaaggacatacccgtgtatgttatgaaaacatggtttgatactttgtttatactaccctcagctgaacccctatatatgaattccgttttcattgtcaagagtgttactgtagtattctctagaacttcaatgtctttgtggacattgttgtgaaattggtgactatgtatagctgtcgttagtctttttgggagactgttaggaacagtttgtacagtatatacttgctaaatgagttcattatgacagtcacattgctgatgcttactgagaactattacctactcttggctcctgttactccgtaggcttcttaatcttccaggcattacagcagcacagtgttctactttttacatcatttctatgttcggttgtttttaggcataaacaatgtgtattgcagtgcatttcggcatttgtgccatactgaaagaatcaaaaacaaatcatccaaattaaatttcaaacattatttcagagaacacagggcaagacacatacagtgccttcagatattaagcattccacaacatcgtgcattctgtatcagctggtccagtccattctgggtcctagattactgtcattgtctaaaagtaacttttaaaaagcagagttcatgaaaactgcaatgctgggaaaagaaggaaacatgaaaataaaaataagacagtttattagaaatagcatttcctcataagcataaaaagaaaatctttgttgccaactgaagcacatgatgattttgtggtcctttatggtttctattacatgcagtaagaaagatgtcaacatgctagaaaattaattttaaaactaagttattccaacactaaaagcatacaacagcatgccaacagtaatatattattctccaagactttacctatgtaagtgttcaaaactctgcagcattaaacaacgtgtatgcaaattgttatggatacatttcagaatctaagaaatcaggcaagtgcttaaaaggccaacggtccaagggattacatctgcagtttaaaaagtaaatatatattctatcgtattcataaacaatatctatcaaatgggttacctccaaatatgaaaatctataacaacctatggttgaaggaatgctcagtttcatttgccaataaattggtttctcataacttgcatcaagtttaattttaagtaaagctttttatatgtagatattttgttgaatttgtaaatacacttaaaatgtagatgctatatgcttataggtgttacatacaaataaacatgcaatgtttatgttgtactgtataagaggtaagctaattaatgcagtgaatgggattggaaagcatctacttaaatatctattgggttcccccctccccccaccttttttgctgtgaaactgaaatagtgaacttttctacgtattgacagcagatttttcgatgaaatcttcagagctttgcctatggggcacagtaggcctagtaacctggcatgtttgatatatgtaggtaaagcataatttaaagtaatcccaggtaaagatggccctaaatactttcatgtctctatattcatttttcacagatccacctgtctcttgaaaatataaaaagacaaaacaggtttgccttggcatcagagagcacaaagattaaaagttactttaaatttgccaatattttgggagaacaataaaactacattttttcctcttccatactggtagatgcgaaatttatctgtgcatgaaagggtcacttctgtaatagtgcaacagatttggtattaaaaattaaatgtggttttaaaagttcctctctcttttgtaatttatgttcccaattgagtgtgaatgtccaagtaatggtgtatgtaatggtacaggcaaatgtgactggatttccctcaaaaaagtaactattaaacagtcttgatctctttgtgaaaaaaaa

SEQ ID NO: 306353 - DNA, 6601 bp, Homo sapiens
  misc_feature (522)..(522): n is a, c, g, or t
  misc_feature (528)..(528): n is a, c, g, or t
  misc_feature (530)..(530): n is a, c, g, or t
  misc_feature (533)..(533): n is a, c, g, or t
  misc_feature (3651)..(3651): n is a, c, g, or t
  misc_feature (3691)..(3691): n is a, c, g, or t
  misc_feature (3695)..(3696): n is a, c, g, or t
  misc_feature (3813)..(3814): n is a, c, g, or t
  misc_feature (3838)..(3838): n is a, c, g, or t
  misc_feature (3840)..(3840): n is a, c, g, or t
  misc_feature (3859)..(3859): n is a, c, g, or t
agcttcgtcgagaacggaggacaccggcggtccagggtcctgggcagtcgcgccagagctgagcggagggcgcggcgcgagaacgaatctttgtgacattctctctcagcattctttatcccctgtttgctgaagacttcgaccaaagctggtcttagctgttggcattctcctgagaaaaggatagcttcagaaatcagaaaaacatttgggaggtgtctagcccagtggaccttctgaagagcaatgctaagaagacgtttggtttaaagaattaaaaggaagaacaacttaagagcttcttcaaagtttcccgcatgaaaattacttaaacgttgcacacaacgtttcacaaaatcttttgtgaaagaagaaaaggaaattcagtgtgtgagtctcagcaggagttaagctaatgcagcttaaaataatgccgaaaaagaagcgcttatctgcgggcagagtgcccctgattctcttcctgtgccagatgattagtgcactggaagtacctcttgatcnaaaacntnttnaagcttggtacagcctccaaccatcacccaacagtctccaaaagattacattattgaccctcgggagaatattgtaatccagtgtgaagccaaagggaaaccgcccccaagcttttcctggacccgtaatgggactcattttgacatcgataaagaccctctggtcaccatgaagcctggcacaggaacgctcataattaacatcatgagcgaagggaaagctgagacctatgaaggagtctatcagtgtacagcaaggaacgaacgcggagctgcagtttctaataacattgttgtccgcccatccagatcaccattgtggaccaaagaaaaacttgaaccaatcacacttcaaagtggtcagtctttagtacttccctgcagacccccaattggattaccaccacctataatattttggatggataattcctttcaaagacttccacaaagtgagagagtttctcaaggtttgaatggggacctttatttttccaatgtcctcccagaggacacccgcgaagactatatctgttatgctagatttaatcatactcaaaccatacagcagaagcaacctatttctgtgaaggtgatttcagtggatgaattgaatgacactatagctgctaatttgagtgacactgagttttatggtgctaaatcaagtagagagaggccaccaacatttttaactccagaaggcaatgcaagtaacaaagaggaattaagaggaaatgtgctttcactggagtgcattgcagaaggactgcctaccccaattatttactgggcaaaggaagatggaatgctacccaaaaacaggacagtttataagaactttgagaaaaccttgcagatcattcatgtttcagaagcagactctggaaattaccaatgtatagcaaaaaatgcattaggagccatccaccataccatttctgttagagttaaagcggctccatactggatcacagcccctcaaaatcttgtgctgtccccaggagaggatgggaccttgatctgcagagctaatggcaaccccaaacccagaattagctggttaacaaatggagtcccaatagaaattgcccctgatgaccccagcagaaaaatagatggcgataccattattttttcaaatgttcaagaaagatcaagtgcagtctatcagtgcaatgcctctaatgaatatggatatttactggcaaacgcatttgtaaatgtgctggctgagccaccacgaatcctcacacctgcaaacacactctaccaggtcattgcaaacaggcctgctttactagactgtgccttctttgggtctcctctcccaaccatcgagtggtttaaaggagctaaaggaagtgctcttcatgaagatatttatgttttacatgaaaatggaactttggaaattcctgtggcccaaaaggacagtacaggaacttatacgtgtgttgcaaggaataaattagggatggcgaagaatgaagttcacttagaaatcaaagatcctacatggatcgttaaacagcccgaatatgcagttgtgcaaagagggagcatggtgtcctttgaatgcaaagtgaaacatgatcacaccttatccctcactgtcctgtggctgaaggacaacagggaactgcccagtgatgaaaggttcactgttgacaaggatcatctagtggtagctgatgtcagtgacgatgacagcgggacctacacgtgtgtggccaacaccactctggacagcgtctccgccagcgctgtgcttagcgttgttgctcctactccaactccagctcccgtttacgatgtcccaaatcctccctttgacttagaactgacagatcaacttgacaaaagtgttcagctgtcatggaccccaggcgatgacaacaatagccccattacaaaattcatcatcgaatatgaagatgcaatgcacaagccagggctgtggcaccaccaaactgaagtttctggaacacagaccacagcccagctgaagctgtctccttacgtgaactactccttccgcgtgatggcagtgaacagcattgggaagagcttgcccagcgaggcgtctgagcagtatttgacgaaagcctcagaaccagataaaaaccccacagctgtggaaggactgggatcagagcctgataatttggtgattacgtggaagcccttgaatggtttcgaatctaatgggccaggccttcagtacaaagttagctggcgccagaaagatggtgatgatgaatggacatctgtggttgtggcaaatgtatccaaatatattgtctcaggcacgccaacctttgttccatacctgatcaaagttcaggccctgaatgacatggggtttgcccccgagccagctgtagtcatgggacattctggagaagacctcccaatggtggctcctgggaacgtgcgtgtgaatgtggtgaacagtaccttagccgaggtgcactgggacccagtacctctgaaaagcatccgaggacacctacaaggctatcggatttactattggaagacccagagttcatctaaaagaaacagacgtcacattgagaaaaagatcctcaccttccaaggcagcaagactcatggcatgttgccggggctagagccctttagccactacacactgaatgtccgagtggtcaatgggaaaggggagggcccagccagccctgacagagtctttaatactccagaaggagtccccagtgctccctcgtctttgaagattgtgaatccaacactggactctctcactttggaatgggatccaccgagccacccgaatggcattttgacagagtacaccttaaagtatcagccaattaacagcacacatgaattaggccctctggtagatttgaaaattcctgccaacaagacacggtggactttaaaaaatttaaatttcagcactcgatataagttttatttctatgcacaaacatcagcaggatcaggaagtcaaattacagaggaagcagtaacaactgtggatgaagctggtattcttccacctgatgtaggtgcaggcaaagttcaagcagtaaatcccaggatcagcaatcttactgctgcagctgctganacctatgccaatatcagttgggaatatgagggaccagagnatgnnaacttttatgttgaatatggtgtagcaggcagcaaagaagaatggagaaaagaaattgtaaatggttctcggagcttctttgggttaaagggtctaatgccaggaacagcatacaannttcgagttggtgctgtgggggacncnggtttgtgagttcagaggntgtgtttgagacaggcccagcgatggcaagccggcaggtggatattgcaactcagggctggttcattggtctgatgtgtgctgttgctctccttatcttaattttgctgattgtttgcttcatcagaagaaacaagggtggtaaatatccagttaaagaaaaggaagatgcccatgctgaccctgaaatccagcctatgaaggaagatgatgggacatttggagaatacagtgatgcagaagaccacaagcctttgaaaaaaggaagtcgaactccttcagacaggactgtgaaaaaagaagatagtgacgacagcctagttgactatggagaaggggttaatggccagttcaatgaggatggctcctttattggacaatacagtggtaagaaagagaaagagccggctgaaggaaacgaaagctcagaggcaccttctcctgtcaacgccatgaattcctttgtttaatttttaagctctttgccaatattccatttctctagaatgtttatcctaagcacttgtttgtcagccctctcatactatgaacatatgggtagagagtatattttctgctgtatgttagtattatgagaatagttacagcaaaaacataactcagtcaaatgatatgttaatatgaactggaatgcaaagtgcatactttttcattcaaaatgggtattcttgatttcctcagaactgataaaaaataatgcaacatcaccaacagatcctgttatttcctctgcaggatacagttcaatatgatgcatgaaaaatgctccacatttaaaggacatacccgtgtatgttatgaaaacatggtttgatactttgtttatactaccctcagctgaacccctatatatgaattccgttttcattgtcaagagtgttactgtagtattctctagaacttcaatgtctttgtggacattgttgtgaaattggtgactatgtatagctgtcgttagtctttttgggagactgttaggaacagtttgtacagtatatacttgctaaatgagttcattatgacagtcacattgctgatgcttactgagaactattacctactcttggctcctgttactccgtaggcttcttaatcttccaggcattacagcagcacagtgttctactttttacatcatttctatgttcggttgtttttaggcataaacaatgtgtattgcagtgcatttcggcatttgtgccatactgaaagaatcaaaaacaaatcatccaaattaaatttcaaacattatttcagagaacacagggcaagacacatacagtgccttcagatattaagcattccacaacatcgtgcattctgtatcagctggtccagtccattctgggtcctagattactgtcattgtctaaaagtaacttttaaaaagcagagttcatgaaaactgcaatgctgggaaaagaaggaaacatgaaaataaaaataagacagtttattagaaatagcatttcctcataagcataaaaagaaaatctttgttgccaactgaagcacatgatgattttgtggtcctttatggtttctattacatgcagtaagaaagatgtcaacatgctagaaaattaattttaaaactaagttattccaacactaaaagcatacaacagcatgccaacagtaatatattattctccaagactttacctatgtaagtgttcaaaactctgcagcattaaacaacgtgtatgcaaattgttatggatacatttcagaatctaagaaatcaggcaagtgcttaaaaggccaacggtccaagggattacatctgcagtttaaaaagtaaatatatattctatcgtattcataaacaatatctatcaaatgggttacctccaaatatgaaaatctataacaacctatggttgaaggaatgctcagtttcatttgccaataaattggtttctcataacttgcatcaagtttaattttaagtaaagctttttatatgtagatattttgttgaatttgtaaatacacttaaaatgtagatgctatatgcttataggtgttacatacaaataaacatgcaatgtttatgttgtactgtataagaggtaagctaattaatgcagtgaatgggattggaaagcatctacttaaatatctattgggttcccccctccccccaccttttttgctgtgaaactgaaatagtgaacttttctacgtattgacagcagatttttcgatgaaatcttcagagctttgcctatggggcacagtaggcctagtaacctggcatgtttgatatatgtaggtaaagcataatttaaagtaatcccaggtaaagatggccctaaatactttcatgtctctatattcatttttcacagatccacctgtctcttgaaaatataaaaagacaaaacaggtttgccttggcatcagagagcacaaagattaaaagttactttaaatttgccaatattttgggagaacaataaaactacattttttcctcttccatactggtagatgcgaaatttatctgtgcatgaaagggtcacttctgtaatagtgcaacagatttggtattaaaaattaaatgtggttttaaaagttcctctctcttttgtaatttatgttcccaattgagtgtgaatgtccaagtaatggtgtatgtaatggtacaggcaaatgtgactggatttccctcaaaaaagtaactattaaacagtcttgatctctttgtgaaaaaaaa

SEQ ID NO: 306354 - DNA, 6462 bp, Homo sapiens
  misc_feature (522)..(522): n is a, c, g, or t
  misc_feature (528)..(528): n is a, c, g, or t
  misc_feature (530)..(530): n is a, c, g, or t
  misc_feature (533)..(533): n is a, c, g, or t
  misc_feature (3651)..(3651): n is a, c, g, or t
  misc_feature (3691)..(3691): n is a, c, g, or t
  misc_feature (3695)..(3696): n is a, c, g, or t
  misc_feature (3813)..(3814): n is a, c, g, or t
  misc_feature (3838)..(3838): n is a, c, g, or t
  misc_feature (3840)..(3840): n is a, c, g, or t
  misc_feature (3859)..(3859): n is a, c, g, or t
agcttcgtcgagaacggaggacaccggcggtccagggtcctgggcagtcgcgccagagctgagcggagggcgcggcgcgagaacgaatctttgtgacattctctctcagcattctttatcccctgtttgctgaagacttcgaccaaagctggtcttagctgttggcattctcctgagaaaaggatagcttcagaaatcagaaaaacatttgggaggtgtctagcccagtggaccttctgaagagcaatgctaagaagacgtttggtttaaagaattaaaaggaagaacaacttaagagcttcttcaaagtttcccgcatgaaaattacttaaacgttgcacacaacgtttcacaaaatcttttgtgaaagaagaaaaggaaattcagtgtgtgagtctcagcaggagttaagctaatgcagcttaaaataatgccgaaaaagaagcgcttatctgcgggcagagtgcccctgattctcttcctgtgccagatgattagtgcactggaagtacctcttgatcnaaaacntnttnaagcttggtacagcctccaaccatcacccaacagtctccaaaagattacattattgaccctcgggagaatattgtaatccagtgtgaagccaaagggaaaccgcccccaagcttttcctggacccgtaatgggactcattttgacatcgataaagaccctctggtcaccatgaagcctggcacaggaacgctcataattaacatcatgagcgaagggaaagctgagacctatgaaggagtctatcagtgtacagcaaggaacgaacgcggagctgcagtttctaataacattgttgtccgcccatccagatcaccattgtggaccaaagaaaaacttgaaccaatcacacttcaaagtggtcagtctttagtacttccctgcagacccccaattggattaccaccacctataatattttggatggataattcctttcaaagacttccacaaagtgagagagtttctcaaggtttgaatggggacctttatttttccaatgtcctcccagaggacacccgcgaagactatatctgttatgctagatttaatcatactcaaaccatacagcagaagcaacctatttctgtgaaggtgatttcagtggatgaattgaatgacactatagctgctaatttgagtgacactgagttttatggtgctaaatcaagtagagagaggccaccaacatttttaactccagaaggcaatgcaagtaacaaagaggaattaagaggaaatgtgctttcactggagtgcattgcagaaggactgcctaccccaattatttactgggcaaaggaagatggaatgctacccaaaaacaggacagtttataagaactttgagaaaaccttgcagatcattcatgtttcagaagcagactctggaaattaccaatgtatagcaaaaaatgcattaggagccatccaccataccatttctgttagagttaaagcggctccatactggatcacagcccctcaaaatcttgtgctgtccccaggagaggatgggaccttgatctgcagagctaatggcaaccccaaacccagaattagctggttaacaaatggagtcccaatagaaattgcccctgatgaccccagcagaaaaatagatggcgataccattattttttcaaatgttcaagaaagatcaagtgcagtctatcagtgcaatgcctctaatgaatatggatatttactggcaaacgcatttgtaaatgtgctggctgagccaccacgaatcctcacacctgcaaacacactctaccaggtcattgcaaacaggcctgctttactagactgtgccttctttgggtctcctctcccaaccatcgagtggtttaaaggagctaaaggaagtgctcttcatgaagatatttatgttttacatgaaaatggaactttggaaattcctgtggcccaaaaggacagtacaggaacttatacgtgtgttgcaaggaataaattagggatggcgaagaatgaagttcacttagaaatcaaagatcctacatggatcgttaaacagcccgaatatgcagttgtgcaaagagggagcatggtgtcctttgaatgcaaagtgaaacatgatcacaccttatccctcactgtcctgtggctgaaggacaacagggaactgcccagtgatgaaaggttcactgttgacaaggatcatctagtggtagctgatgtcagtgacgatgacagcgggacctacacgtgtgtggccaacaccactctggacagcgtctccgccagcgctgtgcttagcgttgttgctcctactccaactccagctcccgtttacgatgtcccaaatcctccctttgacttagaactgacagatcaacttgacaaaagtgttcagctgtcatggaccccaggcgatgacaacaatagccccattacaaaattcatcatcgaatatgaagatgcaatgcacaagccagggctgtggcaccaccaaactgaagtttctggaacacagaccacagcccagctgaagctgtctccttacgtgaactactccttccgcgtgatggcagtgaacagcattgggaagagcttgcccagcgaggcgtctgagcagtatttgacgaaagcctcagaaccagataaaaaccccacagctgtggaaggactgggatcagagcctgataatttggtgattacgtggaagcccttgaatggtttcgaatctaatgggccaggccttcagtacaaagttagctggcgccagaaagatggtgatgatgaatggacatctgtggttgtggcaaatgtatccaaatatattgtctcaggcacgccaacctttgttccatacctgatcaaagttcaggccctgaatgacatggggtttgcccccgagccagctgtagtcatgggacattctggagaagacctcccaatggtggctcctgggaacgtgcgtgtgaatgtggtgaacagtaccttagccgaggtgcactgggacccagtacctctgaaaagcatccgaggacacctacaaggctatcggatttactattggaagacccagagttcatctaaaagaaacagacgtcacattgagaaaaagatcctcaccttccaaggcagcaagactcatggcatgttgccggggctagagccctttagccactacacactgaatgtccgagtggtcaatgggaaaggggagggcccagccagccctgacagagtctttaatactccagaaggagtccccagtgctccctcgtctttgaagattgtgaatccaacactggactctctcactttggaatgggatccaccgagccacccgaatggcattttgacagagtacaccttaaagtatcagccaattaacagcacacatgaattaggccctctggtagatttgaaaattcctgccaacaagacacggtggactttaaaaaatttaaatttcagcactcgatataagttttatttctatgcacaaacatcagcaggatcaggaagtcaaattacagaggaagcagtaacaactgtggatgaagctggtattcttccacctgatgtaggtgcaggcaaagttcaagcagtaaatcccaggatcagcaatcttactgctgcagctgctganacctatgccaatatcagttgggaatatgagggaccagagnatgnnaacttttatgttgaatatggtgtagcaggcagcaaagaagaatggagaaaagaaattgtaaatggttctcggagcttctttgggttaaagggtctaatgccaggaacagcatacaannttcgagttggtgctgtgggggacncnggtttgtgagttcagaggntgtgtttgagacaggcccagcgatggcaagccggcaggtggatattgcaactcagggctggttcattggtctgatgtgtgctgttgctctccttatcttaattttgctgattgtttgcttcatcagaagaaacaagggtggtaaatatccagttaaagaaaaggaagatgcccatgctgaccctgaaatccagcctatgaaggaagatgatgggacatttggagaatacagtgatgcagaagaccacaagcctttgaaaaaaggaagtcgaactccttcagacaggactgtgaaaaaagaagatagtgacgacagcctagttgactatggagaaggggttaatggccagttcaatgaggatggctcctttattggacaatacagtggtaagaaagagaaagagccggctgaaggaaacgaaagctcagaggcaccttctcctgtcaacgccatgaattcctttgtttaatttttaagctctttgccaatattccatttctctagaatgtttatcctaagcacttgtttgtcagccctctcatactatgaacatatgggtagagagtatattttctgctgtatgttagtattatgagaatagttacagcaaaaacataactcagtcaaatgatatgttaatatgaactggaatgcaaagtgcatactttttcattcaaaatgggtattcttgatttcctcagaactgataaaaaataatgcaacatcaccaacagatcctgttatttcctctgcaggatacagttcaatatgatgcatgaaaaatgctccacatttaaaggacatacccgtgtatgttatgaaaacatggtttgatactttgtttatactaccctcagctgaacccctatatatgaattccgttttcattgtcaagagtgttactgtagtattctctagaacttcaatgtctttgtggacattgttgtgaaattggtgactatgtatagctgtcgttagtctttttgggagactgttaggaacagtttgtacagtatatacttgctaaatgagttcattatgacagtcacattgctgatgcttactgagaactattacctactcttggctcctgttactccgtaggcttcttaatcttccaggcattacagcagcacagtgttctactttttacatcatttctatgttcggttgtttttaggcataaacaatgtgtattgcagtgcatttcggcatttgtgccatactgaaagaatcaaaaacaaatcatccaaattaaatttcaaacattatttcagagaacacagggcaagacacatacagtgccttcagatattaagcattccacaacatcgtgcattctgtatcagctggtccagtccattctgggtcctagattactgtcattgtctaaaagtaacttttaaaaagcagagttcatgaaaactgcaatgctgggaaaagaaggaaacatgaaaataaaaataagacagtttattagaaatagcatttcctcataagcataaaaagaaaatctttgttgccaactgaagcacatgatgattttgtggtcctttatggtttctattacatgcagtaagaaagatgtcaacatgctagaaaattaattttaaaactaagttattccaacactaaaagcatacaacagcatgccaacagtaatatattattctccaagactttacctatgtaagtgttcaaaactctgcagcattaaacaacgtgtatgcaaattgttatggatacatttcagaatctaagaaatcaggcaagtgcttaaaaggccaacggtccaagggattacatctgcagtttaaaaagtaaatatatattctatcgtattcataaacaatatctatcaaatgggttacctccaaatatgaaaatctataacaacctatggttgaaggaatgctcagtttcatttgccaataaattggtttctcataacttgcatcaagtttaattttaagtaaagctttttatatgtagatattttgttgaatttgtaaatacacttaaaatgtagatgctatatgcttataggtgttacatacaaataaacatgcaatgtttatgttgtactgtataagaggtaagctaattaatgcagtgaatgggattggaaagcatctacttaaatatctattgggttcccccctccccccaccttttttgctgtgaaactgaaatagtgaacttttctacgtattgacagcagatttttcgatgaaatcttcagagctttgcctatggggcacagtaggcctagtaacctggcatgtttgatatatgtaggtaaagcataatttaaagtaatcccaggtaaagatggccctaaatactttcatgtctctatattcatttttcacagatccacctgtctcttgaaaatataaaaagacaaaacaggtttgccttggcatcagagagcacaaagattaaaagttactttaaatttgccaatattttgggagaacaataaaactacattttttcctcttccatactggtagatgcgaaatttatctgtgcatgaaagggtcacttctgtaatagtgcaacagatttggtattaaaaattaaatgtggttttaaaagtt

SEQ ID NO: 306355 - DNA, 6547 bp, Homo sapiens
  misc_feature (522)..(522): n is a, c, g, or t
  misc_feature (528)..(528): n is a, c, g, or t
  misc_feature (530)..(530): n is a, c, g, or t
  misc_feature (533)..(533): n is a, c, g, or t
  misc_feature (3651)..(3651): n is a, c, g, or t
  misc_feature (3691)..(3691): n is a, c, g, or t
  misc_feature (3695)..(3696): n is a, c, g, or t
  misc_feature (3813)..(3814): n is a, c, g, or t
  misc_feature (3838)..(3838): n is a, c, g, or t
  misc_feature (3840)..(3840): n is a, c, g, or t
  misc_feature (3859)..(3859): n is a, c, g, or t
agcttcgtcgagaacggaggacaccggcggtccagggtcctgggcagtcgcgccagagctgagcggagggcgcggcgcgagaacgaatctttgtgacattctctctcagcattctttatcccctgtttgctgaagacttcgaccaaagctggtcttagctgttggcattctcctgagaaaaggatagcttcagaaatcagaaaaacatttgggaggtgtctagcccagtggaccttctgaagagcaatgctaagaagacgtttggtttaaagaattaaaaggaagaacaacttaagagcttcttcaaagtttcccgcatgaaaattacttaaacgttgcacacaacgtttcacaaaatcttttgtgaaagaagaaaaggaaattcagtgtgtgagtctcagcaggagttaagctaatgcagcttaaaataatgccgaaaaagaagcgcttatctgcgggcagagtgcccctgattctcttcctgtgccagatgattagtgcactggaagtacctcttgatcnaaaacntnttnaagcttggtacagcctccaaccatcacccaacagtctccaaaagattacattattgaccctcgggagaatattgtaatccagtgtgaagccaaagggaaaccgcccccaagcttttcctggacccgtaatgggactcattttgacatcgataaagaccctctggtcaccatgaagcctggcacaggaacgctcataattaacatcatgagcgaagggaaagctgagacctatgaaggagtctatcagtgtacagcaaggaacgaacgcggagctgcagtttctaataacattgttgtccgcccatccagatcaccattgtggaccaaagaaaaacttgaaccaatcacacttcaaagtggtcagtctttagtacttccctgcagacccccaattggattaccaccacctataatattttggatggataattcctttcaaagacttccacaaagtgagagagtttctcaaggtttgaatggggacctttatttttccaatgtcctcccagaggacacccgcgaagactatatctgttatgctagatttaatcatactcaaaccatacagcagaagcaacctatttctgtgaaggtgatttcagtggatgaattgaatgacactatagctgctaatttgagtgacactgagttttatggtgctaaatcaagtagagagaggccaccaacatttttaactccagaaggcaatgcaagtaacaaagaggaattaagaggaaatgtgctttcactggagtgcattgcagaaggactgcctaccccaattatttactgggcaaaggaagatggaatgctacccaaaaacaggacagtttataagaactttgagaaaaccttgcagatcattcatgtttcagaagcagactctggaaattaccaatgtatagcaaaaaatgcattaggagccatccaccataccatttctgttagagttaaagcggctccatactggatcacagcccctcaaaatcttgtgctgtccccaggagaggatgggaccttgatctgcagagctaatggcaaccccaaacccagaattagctggttaacaaatggagtcccaatagaaattgcccctgatgaccccagcagaaaaatagatggcgataccattattttttcaaatgttcaagaaagatcaagtgcagtctatcagtgcaatgcctctaatgaatatggatatttactggcaaacgcatttgtaaatgtgctggctgagccaccacgaatcctcacacctgcaaacacactctaccaggtcattgcaaacaggcctgctttactagactgtgccttctttgggtctcctctcccaaccatcgagtggtttaaaggagctaaaggaagtgctcttcatgaagatatttatgttttacatgaaaatggaactttggaaattcctgtggcccaaaaggacagtacaggaacttatacgtgtgttgcaaggaataaattagggatggcgaagaatgaagttcacttagaaatcaaagatcctacatggatcgttaaacagcccgaatatgcagttgtgcaaagagggagcatggtgtcctttgaatgcaaagtgaaacatgatcacaccttatccctcactgtcctgtggctgaaggacaacagggaactgcccagtgatgaaaggttcactgttgacaaggatcatctagtggtagctgatgtcagtgacgatgacagcgggacctacacgtgtgtggccaacaccactctggacagcgtctccgccagcgctgtgcttagcgttgttgctcctactccaactccagctcccgtttacgatgtcccaaatcctccctttgacttagaactgacagatcaacttgacaaaagtgttcagctgtcatggaccccaggcgatgacaacaatagccccattacaaaattcatcatcgaatatgaagatgcaatgcacaagccagggctgtggcaccaccaaactgaagtttctggaacacagaccacagcccagctgaagctgtctccttacgtgaactactccttccgcgtgatggcagtgaacagcattgggaagagcttgcccagcgaggcgtctgagcagtatttgacgaaagcctcagaaccagataaaaaccccacagctgtggaaggactgggatcagagcctgataatttggtgattacgtggaagcccttgaatggtttcgaatctaatgggccaggccttcagtacaaagttagctggcgccagaaagatggtgatgatgaatggacatctgtggttgtggcaaatgtatccaaatatattgtctcaggcacgccaacctttgttccatacctgatcaaagttcaggccctgaatgacatggggtttgcccccgagccagctgtagtcatgggacattctggagaagacctcccaatggtggctcctgggaacgtgcgtgtgaatgtggtgaacagtaccttagccgaggtgcactgggacccagtacctctgaaaagcatccgaggacacctacaaggctatcggatttactattggaagacccagagttcatctaaaagaaacagacgtcacattgagaaaaagatcctcaccttccaaggcagcaagactcatggcatgttgccggggctagagccctttagccactacacactgaatgtccgagtggtcaatgggaaaggggagggcccagccagccctgacagagtctttaatactccagaaggagtccccagtgctccctcgtctttgaagattgtgaatccaacactggactctctcactttggaatgggatccaccgagccacccgaatggcattttgacagagtacaccttaaagtatcagccaattaacagcacacatgaattaggccctctggtagatttgaaaattcctgccaacaagacacggtggactttaaaaaatttaaatttcagcactcgatataagttttatttctatgcacaaacatcagcaggatcaggaagtcaaattacagaggaagcagtaacaactgtggatgaagctggtattcttccacctgatgtaggtgcaggcaaagttcaagcagtaaatcccaggatcagcaatcttactgctgcagctgctganacctatgccaatatcagttgggaatatgagggaccagagnatgnnaacttttatgttgaatatggtgtagcaggcagcaaagaagaatggagaaaagaaattgtaaatggttctcggagcttctttgggttaaagggtctaatgccaggaacagcatacaannttcgagttggtgctgtgggggacncnggtttgtgagttcagaggntgtgtttgagacaggcccagcgatggcaagccggcaggtggatattgcaactcagggctggttcattggtctgatgtgtgctgttgctctccttatcttaattttgctgattgtttgcttcatcagaagaaacaagggtggtaaatatccagttaaagaaaaggaagatgcccatgctgaccctgaaatccagcctatgaaggaagatgatgggacatttggagaatacagtgatgcagaagaccacaagcctttgaaaaaaggaagtcgaactccttcagacaggactgtgaaaaaagaagatagtgacgacagcctagttgactatggagaaggggttaatggccagttcaatgaggatggctcctttattggacaatacagtggtaagaaagagaaagagccggctgaaggaaacgaaagctcagaggcaccttctcctgtcaacgccatgaattcctttgtttaatttttaagctctttgccaatattccatttctctagaatgtttatcctaagcacttgtttgtcagccctctcatactatgaacatatgggtagagagtatattttctgctgtatgttagtattatgagaatagttacagcaaaaacataactcagtcaaatgatatgttaatatgaactggaatgcaaagtgcatactttttcattcaaaatgggtattcttgatttcctcagaactgataaaaaataatgcaacatcaccaacagatcctgttatttcctctgcaggatacagttcaatatgatgcatgaaaaatgctccacatttaaaggacatacccgtgtatgttatgaaaacatggtttgatactttgtttatactaccctcagctgaacccctatatatgaattccgttttcattgtcaagagtgttactgtagtattctctagaacttcaatgtctttgtggacattgttgtgaaattggtgactatgtatagctgtcgttagtctttttgggagactgttaggaacagtttgtacagtatatacttgctaaatgagttcattatgacagtcacattgctgatgcttactgagaactattacctactcttggctcctgttactccgtaggcttcttaatcttccaggcattacagcagcacagtgttctactttttacatcatttctatgttcggttgtttttaggcataaacaatgtgtattgcagtgcatttcggcatttgtgccatactgaaagaatcaaaaacaaatcatccaaattaaatttcaaacattatttcagagaacacagggcaagacacatacagtgccttcagatattaagcattccacaacatcgtgcattctgtatcagctggtccagtccattctgggtcctagattactgtcattgtctaaaagtaacttttaaaaagcagagttcatgaaaactgcaatgctgggaaaagaaggaaacatgaaaataaaaataagacagtttattagaaatagcatttcctcataagcataaaaagaaaatctttgttgccaactgaagcacatgatgattttgtggtcctttatggtttctattacatgcagtaagaaagatgtcaacatgctagaaaattaattttaaaactaagttattccaacactaaaagcatacaacagcatgccaacagtaatatattattctccaagactttacctatgtaagtgttcaaaactctgcagcattaaacaacgtgtatgcaaattgttatggatacatttcagaatctaagaaatcaggcaagtgcttaaaaggccaacggtccaagggattacatctgcagtttaaaaagtaaatatatattctatcgtattcataaacaatatctatcaaatgggttacctccaaatatgaaaatctataacaacctatggttgaaggaatgctcagtttcatttgccaataaattggtttctcataacttgcatcaagtttaattttaagtaaagctttttatatgtagatattttgttgaatttgtaaatacacttttatgttgtactgtataagaggtaagctaattaatgcagtgaatgggattggaaagcatctacttaaatatctattgggttcccccctccccccaccttttttgctgtgaaactgaaatagtgaacttttctacgtattgacagcagatttttcgatgaaatcttcagagctttgcctatggggcacagtaggcctagtaacctggcatgtttgatatatgtaggtaaagcataatttaaagtaatcccaggtaaagatggccctaaatactttcatgtctctatattcatttttcacagatccacctgtctcttgaaaatataaaaagacaaaacaggtttgccttggcatcagagagcacaaagattaaaagttactttaaatttgccaatattttgggagaacaataaaactacattttttcctcttccatactggtagatgcgaaatttatctgtgcatgaaagggtcacttctgtaatagtgcaacagatttggtattaaaaattaaatgtggttttaaaagttcctctctcttttgtaatttatgttcccaattgagtgtgaatgtccaagtaatggtgtatgtaatggtacaggcaaatgtgactggatttccctcaaaaaagtaactattaaacagtcttgatctctttgtgaaaaaaaa

SEQ ID NO: 306356 - DNA, 6544 bp, Homo sapiens
  misc_feature (522)..(522): n is a, c, g, or t
  misc_feature (528)..(528): n is a, c, g, or t
  misc_feature (530)..(530): n is a, c, g, or t
  misc_feature (533)..(533): n is a, c, g, or t
  misc_feature (3651)..(3651): n is a, c, g, or t
  misc_feature (3691)..(3691): n is a, c, g, or t
  misc_feature (3695)..(3696): n is a, c, g, or t
  misc_feature (3813)..(3814): n is a, c, g, or t
  misc_feature (3838)..(3838): n is a, c, g, or t
  misc_feature (3840)..(3840): n is a, c, g, or t
  misc_feature (3859)..(3859): n is a, c, g, or t
agcttcgtcgagaacggaggacaccggcggtccagggtcctgggcagtcgcgccagagctgagcggagggcgcggcgcgagaacgaatctttgtgacattctctctcagcattctttatcccctgtttgctgaagacttcgaccaaagctggtcttagctgttggcattctcctgagaaaaggatagcttcagaaatcagaaaaacatttgggaggtgtctagcccagtggaccttctgaagagcaatgctaagaagacgtttggtttaaagaattaaaaggaagaacaacttaagagcttcttcaaagtttcccgcatgaaaattacttaaacgttgcacacaacgtttcacaaaatcttttgtgaaagaagaaaaggaaattcagtgtgtgagtctcagcaggagttaagctaatgcagcttaaaataatgccgaaaaagaagcgcttatctgcgggcagagtgcccctgattctcttcctgtgccagatgattagtgcactggaagtacctcttgatcnaaaacntnttnaagcttggtacagcctccaaccatcacccaacagtctccaaaagattacattattgaccctcgggagaatattgtaatccagtgtgaagccaaagggaaaccgcccccaagcttttcctggacccgtaatgggactcattttgacatcgataaagaccctctggtcaccatgaagcctggcacaggaacgctcataattaacatcatgagcgaagggaaagctgagacctatgaaggagtctatcagtgtacagcaaggaacgaacgcggagctgcagtttctaataacattgttgtccgcccatccagatcaccattgtggaccaaagaaaaacttgaaccaatcacacttcaaagtggtcagtctttagtacttccctgcagacccccaattggattaccaccacctataatattttggatggataattcctttcaaagacttccacaaagtgagagagtttctcaaggtttgaatggggacctttatttttccaatgtcctcccagaggacacccgcgaagactatatctgttatgctagatttaatcatactcaaaccatacagcagaagcaacctatttctgtgaaggtgatttcagtggatgaattgaatgacactatagctgctaatttgagtgacactgagttttatggtgctaaatcaagtagagagaggccaccaacatttttaactccagaaggcaatgcaagtaacaaagaggaattaagaggaaatgtgctttcactggagtgcattgcagaaggactgcctaccccaattatttactgggcaaaggaagatggaatgctacccaaaaacaggacagtttataagaactttgagaaaaccttgcagatcattcatgtttcagaagcagactctggaaattaccaatgtatagcaaaaaatgcattaggagccatccaccataccatttctgttagagttaaagcggctccatactggatcacagcccctcaaaatcttgtgctgtccccaggagaggatgggaccttgatctgcagagctaatggcaaccccaaacccagaattagctggttaacaaatggagtcccaatagaaattgcccctgatgaccccagcagaaaaatagatggcgataccattattttttcaaatgttcaagaaagatcaagtgcagtctatcagtgcaatgcctctaatgaatatggatatttactggcaaacgcatttgtaaatgtgctggctgagccaccacgaatcctcacacctgcaaacacactctaccaggtcattgcaaacaggcctgctttactagactgtgccttctttgggtctcctctcccaaccatcgagtggtttaaaggagctaaaggaagtgctcttcatgaagatatttatgttttacatgaaaatggaactttggaaattcctgtggcccaaaaggacagtacaggaacttatacgtgtgttgcaaggaataaattagggatggcgaagaatgaagttcacttagaaatcaaagatcctacatggatcgttaaacagcccgaatatgcagttgtgcaaagagggagcatggtgtcctttgaatgcaaagtgaaacatgatcacaccttatccctcactgtcctgtggctgaaggacaacagggaactgcccagtgatgaaaggttcactgttgacaaggatcatctagtggtagctgatgtcagtgacgatgacagcgggacctacacgtgtgtggccaacaccactctggacagcgtctccgccagcgctgtgcttagcgttgttgctcctactccaactccagctcccgtttacgatgtcccaaatcctccctttgacttagaactgacagatcaacttgacaaaagtgttcagctgtcatggaccccaggcgatgacaacaatagccccattacaaaattcatcatcgaatatgaagatgcaatgcacaagccagggctgtggcaccaccaaactgaagtttctggaacacagaccacagcccagctgaagctgtctccttacgtgaactactccttccgcgtgatggcagtgaacagcattgggaagagcttgcccagcgaggcgtctgagcagtatttgacgaaagcctcagaaccagataaaaaccccacagctgtggaaggactgggatcagagcctgataatttggtgattacgtggaagcccttgaatggtttcgaatctaatgggccaggccttcagtacaaagttagctggcgccagaaagatggtgatgatgaatggacatctgtggttgtggcaaatgtatccaaatatattgtctcaggcacgccaacctttgttccatacctgatcaaagttcaggccctgaatgacatggggtttgcccccgagccagctgtagtcatgggacattctggagaagacctcccaatggtggctcctgggaacgtgcgtgtgaatgtggtgaacagtaccttagccgaggtgcactgggacccagtacctctgaaaagcatccgaggacacctacaaggctatcggatttactattggaagacccagagttcatctaaaagaaacagacgtcacattgagaaaaagatcctcaccttccaaggcagcaagactcatggcatgttgccggggctagagccctttagccactacacactgaatgtccgagtggtcaatgggaaaggggagggcccagccagccctgacagagtctttaatactccagaaggagtccccagtgctccctcgtctttgaagattgtgaatccaacactggactctctcactttggaatgggatccaccgagccacccgaatggcattttgacagagtacaccttaaagtatcagccaattaacagcacacatgaattaggccctctggtagatttgaaaattcctgccaacaagacacggtggactttaaaaaatttaaatttcagcactcgatataagttttatttctatgcacaaacatcagcaggatcaggaagtcaaattacagaggaagcagtaacaactgtggatgaagctggtattcttccacctgatgtaggtgcaggcaaagttcaagcagtaaatcccaggatcagcaatcttactgctgcagctgctganacctatgccaatatcagttgggaatatgagggaccagagnatgnnaacttttatgttgaatatggtgtagcaggcagcaaagaagaatggagaaaagaaattgtaaatggttctcggagcttctttgggttaaagggtctaatgccaggaacagcatacaannttcgagttggtgctgtgggggacncnggtttgtgagttcagaggntgtgtttgagacaggcccagcgatggcaagccggcaggtggatattgcaactcagggctggttcattggtctgatgtgtgctgttgctctccttatcttaattttgctgattgtttgcttcatcagaagaaacaagggtggtaaatatccagttaaagaaaaggaagatgcccatgctgaccctgaaatccagcctatgaaggaagatgatgggacatttggagaatacagtgatgcagaagaccacaagcctttgaaaaaaggaagtcgaactccttcagacaggactgtgaaaaaagaagatagtgacgacagcctagttgactatggagaaggggttaatggccagttcaatgaggatggctcctttattggacaatacagtggtaagaaagagaaagagccggctgaaggaaacgaaagctcagaggcaccttctcctgtcaacgccatgaattcctttgtttaatttttaagctctttgccaatattccatttctctagaatgtttatcctaagcacttgtttgtcagccctctcatactatgaacatatgggtagagagtatattttctgctgtatgttagtattatgagaatagttacagcaaaaacataactcagtcaaatgatatgttaatatgaactggaatgcaaagtgcatactttttcattcaaaatgggtattcttgatttcctcagaactgataaaaaataatgcaacatcaccaacagatcctgttatttcctctgcaggatacagttcaatatgatgcatgaaaaatgctccacatttaaaggacatacccgtgtatgttatgaaaacatggtttgatactttgtttatactaccctcagctgaacccctatatatgaattccgttttcattgtcaagagtgttactgtagtattctctagaacttcaatgtctttgtggacattgttgtgaaattggtgactatgtatagctgtcgttagtctttttgggagactgttaggaacagtttgtacagtatatacttgctaaatgagttcattatgacagtcacattgctgatgcttactgagaactattacctactcttggctcctgttactccgtaggcttcttaatcttccaggcattacagcagcacagtgttctactttttacatcatttctatgttcggttgtttttaggcataaacaatgtgtattgcagtgcatttcggcatttgtgccatactgaaagaatcaaaaacaaatcatccaaattaaatttcaaacattatttcagagaacacagggcaagacacatacagtgccttcagatattaagcattccacaacatcgtgcattctgtatcagctggtccagtccattctgggtcctagattactgtcattgtctaaaagtaacttttaaaaagcagagttcatgaaaactgcaatgctgggaaaagaaggaaacatgaaaataaaaataagacagtttattagaaatagcatttcctcataagcataaaaagaaaatctttgttgccaactgaagcacatgatgattttgtggtcctttatggtttctattacatgcagtaagaaagatgtcaacatgctagaaaattaattttaaaactaagttattccaacactaaaagcatacaacagcatgccaacagtaatatattattctccaagactttacctatgtaagtgttcaaaactctgcagcattaaacaacgtgtatgcaaattgttatggatacatttcagaatctaagaaatcaggcaagtgcttaaaaggccaacggtccaagggattacatctgcagtttaaaaagtaaatatatattctatcgtattcataaacaatatctatcaaatgggttacctccaaatatgaaaatctataacaacctatggttgaaggaatgctcagtttcatttgccaataaattggtttctcataacttgcatcaagtttaattttaagtaaagctttttatatgtagatattttgttgaatttgtaaatacacttaaaatgtagatgctatatgcttataggtgttacatacaaataaacatgcaatgtttatgttgtactgtataagaggtaagctaattaatgcagtgaatgggattggaaagcatctacttaaatatctattgggttcccccctccccccaccttttttgctgtgaaactgaaatagtgaacttttctacgtattgacagcagatttttcgatgaaatcttcagagctttgcctatggggcacagtaggcctagtaacctggcatgtttgatatatgtaggtaaagcataatttaaagtaatcccaggtaaagatggccctaaatactttcatgtctctatattcatttttcacagatccacctgtctcttgaaaatataaaaagacaaaacaggtttgccttggcatcagagagcacaaagatttcttccatactggtagatgcgaaatttatctgtgcatgaaagggtcacttctgtaatagtgcaacagatttggtattaaaaattaaatgtggttttaaaagttcctctctcttttgtaatttatgttcccaattgagtgtgaatgtccaagtaatggtgtatgtaatggtacaggcaaatgtgactggatttccctcaaaaaagtaactattaaacagtcttgatctctttgtgaaaaaaaa

SEQ ID NO: 306357 - DNA, 6213 bp, Homo sapiens
agcttcgtcgagaacggaggacaccggcggtccagggtcctgggcagtcgcgccagagctgagcggagggcgcggcgcgagaacgaatctttgtgacattctctctcagcattctttatcccctgtttgctgaagacttcgaccaaagctggtcttagctgttggcattctcctgagaaaaggatagcttcagaaatcagaaaaacatttgggaggtgtctagcccagtggaccttctgaagagcaatgctaagaagacgtttggtttaaagaattaaaaggaagaacaacttaagagcttcttcaaagtttcccgcatgaaaattacttaaacgttgcacacaacgtttcacaaaatcttttgtgaaagaagaaaaggaaattcagtgtgtgagtctcagcaggagttaagctaatgcagcttaaaataatgccgaaaaagaagcgcttatctgcgggcagagtgcccctgattctcttcctgtgccagatgattagtgcactggaagtacctcttgatctggtacagcctccaaccatcacccaacagtctccaaaagattacattattgaccctcgggagaatattgtaatccagtgtgaagccaaagggaaaccgcccccaagcttttcctggacccgtaatgggactcattttgacatcgataaagaccctctggtcaccatgaagcctggcacaggaacgctcataattaacatcatgagcgaagggaaagctgagacctatgaaggagtctatcagtgtacagcaaggaacgaacgcggagctgcagtttctaataacattgttgtccgcccatccagatcaccattgtggaccaaagaaaaacttgaaccaatcacacttcaaagtggtcagtctttagtacttccctgcagacccccaattggattaccaccacctataatattttggatggataattcctttcaaagacttccacaaagtgagagagtttctcaaggtttgaatggggacctttatttttccaatgtcctcccagaggacacccgcgaagactatatctgttatgctagatttaatcatactcaaaccatacagcagaagcaacctatttctgtgaaggtgatttcagctaaatcaagtagagagaggccaccaacatttttaactccagaaggcaatgcaagtaacaaagaggaattaagaggaaatgtgctttcactggagtgcattgcagaaggactgcctaccccaattatttactgggcaaaggaagatggaatgctacccaaaaacaggacagtttataagaactttgagaaaaccttgcagatcattcatgtttcagaagcagactctggaaattaccaatgtatagcaaaaaatgcattaggagccatccaccataccatttctgttagagttaaagcggctccatactggatcacagcccctcaaaatcttgtgctgtccccaggagaggatgggaccttgatctgcagagctaatggcaaccccaaacccagaattagctggttaacaaatggagtcccaatagaaattgcccctgatgaccccagcagaaaaatagatggcgataccattattttttcaaatgttcaagaaagatcaagtgcagtctatcagtgcaatgcctctaatgaatatggatatttactggcaaacgcatttgtaaatgtgctggctgagccaccacgaatcctcacacctgcaaacacactctaccaggtcattgcaaacaggcctgctttactagactgtgccttctttgggtctcctctcccaaccatcgagtggtttaaaggagctaaaggaagtgctcttcatgaagatatttatgttttacatgaaaatggaactttggaaattcctgtggcccaaaaggacagtacaggaacttatacgtgtgttgcaaggaataaattagggatggcgaagaatgaagttcacttagaaatcaaagatcctacatggatcgttaaacagcccgaatatgcagttgtgcaaagagggagcatggtgtcctttgaatgcaaagtgaaacatgatcacaccttatccctcactgtcctgtggctgaaggacaacagggaactgcccagtgatgaaaggttcactgttgacaaggatcatctagtggtagctgatgtcagtgacgatgacagcgggacctacacgtgtgtggccaacaccactctggacagcgtctccgccagcgctgtgcttagcgttgttgctcctactccaactccagctcccgtttacgatgtcccaaatcctccctttgacttagaactgacagatcaacttgacaaaagtgttcagctgtcatggaccccaggcgatgacaacaatagccccattacaaaattcatcatcgaatatgaagatgcaatgcacaagccagggctgtggcaccaccaaactgaagtttctggaacacagaccacagcccagctgaagctgtctccttacgtgaactactccttccgcgtgatggcagtgaacagcattgggaagagcttgcccagcgaggcgtctgagcagtatttgacgaaagcctcagaaccagataaaaaccccacagctgtggaaggactgggatcagagcctgataatttggtgattacgtggaagcccttgaatggtttcgaatctaatgggccaggccttcagtacaaagttagctggcgccagaaagatggtgatgatgaatggacatctgtggttgtggcaaatgtatccaaatatattgtctcaggcacgccaacctttgttccatacctgatcaaagttcaggccctgaatgacatggggtttgcccccgagccagctgtagtcatgggacattctggagaagacctcccaatggtggctcctgggaacgtgcgtgtgaatgtggtgaacagtaccttagccgaggtgcactgggacccagtacctctgaaaagcatccgaggacacctacaaggctatcggatttactattggaagacccagagttcatctaaaagaaacagacgtcacattgagaaaaagatcctcaccttccaaggcagcaagactcatggcatgttgccggggctagagccctttagccactacacactgaatgtccgagtggtcaatgggaaaggggagggcccagccagccctgacagagtctttaatactccagaaggagtccccagtgctccctcgtctttgaagattgtgaatccaacactggactctctcactttggaatgggatccaccgagccacccgaatggcattttgacagagtacaccttaaagtatcagccaattaacagcacacatgaattaggccctctggtagatttgaaaattcctgccaacaagacacggtggactttaaaaaatttaaatttcagcactcgatataagttttatttctatgcacaaacatcagcaggatcaggaagtcaaattacagaggaagcagtaacaactgtggatgaagcgatggcaagccggcaggtggatattgcaactcagggctggttcattggtctgatgtgtgctgttgctctccttatcttaattttgctgattgtttgcttcatcagaagaaacaagggtggtaaatatccagttaaagaaaaggaagatgcccatgctgaccctgaaatccagcctatgaaggaagatgatgggacatttggagaatacagtgatgcagaagaccacaagcctttgaaaaaaggaagtcgaactccttcagacaggactgtgaaaaaagaagatagtgacgacagcctagttgactatggagaaggggttaatggccagttcaatgaggatggctcctttattggacaatacagtggtaagaaagagaaagagccggctgaaggaaacgaaagctcagaggcaccttctcctgtcaacgccatgaattcctttgtttaatttttaagctctttgccaatattccatttctctagaatgtttatcctaagcacttgtttgtcagccctctcatactatgaacatatgggtagagagtatattttctgctgtatgttagtattatgagaatagttacagcaaaaacataactcagtcaaatgatatgttaatatgaactggaatgcaaagtgcatactttttcattcaaaatgggtattcttgatttcctcagaactgataaaaaataatgcaacatcaccaacagatcctgttatttcctctgcaggatacagttcaatatgatgcatgaaaaatgctccacatttaaaggacatacccgtgtatgttatgaaaacatggtttgatactttgtttatactaccctcagctgaacccctatatatgaattccgttttcattgtcaagagtgttactgtagtattctctagaacttcaatgtctttgtggacattgttgtgaaattggtgactatgtatagctgtcgttagtctttttgggagactgttaggaacagtttgtacagtatatacttgctaaatgagttcattatgacagtcacattgctgatgcttactgagaactattacctactcttggctcctgttactccgtaggcttcttaatcttccaggcattacagcagcacagtgttctactttttacatcatttctatgttcggttgtttttaggcataaacaatgtgtattgcagtgcatttcggcatttgtgccatactgaaagaatcaaaaacaaatcatccaaattaaatttcaaacattatttcagagaacacagggcaagacacatacagtgccttcagatattaagcattccacaacatcgtgcattctgtatcagctggtccagtccattctgggtcctagattactgtcattgtctaaaagtaacttttaaaaagcagagttcatgaaaactgcaatgctgggaaaagaaggaaacatgaaaataaaaataagacagtttattagaaatagcatttcctcataagcataaaaagaaaatctttgttgccaactgaagcacatgatgattttgtggtcctttatggtttctattacatgcagtaagaaagatgtcaacatgctagaaaattaattttaaaactaagttattccaacactaaaagcatacaacagcatgccaacagtaatatattattctccaagactttacctatgtaagtgttcaaaactctgcagcattaaacaacgtgtatgcaaattgttatggatacatttcagaatctaagaaatcaggcaagtgcttaaaaggccaacggtccaagggattacatctgcagtttaaaaagtaaatatatattctatcgtattcataaacaatatctatcaaatgggttacctccaaatatgaaaatctataacaacctatggttgaaggaatgctcagtttcatttgccaataaattggtttctcataacttgcatcaagtttaattttaagtaaagctttttatatgtagatattttgttgaatttgtaaatacacttaaaatgtagatgctatatgcttataggtgttacatacaaataaacatgcaatgtttatgttgtactgtataagaggtaagctaattaatgcagtgaatgggattggaaagcatctacttaaatatctattgggttcccccctccccccaccttttttgctgtgaaactgaaatagtgaacttttctacgtattgacagcagatttttcgatgaaatcttcagagctttgcctatggggcacagtaggcctagtaacctggcatgtttgatatatgtaggtaaagcataatttaaagtaatcccaggtaaagatggccctaaatactttcatgtctctatattcatttttcacagatccacctgtctcttgaaaatataaaaagacaaaacaggtttgccttggcatcagagagcacaaagattaaaagttactttaaatttgccaatattttgggagaacaataaaactacattttttcctcttccatactggtagatgcgaaatttatctgtgcatgaaagggtcacttctgtaatagtgcaacagatttggtattaaaaattaaatgtggttttaaaagttcctctctcttttgtaatttatgttcccaattgagtgtgaatgtccaagtaatggtgtatgtaatggtacaggcaaatgtgactggatttccctcaaaaaagtaactattaaacagtcttgatctctttgtgaaaaaaaa

SEQ ID NO: 306358 - DNA, 6193 bp, Homo sapiens
agcttcgtcgagaacggaggacaccggcggtccagggtcctgggcagtcgcgccagagctgagcggagggcgcggcgcgagaacgaatctttgtgacattctctctcagcattctttatcccctgtttgctgaagacttcgaccaaagctggtcttagctgttggcattctcctgagaaaaggatagcttcagaaatcagaaaaacatttgggaggtgtctagcccagtggaccttctgaagagcaatgctaagaagacgtttggtttaaagaattaaaaggaagaacaacttaagagcttcttcaaagtttcccgcatgaaaattacttaaacgttgcacacaacgtttcacaaaatcttttgtgaaagaagaaaaggaaattcagtgtgtgagtctcagcaggagttaagctaatgcagcttaaaataatgccgaaaaagaagcgcttatctgcgggcagagtgcccctgattctcttcctgtgccagatgattagtgcactggaagtacctcttgatctggtacagcctccaaccatcacccaacagtctccaaaagattacattattgaccctcgggagaatattgtaatccagtgtgaagccaaagggaaaccgcccccaagcttttcctggacccgtaatgggactcattttgacatcgataaagaccctctggtcaccatgaagcctggcacaggaacgctcataattaacatcatgagcgaagggaaagctgagacctatgaaggagtctatcagtgtacagcaaggaacgaacgcggagctgcagtttctaataacattgttgtccgcccatccagatcaccattgtggaccaaagaaaaacttgaaccaatcacacttcaaagtggtcagtctttagtacttccctgcagacccccaattggattaccaccacctataatattttggatggataattcctttcaaagacttccacaaagtgagagagtttctcaaggtttgaatggggacctttatttttccaatgtcctcccagaggacacccgcgaagactatatctgttatgctagatttaatcatactcaaaccatacagcagaagcaacctatttctgtgaaggtgatttcagctaaatcaagtagagagaggccaccaacatttttaactccagaaggcaatgcaagtaacaaagaggaattaagaggaaatgtgctttcactggagtgcattgcagaaggactgcctaccccaattatttactgggcaaaggaagatggaatgctacccaaaaacaggacagtttataagaactttgagaaaaccttgcagatcattcatgtttcagaagcagactctggaaattaccaatgtatagcaaaaaatgcattaggagccatccaccataccatttctgttagagttaaagcggctccatactggatcacagcccctcaaaatcttgtgctgtccccaggagaggatgggaccttgatctgcagagctaatggcaaccccaaacccagaattagctggttaacaaatggagtcccaatagaaattgcccctgatgaccccagcagaaaaatagatggcgataccattattttttcaaatgttcaagaaagatcaagtgcagtctatcagtgcaatgcctctaatgaatatggatatttactggcaaacgcatttgtaaatgtgctggctgagccaccacgaatcctcacacctgcaaacacactctaccaggtcattgcaaacaggcctgctttactagactgtgccttctttgggtctcctctcccaaccatcgagtggtttaaaggagctaaaggaagtgctcttcatgaagatatttatgttttacatgaaaatggaactttggaaattcctgtggcccaaaaggacagtacaggaacttatacgtgtgttgcaaggaataaattagggatggcgaagaatgaagttcacttagaaatcaaagatcctacatggatcgttaaacagcccgaatatgcagttgtgcaaagagggagcatggtgtcctttgaatgcaaagtgaaacatgatcacaccttatccctcactgtcctgtggctgaaggacaacagggaactgcccagtgatgaaaggttcactgttgacaaggatcatctagtggtagctgatgtcagtgacgatgacagcgggacctacacgtgtgtggccaacaccactctggacagcgtctccgccagcgctgtgcttagcgttgttgctcctactccaactccagctcccgtttacgatgtcccaaatcctccctttgacttagaactgacagatcaacttgacaaaagtgttcagctgtcatggaccccaggcgatgacaacaatagccccattacaaaattcatcatcgaatatgaagatgcaatgcacaagccagggctgtggcaccaccaaactgaagtttctggaacacagaccacagcccagctgaagctgtctccttacgtgaactactccttccgcgtgatggcagtgaacagcattgggaagagcttgcccagcgaggcgtctgagcagtatttgacgaaagcctcagaaccagataaaaaccccacagctgtggaaggactgggatcagagcctgataatttggtgattacgtggaagcccttgaatggtttcgaatctaatgggccaggccttcagtacaaagttagctggcgccagaaagatggtgatgatgaatggacatctgtggttgtggcaaatgtatccaaatatattgtctcaggcacgccaacctttgttccatacctgatcaaagttcaggccctgaatgacatggggtttgcccccgagccagctgtagtcatgggacattctggagaagacctcccaatggtggctcctgggaacgtgcgtgtgaatgtggtgaacagtaccttagccgaggtgcactgggacccagtacctctgaaaagcatccgaggacacctacaaggctatcggatttactattggaagacccagagttcatctaaaagaaacagacgtcacattgagaaaaagatcctcaccttccaaggcagcaagactcatggcatgttgccggggctagagccctttagccactacacactgaatgtccgagtggtcaatgggaaaggggagggcccagccagccctgacagagtctttaatactccagaaggagtccccagtgctccctcgtctttgaagattgtgaatccaacaagagtacaccttaaagtatcagccaattaacagcacacatgaattaggccctctggtagatttgaaaattcctgccaacaagacacggtggactttaaaaaatttaaatttcagcactcgatataagttttatttctatgcacaaacatcagcaggatcaggaagtcaaattacagaggaagcagtaacaactgtggatgaagctggtattcttccacctgatgtaggtgcaggcaaagcgatggcaagccggcaggtggatattgcaactcagggctggttcattggtctgatgtgtgctgttgctctccttatcttaattttgctgattgtttgcttcatcagaagaaacaagggtggtaaatatccagttaaagaaaaggaagatgcccatgctgaccctgaaatccagcctatgaaggaagatgatgggacatttggagaatacagtgatgcagaagaccacaagcctttgaaaaaaggaagtcgaactccttcagacaggactgtgaaaaaagaagatagtgacgacagcctagttgactatggagaaggggttaatggccagttcaatgaggatggctcctttattggacaatacagtggtaagaaagagaaagagccggctgaaggaaacgaaagctcagaggcaccttctcctgtcaacgccatgaattcctttgtttaatttttaagctctttgccaatattccatttctctagaatgtttatcctaagcacttgtttgtcagccctctcatactatgaacatatgggtagagagtatattttctgctgtatgttagtattatgagaatagttacagcaaaaacataactcagtcaaatgatatgttaatatgaactggaatgcaaagtgcatactttttcattcaaaatgggtattcttgatttcctcagaactgataaaaaataatgcaacatcaccaacagatcctgttatttcctctgcaggatacagttcaatatgatgcatgaaaaatgctccacatttaaaggacatacccgtgtatgttatgaaaacatggtttgatactttgtttatactaccctcagctgaacccctatatatgaattccgttttcattgtcaagagtgttactgtagtattctctagaacttcaatgtctttgtggacattgttgtgaaattggtgactatgtatagctgtcgttagtctttttgggagactgttaggaacagtttgtacagtatatacttgctaaatgagttcattatgacagtcacattgctgatgcttactgagaactattacctactcttggctcctgttactccgtaggcttcttaatcttccaggcattacagcagcacagtgttctactttttacatcatttctatgttcggttgtttttaggcataaacaatgtgtattgcagtgcatttcggcatttgtgccatactgaaagaatcaaaaacaaatcatccaaattaaatttcaaacattatttcagagaacacagggcaagacacatacagtgccttcagatattaagcattccacaacatcgtgcattctgtatcagctggtccagtccattctgggtcctagattactgtcattgtctaaaagtaacttttaaaaagcagagttcatgaaaactgcaatgctgggaaaagaaggaaacatgaaaataaaaataagacagtttattagaaatagcatttcctcataagcataaaaagaaaatctttgttgccaactgaagcacatgatgattttgtggtcctttatggtttctattacatgcagtaagaaagatgtcaacatgctagaaaattaattttaaaactaagttattccaacactaaaagcatacaacagcatgccaacagtaatatattattctccaagactttacctatgtaagtgttcaaaactctgcagcattaaacaacgtgtatgcaaattgttatggatacatttcagaatctaagaaatcaggcaagtgcttaaaaggccaacggtccaagggattacatctgcagtttaaaaagtaaatatatattctatcgtattcataaacaatatctatcaaatgggttacctccaaatatgaaaatctataacaacctatggttgaaggaatgctcagtttcatttgccaataaattggtttctcataacttgcatcaagtttaattttaagtaaagctttttatatgtagatattttgttgaatttgtaaatacacttaaaatgtagatgctatatgcttataggtgttacatacaaataaacatgcaatgtttatgttgtactgtataagaggtaagctaattaatgcagtgaatgggattggaaagcatctacttaaatatctattgggttcccccctccccccaccttttttgctgtgaaactgaaatagtgaacttttctacgtattgacagcagatttttcgatgaaatcttcagagctttgcctatggggcacagtaggcctagtaacctggcatgtttgatatatgtaggtaaagcataatttaaagtaatcccaggtaaagatggccctaaatactttcatgtctctatattcatttttcacagatccacctgtctcttgaaaatataaaaagacaaaacaggtttgccttggcatcagagagcacaaagattaaaagttactttaaatttgccaatattttgggagaacaataaaactacattttttcctcttccatactggtagatgcgaaatttatctgtgcatgaaagggtcacttctgtaatagtgcaacagatttggtattaaaaattaaatgtggttttaaaagttcctctctcttttgtaatttatgttcccaattgagtgtgaatgtccaagtaatggtgtatgtaatggtacaggcaaatgtgactggatttccctcaaaaaagtaactattaaacagtcttgatctctttgtgaaaaaaaa

SEQ ID NO: 306359 - DNA, 3891 bp, Homo sapiens
accgtctgaccggagtcccggcaggcgatgacaacaggtagtccccattacaaaattcatcatcgaatatgaagatgcaatgcacaagccagggctgtggcaccaccaaactgaagtttctggaacacagaccacagcccagctgaagctgtctccttacgtgaactactccttccgcgtgatggcagtgaacagcattgggaagagcttgcccagcgaggcgtctgagcagtatttgacgaaagcctcagaaccagataaaaaccccacagctgtggaaggactgggatcagagcctgataatttggtgattacgtggaagcccttgaatggtttcgaatctaatgggccaggccttcagtacaaagttagctggcgccagaaagatggtgatgatgaatggacatctgtggttgtggcaaatgtatccaaatatattgtctcaggcacgccaacctttgttccatacctgatcaaagttcaggccctgaatgacatggggtttgcccccgagccagctgtagtcatgggacattctggagaagacctcccaatggtggctcctgggaacgtgcgtgtgaatgtggtgaacagtaccttagccgaggtgcactgggacccagtacctctgaaaagcatccgaggacacctacaaggctatcggatttactattggaagacccagagttcatctaaaagaaacagacgtcacattgagaaaaagatcctcaccttccaaggcagcaagactcatggcatgttgccggggctagagccctttagccactacacactgaatgtccgagtggtcaatgggaaaggggagggcccagccagccctgacagagtctttaatactccagaaggagtccccagtgctccctcgtctttgaagattgtgaatccaacactggactctctcactttggaatgggatccaccgagccacccgaatggcattttgacagagtacaccttaaagtatcagccaattaacagcacacatgaattaggccctctggtagatttgaaaattcctgccaacaagacacggtggactttaaaaaatttaaatttcagcactcgatataagttttatttctatgcacaaacatcagcaggatcaggaagtcaaattacagaggaagcagtaacaactgtggatgaagcgatggcaagccggcaggtggatattgcaactcagggctggttcattggtctgatgtgtgctgttgctctccttatcttaattttgctgattgtttgcttcatcagaagaaacaagggtggtaaatatccagttaaagaaaaggaagatgcccatgctgaccctgaaatccagcctatgaaggaagatgatgggacatttggagaatacagtgatgcagaagaccacaagcctttgaaaaaaggaagtcgaactccttcagacaggactgtgaaaaaagaagatagtgacgacagcctagttgactatggagaaggggttaatggccagttcaatgaggatggctcctttattggacaatacagtggtaagaaagagaaagagccggctgaaggaaacgaaagctcagaggcaccttctcctgtcaacgccatgaattcctttgtttaatttttaagctctttgccaatattccatttctctagaatgtttatcctaagcacttgtttgtcagccctctcatactatgaacatatgggtagagagtatattttctgctgtatgttagtattatgagaatagttacagcaaaaacataactcagtcaaatgatatgttaatatgaactggaatgcaaagtgcatactttttcattcaaaatgggtattcttgatttcctcagaactgataaaaaataatgcaacatcaccaacagatcctgttatttcctctgcaggatacagttcaatatgatgcatgaaaaatgctccacatttaaaggacatacccgtgtatgttatgaaaacatggtttgatactttgtttatactaccctcagctgaacccctatatatgaattccgttttcattgtcaagagtgttactgtagtattctctagaacttcaatgtctttgtggacattgttgtgaaattggtgactatgtatagctgtcgttagtctttttgggagactgttaggaacagtttgtacagtatatacttgctaaatgagttcattatgacagtcacattgctgatgcttactgagaactattacctactcttggctcctgttactccgtaggcttcttaatcttccaggcattacagcagcacagtgttctactttttacatcatttctatgttcggttgtttttaggcataaacaatgtgtattgcagtgcatttcggcatttgtgccatactgaaagaatcaaaaacaaatcatccaaattaaatttcaaacattatttcagagaacacagggcaagacacatacagtgccttcagatattaagcattccacaacatcgtgcattctgtatcagctggtccagtccattctgggtcctagattactgtcattgtctaaaagtaacttttaaaaagcagagttcatgaaaactgcaatgctgggaaaagaaggaaacatgaaaataaaaataagacagtttattagaaatagcatttcctcataagcataaaaagaaaatctttgttgccaactgaagcacatgatgattttgtggtcctttatggtttctattacatgcagtaagaaagatgtcaacatgctagaaaattaattttaaaactaagttattccaacactaaaagcatacaacagcatgccaacagtaatatattattctccaagactttacctatgtaagtgttcaaaactctgcagcattaaacaacgtgtatgcaaattgttatggatacatttcagaatctaagaaatcaggcaagtgcttaaaaggccaacggtccaagggattacatctgcagtttaaaaagtaaatatatattctatcgtattcataaacaatatctatcaaatgggttacctccaaatatgaaaatctataacaacctatggttgaaggaatgctcagtttcatttgccaataaattggtttctcataacttgcatcaagtttaattttaagtaaagctttttatatgtagatattttgttgaatttgtaaatacacttaaaatgtagatgctatatgcttataggtgttacatacaaataaacatgcaatgtttatgttgtactgtataagaggtaagctaattaatgcagtgaatgggattggaaagcatctacttaaatatctattgggttcccccctccccccaccttttttgctgtgaaactgaaatagtgaacttttctacgtattgacagcagatttttcgatgaaatcttcagagctttgcctatggggcacagtaggcctagtaacctggcatgtttgatatatgtaggtaaagcataatttaaagtaatcccaggtaaagatggccctaaatactttcatgtctctatattcatttttcacagatccacctgtctcttgaaaatataaaaagacaaaacaggtttgccttggcatcagagagcacaaagattaaaagttactttaaatttgccaatattttgggagaacaataaaactacattttttcctcttccatactggtagatgcgaaatttatctgtgcatgaaagggtcacttctgtaatagtgcaacagatttggtattaaaaattaaatgtggttttaaaagttcctctctcttttgtaatttatgttcccaattgagtgtgaatgtccaagtaatggtgtatgtaatggtacaggcaaatgtgactggatttccctcaaaaaagtaactattaaacagtcttgatctctttgtgaaaaaaaa

SEQ ID NO: 306360 - DNA, 5765 bp, Homo sapiens
  misc_feature (522)..(522): n is a, c, g, or t
  misc_feature (528)..(528): n is a, c, g, or t
  misc_feature (530)..(530): n is a, c, g, or t
  misc_feature (533)..(533): n is a, c, g, or t
  misc_feature (3651)..(3651): n is a, c, g, or t
  misc_feature (3691)..(3691): n is a, c, g, or t
  misc_feature (3695)..(3696): n is a, c, g, or t
  misc_feature (3813)..(3814): n is a, c, g, or t
  misc_feature (3838)..(3838): n is a, c, g, or t
  misc_feature (3840)..(3840): n is a, c, g, or t
  misc_feature (3859)..(3859): n is a, c, g, or t
agcttcgtcgagaacggaggacaccggcggtccagggtcctgggcagtcgcgccagagctgagcggagggcgcggcgcgagaacgaatctttgtgacattctctctcagcattctttatcccctgtttgctgaagacttcgaccaaagctggtcttagctgttggcattctcctgagaaaaggatagcttcagaaatcagaaaaacatttgggaggtgtctagcccagtggaccttctgaagagcaatgctaagaagacgtttggtttaaagaattaaaaggaagaacaacttaagagcttcttcaaagtttcccgcatgaaaattacttaaacgttgcacacaacgtttcacaaaatcttttgtgaaagaagaaaaggaaattcagtgtgtgagtctcagcaggagttaagctaatgcagcttaaaataatgccgaaaaagaagcgcttatctgcgggcagagtgcccctgattctcttcctgtgccagatgattagtgcactggaagtacctcttgatcnaaaacntnttnaagcttggtacagcctccaaccatcacccaacagtctccaaaagattacattattgaccctcgggagaatattgtaatccagtgtgaagccaaagggaaaccgcccccaagcttttcctggacccgtaatgggactcattttgacatcgataaagaccctctggtcaccatgaagcctggcacaggaacgctcataattaacatcatgagcgaagggaaagctgagacctatgaaggagtctatcagtgtacagcaaggaacgaacgcggagctgcagtttctaataacattgttgtccgcccatccagatcaccattgtggaccaaagaaaaacttgaaccaatcacacttcaaagtggtcagtctttagtacttccctgcagacccccaattggattaccaccacctataatattttggatggataattcctttcaaagacttccacaaagtgagagagtttctcaaggtttgaatggggacctttatttttccaatgtcctcccagaggacacccgcgaagactatatctgttatgctagatttaatcatactcaaaccatacagcagaagcaacctatttctgtgaaggtgatttcagtggatgaattgaatgacactatagctgctaatttgagtgacactgagttttatggtgctaaatcaagtagagagaggccaccaacatttttaactccagaaggcaatgcaagtaacaaagaggaattaagaggaaatgtgctttcactggagtgcattgcagaaggactgcctaccccaattatttactgggcaaaggaagatggaatgctacccaaaaacaggacagtttataagaactttgagaaaaccttgcagatcattcatgtttcagaagcagactctggaaattaccaatgtatagcaaaaaatgcattaggagccatccaccataccatttctgttagagttaaagcggctccatactggatcacagcccctcaaaatcttgtgctgtccccaggagaggatgggaccttgatctgcagagctaatggcaaccccaaacccagaattagctggttaacaaatggagtcccaatagaaattgcccctgatgaccccagcagaaaaatagatggcgataccattattttttcaaatgttcaagaaagatcaagtgcagtctatcagtgcaatgcctctaatgaatatggatatttactggcaaacgcatttgtaaatgtgctggctgagccaccacgaatcctcacacctgcaaacacactctaccaggtcattgcaaacaggcctgctttactagactgtgccttctttgggtctcctctcccaaccatcgagtggtttaaaggagctaaaggaagtgctcttcatgaagatatttatgttttacatgaaaatggaactttggaaattcctgtggcccaaaaggacagtacaggaacttatacgtgtgttgcaaggaataaattagggatggcgaagaatgaagttcacttagaaatcaaagatcctacatggatcgttaaacagcccgaatatgcagttgtgcaaagagggagcatggtgtcctttgaatgcaaagtgaaacatgatcacaccttatccctcactgtcctgtggctgaaggacaacagggaactgcccagtgatgaaaggttcactgttgacaaggatcatctagtggtagctgatgtcagtgacgatgacagcgggacctacacgtgtgtggccaacaccactctggacagcgtctccgccagcgctgtgcttagcgttgttgctcctactccaactccagctcccgtttacgatgtcccaaatcctccctttgacttagaactgacagatcaacttgacaaaagtgttcagctgtcatggaccccaggcgatgacaacaatagccccattacaaaattcatcatcgaatatgaagatgcaatgcacaagccagggctgtggcaccaccaaactgaagtttctggaacacagaccacagcccagctgaagctgtctccttacgtgaactactccttccgcgtgatggcagtgaacagcattgggaagagcttgcccagcgaggcgtctgagcagtatttgacgaaagcctcagaaccagataaaaaccccacagctgtggaaggactgggatcagagcctgataatttggtgattacgtggaagcccttgaatggtttcgaatctaatgggccaggccttcagtacaaagttagctggcgccagaaagatggtgatgatgaatggacatctgtggttgtggcaaatgtatccaaatatattgtctcaggcacgccaacctttgttccatacctgatcaaagttcaggccctgaatgacatggggtttgcccccgagccagctgtagtcatgggacattctggagaagacctcccaatggtggctcctgggaacgtgcgtgtgaatgtggtgaacagtaccttagccgaggtgcactgggacccagtacctctgaaaagcatccgaggacacctacaaggctatcggatttactattggaagacccagagttcatctaaaagaaacagacgtcacattgagaaaaagatcctcaccttccaaggcagcaagactcatggcatgttgccggggctagagccctttagccactacacactgaatgtccgagtggtcaatgggaaaggggagggcccagccagccctgacagagtctttaatactccagaaggagtccccagtgctccctcgtctttgaagattgtgaatccaacactggactctctcactttggaatgggatccaccgagccacccgaatggcattttgacagagtacaccttaaagtatcagccaattaacagcacacatgaattaggccctctggtagatttgaaaattcctgccaacaagacacggtggactttaaaaaatttaaatttcagcactcgatataagttttatttctatgcacaaacatcagcaggatcaggaagtcaaattacagaggaagcagtaacaactgtggatgaagctggtattcttccacctgatgtaggtgcaggcaaagttcaagcagtaaatcccaggatcagcaatcttactgctgcagctgctganacctatgccaatatcagttgggaatatgagggaccagagnatgnnaacttttatgttgaatatggtgtagcaggcagcaaagaagaatggagaaaagaaattgtaaatggttctcggagcttctttgggttaaagggtctaatgccaggaacagcatacaannttcgagttggtgctgtgggggacncnggtttgtgagttcagaggntgtgtttgagacaggcccagcgatggcaagccggcaggtggatattgcaactcagggctggttcattggtctgatgtgtgctgttgctctccttatcttaattttgctgattgtttgcttcatcagaagaaacaagggtggtaaatatccagttaaagaaaaggaagatgcccatgctgaccctgaaatccagcctatgaaggaagatgatgggacatttggagaatacagtgatgcagaagaccacaagcctttgaaaaaaggaagtcgaactccttcagacaggactgtgaaaaaagaagatagtgacgacagcctagttgactatggagaaggggttaatggccagttcaatgaggatggctcctttattggacaatacagtggtaagaaagagaaagagccggctgaaggaaacgaaagctcagaggcaccttctcctgtcaacgccatgaattcctttgtttaatttttaagctctttgccaatattccatttctctagaatgtttatcctaagcacttgtttgtcagccctctcatactatgaacatatgggtagagagtatattttctgctgtatgttagtattatgagaatagttacagcaaaaacataactcagtcaaatgatatgttaatatgaactggaatgcaaagtgcatactttttcattcaaaatgggtattcttgatttcctcagaactgataaaaaataatgcaacatcaccaacagatcctgttatttcctctgcaggatacagttcaatatgatgcatgaaaaatgctccacatttaaaggacatacccgtgtatgttatgaaaacatggtttgatactttgtttatactaccctcagctgaacccctatatatgaattccgttttcattgtcaagagtgttactgtagtattctctagaacttcaatgtctttgtggacattgttgtgaaattggtgactatgtatagctgtcgttagtctttttgggagactgttaggaacagtttgtacagtatatacttgctaaatgagttcattatgacagtcacattgctgatgcttactgagaactattacctactcttggctcctgttactccgtaggcttcttaatcttccaggcattacagcagcacagtgttctactttttacatcatttctatgttcggttgtttttaggcataaacaatgtgtattgcagtgcatttcggcatttgtgccatactgaaagaatcaaaaacaaatcatccaaattaaatttcaaacattatttcagagaacacagggcaagacacatacagtgccttcagatattaagcattccacaacatcgtgcattctgtatcagctggtccagtccattctgggtcctagattactgtcattgtctaaaagtaacttttaaaaagcagagttcatgaaaactgcaatgctgggaaaagaaggaaacatgaaaataaaaataagacagtttattagaaatagcatttcctcataagcataaaaagaaaatctttgttgccaactgaagcacatgatgattttgtggtcctttatggtttctattacatgcagtaagaaagatgtttgatatatgtaggtaaagcataatttaaagtaatcccaggtaaagatggccctaaatactttcatgtctctatattcatttttcacagatccacctgtctcttgaaaatataaaaagacaaaacaggtttgccttggcatcagagagcacaaagattaaaagttactttaaatttgccaatattttgggagaacaataaaactacattttttcctcttccatactggtagatgcgaaatttatctgtgcatgaaagggtcacttctgtaatagtgcaacagatttggtattaaaaattaaatgtggttttaaaagtt

SEQ ID NO: 306361 - DNA, 2821 bp, Homo sapiens
gaaaccgtttctacatggctggctctaagccagatgatatttcatagtgcaaagagggatagaacctcactggtggccaaatgtgattatatgctataaccctgtgcccctactctgacacccacccccaagcagttaccctctgttggaagcctgcagctttctttgtttgtttctttaattatacagacagtaggatctgcatccttactagcatatagaaaaatcagagaaacaatgcaaccaagagtgctgttttcatttgtttcttctgcatccttttaatggaattttgtaggtctcttgaaagtgatgcagaagaccacaagcctttgaaaaaaggaagtcgaactccttcagacaggactgtgaaaaaagaagatagtgacgacagcctagttgactatggagaaggggttaatggccagttcaatgaggatggctcctttattggacaatacagtggtaagaaagagaaagagccggctgaaggaaacgaaagctcagaggcaccttctcctgtcaacgccatgaattcctttgtttaatttttaagctctttgccaatattccatttctctagaatgtttatcctaagcacttgtttgtcagccctctcatactatgaacatatgggtagagagtatattttctgctgtatgttagtattatgagaatagttacagcaaaaacataactcagtcaaatgatatgttaatatgaactggaatgcaaagtgcatactttttcattcaaaatgggtattcttgatttcctcagaactgataaaaaataatgcaacatcaccaacagatcctgttatttcctctgcaggatacagttcaatatgatgcatgaaaaatgctccacatttaaaggacatacccgtgtatgttatgaaaacatggtttgatactttgtttatactaccctcagctgaacccctatatatgaattccgttttcattgtcaagagtgttactgtagtattctctagaacttcaatgtctttgtggacattgttgtgaaattggtgactatgtatagctgtcgttagtctttttgggagactgttaggaacagtttgtacagtatatacttgctaaatgagttcattatgacagtcacattgctgatgcttactgagaactattacctactcttggctcctgttactccgtaggcttcttaatcttccaggcattacagcagcacagtgttctactttttacatcatttctatgttcggttgtttttaggcataaacaatgtgtattgcagtgcatttcggcatttgtgccatactgaaagaatcaaaaacaaatcatccaaattaaatttcaaacattatttcagagaacacagggcaagacacatacagtgccttcagatattaagcattccacaacatcgtgcattctgtatcagctggtccagtccattctgggtcctagattactgtcattgtctaaaagtaacttttaaaaagcagagttcatgaaaactgcaatgctgggaaaagaaggaaacatgaaaataaaaataagacagtttattagaaatagcatttcctcataagcataaaaagaaaatctttgttgccaactgaagcacatgatgattttgtggtcctttatggtttctattacatgcagtaagaaagatgtcaacatgctagaaaattaattttaaaactaagttattccaacactaaaagcatacaacagcatgccaacagtaatatattattctccaagactttacctatgtaagtgttcaaaactctgcagcattaaacaacgtgtatgcaaattgttatggatacatttcagaatctaagaaatcaggcaagtgcttaaaaggccaacggtccaagggattacatctgcagtttaaaaagtaaatatatattctatcgtattcataaacaatatctatcaaatgggttacctccaaatatgaaaatctataacaacctatggttgaaggaatgctcagtttcatttgccaataaattggtttctcataacttgcatcaagtttaattttaagtaaagctttttatatgtagatattttgttgaatttgtaaatacacttaaaatgtagatgctatatgcttataggtgttacatacaaataaacatgcaatgtttatgttgtactgtataagaggtaagctaattaatgcagtgaatgggattggaaagcatctacttaaatatctattgggttcccccctccccccaccttttttgctgtgaaactgaaatagtgaacttttctacgtattgacagcagatttttcgatgaaatcttcagagctttgcctatggggcacagtaggcctagtaacctggcatgtttgatatatgtaggtaaagcataatttaaagtaatcccaggtaaagatggccctaaatactttcatgtctctatattcatttttcacagatccacctgtctcttgaaaatataaaaagacaaaacaggtttgccttggcatcagagagcacaaagattaaaagttactttaaatttgccaatattttgggagaacaataaaactacattttttcctcttccatactggtagatgcgaaatttatctgtgcatgaaagggtcacttctgtaatagtgcaacagatttggtattaaaaattaaatgtggttttaaaagttcctctctcttttgtaatttatgttcccaattgagtgtgaatgtccaagtaatggtgtatgtaatggtacaggcaaatgtgactggatttccctcaaaaaagtaactattaaacagtcttgatctctttgtgaaaaaaaa

SEQ ID NO: 306362 - DNA, 1189 bp, Homo sapiens
taaaaccacatttaatttttaataccaaatctgttgcactattacagaagtgaccctttcatgcacagataaatttcgcatctaccagtatggaagaggaaaaaagtaatatattattctccaagactttacctatgtaagtgttcaaaactctgcagcattaaacaacgtgtatgcaaattgttatggatacatttcagaatctaagaaatcaggcaagtgcttaaaaggccaacggtccaagggattacatctgcagtttaaaaagtaaatatatattctatcgtattcataaacaatatctatcaaatgggttacctccaaatatgaaaatctataacaacctatggttgaaggaatgctcagtttcatttgccaataaattggtttctcataacttgcatcaagtttaattttaagtaaagctttttatatgtagatattttgttgaatttgtaaatacacttaaaatgtagatgctatatgcttataggtgttacatacaaataaacatgcaatgtttatgttgtactgtataagaggtaagctaattaatgcagtgaatgggattggaaagcatctacttaaatatctattgggttcccccctccccccaccttttttgctgtgaaactgaaatagtgaacttttctacgtattgacagcagatttttcgatgaaatcttcagagctttgcctatggggcacagtaggcctagtaacctggcatgtttgatatatgtaggtaaagcataatttaaagtaatcccaggtaaagatggccctaaatactttcatgtctctatattcatttttcacagatccacctgtctcttgaaaatataaaaagacaaaacaggtttgccttggcatcagagagcacaaagattaaaagttactttaaatttgccaatattttgggagaacaataaaactacattttttcctcttccatactggtagatgcgaaatttatctgtgcatgaaagggtcacttctgtaatagtgcaacagatttggtattaaaaattaaatgtggttttaaaagttcctctctcttttgtaatttatgttcccaattgagtgtgaatgtccaagtaatggtgtatgtaatggtacaggcaaatgtgactggatttccctcaaaaaagtaactattaaacagtcttgatctctttgtgaaaaaaaa

SEQ ID NO: 306363 - DNA, 1847 bp, Homo sapiens
agcttcgtcgagaacggaggacaccggcggtccagggtcctgggcagtcgcgccagagctgagcggagggcgcggcgcgagaacgaatctttgtgacattctctctcagcattctttatcccctgtttgctgaagacttcgaccaaagctggtcttagctgttggcattctcctgagaaaaggatagcttcagaaatcagaaaaacatttgggaggtgtctagcccagtggaccttctgaagagcaatgctaagaagacgtttggtttaaagaattaaaaggaagaacaacttaagagcttcttcaaagtttcccgcatgaaaattacttaaacgttgcacacaacgtttcacaaaatcttttgtgaaagaagaaaaggaaattcagtgtgtgagtctcagcaggagttaagctaatgcagcttaaaataatgccgaaaaagaagcgcttatctgcgggcagagtgcccctgattctcttcctgtgccagatgattagtgcactggaagtacctcttgatctggtacagcctccaaccatcacccaacagtctccaaaagattacattattgaccctcgggagaatattgtaatccagtgtgaagccaaagggaaaccgcccccaagcttttcctggacccgtaatgggactcattttgacatcgataaagaccctctggtcaccatgaagcctggcacaggaacgctcataattaacatcatgagcgaagggaaagctgagacctatgaaggagtctatcagtgtacagcaaggaacgaacgcggagctgcagtttctaataacattgttgtccgcccatccagatcaccattgtggaccaaagaaaaacttgaaccaatcacacttcaaagtggtcagtctttagtacttccctgcagacccccaattggattaccaccacctataatattttggatggataattcctttcaaagacttccacaaagtgagagagtttctcaaggtttgaatggggacctttatttttccaatgtcctcccagaggacacccgcgaagactatatctgttatgctagatttaatcatactcaaaccatacagcagaagcaacctatttctgtgaaggtgatttcagctaaatcaagtagagagaggccaccaacatttttaactccagaaggcaatgcaagtaacaaagaggaattaagaggaaatgtgctttcactggagtgcattgcagaaggactgcctaccccaattatttactgggcaaaggaagatggaatgctacccaaaaacaggacagtttataagaactttgagaaaaccttgcagatcattcatgtttcagaagcagactctggaaattaccaatgtatagcaaaaaatgcattaggagccatccaccataccatttctgttagagttaaagcggctccatactggatcacagcccctcaaaatcttgtgctgtccccaggagaggatgggaccttgatctgcagagctaatggcaaccccaaacccagaattagctggttaacaaatggagtcccaatagaaagtaagttgccttgagtggttctaattgcagtatattttcagagcatatatacatcccgacagtgaataaatggtgataaaaaaataactcaggttaaggaaggaagccacatgtatgttaaacacaggcaccaaattacctttgcattttattaccattagatatttattatgaatgtgaatagtttatgctgttaacataatggcatgtgatgactggtacttggcaatatttcgtctgctttttacatggataatgggaagaatgacagggtcagaaataaatatcacttcaaagttt

SEQ ID NO: 306364 - DNA, 516 bp, Homo sapiens
gtttgcttcatcagaagaaacaagggtggtaaatatccaggtaagaaagaaagattaaaattgctttataatgctacataataatccattaaactaaaaagatcatgggggaaatcatgtagattgtaatattttgtcttcccagagccatgagtttggactttctcttcaaatgacttttgatccctttttatataatggcaatctaaacattgtcaatgatcataaggcatttggaggagtaaatcaatcagttctctgaaaacattagtgagcctactttcttagactccacataggttatggatgctgaagtaacacctaaaaccaactggcaaggagagagttgcagggaaggttcatggagtttttcaaaggaagtaatgcatgaactaagtcttcatattgtgatgtgtaacattgctttccctataaggtaatggtttattcaatttagtgggcccattaaatttatattttctttacctgaccattttcccttcagtgacaagaaaa

SEQ ID NO: 306365 - DNA, 451 bp, Homo sapiens
tggaagacccagagttcatctaaaagaaacagacgtcacattgagaaaaagatcctcaccttccaaggcagcaagactcatggcatgttgccggggctagagccctttagccactacacactgaatgtccgagtggtcaatgggaaaggggagggcccagccagccctgacagagtctttaatactccagaaggaggtatggaatggacgtgtctctaagatctcaggaacatatggcatggcctgagaggttttgcctgacagaagggctactgatcaaagtatattctggaagccaaatgtgattgaaatttctatagatgaatacagcacacacaaagctaccaaaatgtcagatcatatgtgggcctaagtgtacatagaaggcttcagaacccaaaatgctgctctgaaatgccctctcccgtgacttaaaatttttctccacaca

SEQ ID NO: 306366 - DNA, 1125 bp, Homo sapiens
agcgggctcttaacccgcgcgcgggggcgcccaggccactgggctccgcggagccagcgagaggtctgcgcggagtctgagcggcgctcgtcccgtcccaaggccgacgccagcacgccgtcatggcccccgcagcggcgacggggggcagcaccctgcccagtggcttctcggtcttcaccaccttgcccgacttgctcttcatctttgagtttatcttcgggggcctggtgtggatcctggtggcctcctccctggtgccctggcccctggtccagggctgggtgatgttcgtgtctgtgttctgcttcgtggccaccaccaccttgatcatcctgtacataattggagcccacggtggagagacttcctgggtcaccttggacgcagcctaccactgcaccgctgccctcttttacctcagcgcctcagtcctggaggccctggccaccatcacgatgcaagacggcttcacctacaggcactaccatgaaaacattgctgccgtggtgttctcctacatagccactctgctctacgtggtccatgcggtgttctctttaatcagatggaagtcttcataaagccgcagtagaacttgagctgaaaacccagatggtgttaactggccgccccactttccggcataactttttagaaaacagaaatgcccttgatggtggaaaaaagaaaacaaccacccccccactgcccaaaaaaaaaagccctgccctgttgctcgtgggtgctgtgtttactctcccgtgtgccttcgcgtccgggttgggagcttgctgtgtctaacctccaactgctgtgctgtctgctagggtcacctcctgtttgtgaaaggggaccttcttgttcgggggtgggaagtggcgaccgtgacctgagaaggaaagaaagatcctctgctgacccctggagcagctctcgagaactacctgttggtattgtccacaagctctcccgagcgccccatcttgtgccatgttttaagtcttcatggatgttctgcatgtcatggggactaaaactcacccaacagatctttccagaggtccatggtggaagacgataaccctgtgaaatactttataaaatgtcttaatgttcaataca

SEQ ID NO: 306367 - DNA, 957 bp, Homo sapiens
agcgggctcttaacccgcgcgcgggggcgcccaggccactgggctccgcggagccagcgagaggtctgcgcggagtctgagcggcgctcgtcccgtcccaaggccgacgccagcacgccgtcatggcccccgcagcggcgacggggggcagcaccctgcccagtggcttctcggtcttcaccaccttgcccgacttgctcttcatctttgagtttgacgcagcctaccactgcaccgctgccctcttttacctcagcgcctcagtcctggaggccctggccaccatcacgatgcaagacggcttcacctacaggcactaccatgaaaacattgctgccgtggtgttctcctacatagccactctgctctacgtggtccatgcggtgttctctttaatcagatggaagtcttcataaagccgcagtagaacttgagctgaaaacccagatggtgttaactggccgccccactttccggcataactttttagaaaacagaaatgcccttgatggtggaaaaaagaaaacaaccacccccccactgcccaaaaaaaaaagccctgccctgttgctcgtgggtgctgtgtttactctcccgtgtgccttcgcgtccgggttgggagcttgctgtgtctaacctccaactgctgtgctgtctgctagggtcacctcctgtttgtgaaaggggaccttcttgttcgggggtgggaagtggcgaccgtgacctgagaaggaaagaaagatcctctgctgacccctggagcagctctcgagaactacctgttggtattgtccacaagctctcccgagcgccccatcttgtgccatgttttaagtcttcatggatgttctgcatgtcatggggactaaaactcacccaacagatctttccagaggtccatggtggaagacgataaccctgtgaaatactttataaaatgtcttaatgttcaataca

SEQ ID NO: 306368 - DNA, 999 bp, Homo sapiens
agcgggctcttaacccgcgcgcgggggcgcccaggccactgggctccgcggagccagcgagaggtctgcgcggagtctgagcggcgctcgtcccgtcccaaggccgacgccagcacgccgtcatggcccccgcagcggcgacggggggcagcaccctgcccagtggcttctcggtcttcaccaccttgcccgacttgctcttcatctttgagtttatcttcgggggcctggtgtggatcctggtggcctcctccctggtgccctggcccctggtccagggctgggtgatgttcgtgtctgtgttctgcttcgtggccaccaccaccttgatcatcctgtacataattggagcccacggtggagagacttcctgggtcaccttggtgttctcctacatagccactctgctctacgtggtccatgcggtgttctctttaatcagatggaagtcttcataaagccgcagtagaacttgagctgaaaacccagatggtgttaactggccgccccactttccggcataactttttagaaaacagaaatgcccttgatggtggaaaaaagaaaacaaccacccccccactgcccaaaaaaaaaagccctgccctgttgctcgtgggtgctgtgtttactctcccgtgtgccttcgcgtccgggttgggagcttgctgtgtctaacctccaactgctgtgctgtctgctagggtcacctcctgtttgtgaaaggggaccttcttgttcgggggtgggaagtggcgaccgtgacctgagaaggaaagaaagatcctctgctgacccctggagcagctctcgagaactacctgttggtattgtccacaagctctcccgagcgccccatcttgtgccatgttttaagtcttcatggatgttctgcatgtcatggggactaaaactcacccaacagatctttccagaggtccatggtggaagacgataaccctgtgaaatactttataaaatgtcttaatgttcaataca

SEQ ID NO: 306369 - DNA, 831 bp, Homo sapiens
agcgggctcttaacccgcgcgcgggggcgcccaggccactgggctccgcggagccagcgagaggtctgcgcggagtctgagcggcgctcgtcccgtcccaaggccgacgccagcacgccgtcatggcccccgcagcggcgacggggggcagcaccctgcccagtggcttctcggtcttcaccaccttgcccgacttgctcttcatctttgagtttgtgttctcctacatagccactctgctctacgtggtccatgcggtgttctctttaatcagatggaagtcttcataaagccgcagtagaacttgagctgaaaacccagatggtgttaactggccgccccactttccggcataactttttagaaaacagaaatgcccttgatggtggaaaaaagaaaacaaccacccccccactgcccaaaaaaaaaagccctgccctgttgctcgtgggtgctgtgtttactctcccgtgtgccttcgcgtccgggttgggagcttgctgtgtctaacctccaactgctgtgctgtctgctagggtcacctcctgtttgtgaaaggggaccttcttgttcgggggtgggaagtggcgaccgtgacctgagaaggaaagaaagatcctctgctgacccctggagcagctctcgagaactacctgttggtattgtccacaagctctcccgagcgccccatcttgtgccatgttttaagtcttcatggatgttctgcatgtcatggggactaaaactcacccaacagatctttccagaggtccatggtggaagacgataaccctgtgaaatactttataaaatgtcttaatgttcaataca

SEQ ID NO: 306370 - DNA, 1162 bp, Homo sapiens
  misc_feature (182)..(182): n is a, c, g, or t
aaggtggcttagagcatccagtcgagaggtctgggcgagagtctgaacggaaacattggttcagatgctagatggtcctagcgacgatcactgcctgcatagaggtacgccgcgtctaggcagtgtcgtacagcgcgagagtacaagaaacggctgcgcgcaggtgagactctgcatcggtncctttgcaacaaacttgacgcactgagatgtgccttgtatcgtcatttagatgtgattcattcagggagggcacttgctgtgcaatcctggatgagtcatcacttaccgtggctgccctggcccctggtccagggctgggtgatgttcgtgtctgtgttctgcttcgtggccaccaccaccttgatcatcctgtacataattggagcccacggtggagagacttcctgggtcaccttggacgcagcctaccactgcaccgctgccctcttttacctcagcgcctcagtcctggaggccctggccaccatcacgatgcaagacggcttcacctacaggcactaccatgaaaacattgctgccgtggtgttctcctacatagccactctgctctacgtggtccatgcggtgttctctttaatcagatggaagtcttcataaagccgcagtagaacttgagctgaaaacccagatggtgttaactggccgccccactttccggcataactttttagaaaacagaaatgcccttgatggtggaaaaaagaaaacaaccacccccccactgcccaaaaaaaaaagccctgccctgttgctcgtgggtgctgtgtttactctcccgtgtgccttcgcgtccgggttgggagcttgctgtgtctaacctccaactgctgtgctgtctgctagggtcacctcctgtttgtgaaaggggaccttcttgttcgggggtgggaagtggcgaccgtgacctgagaaggaaagaaagatcctctgctgacccctggagcagctctcgagaactacctgttggtattgtccacaagctctcccgagcgccccatcttgtgccatgttttaagtcttcatggatgttctgcatgtcatggggactaaaactcacccaacagatctttccagaggtccatggtggaagacgataaccctgtgaaatactttataaaatgtcttaatgttcaataca

SEQ ID NO: 306371 - DNA, 1052 bp, Homo sapiens
agcgggctcttaacccgcgcgcgggggcgcccaggccactgggctccgcggagccagcgagaggtctgcgcggagtctgagcggcgctcgtcccgtcccaaggccgacgccagcacgccgtcatggcccccgcagcggcgacggggggcagcaccctgcccagtggcttctcggtcttcaccaccttgcccgacttgctcttcatctttgagtttatcttcgggggcctggtgtggatcctggtggcctcctccctggtgccctggcccctggtccagggctgggtgatgttcgtgtctgtgttctgcttcgtggccaccaccaccttgatcatcctgtacataattggagcccacggtggagagacttcctgggtcaccttggacgcagcctaccactgcaccgctgccctcttttacctcagcgcctcagtcctggaggccctggccaccatcacgatgcaagacggcttcacctacaggcactaccatgaaaacattgctgccgtggtgttctcctacatagccactctgctctacgtggtccatgcggtgttctctttaatcagatggaagtcttcataaagccgcagtagaacttgagctgaaaacccagatggtgttaactggccgccccactttccggcataactttttagaaaacagaaatgcccttgatggtggaaaaaagaaaacaaccacccccccactgcccaaaaaaaaaagccctgccctgttgctcgtgggtgctgtgtttactctcccgtgtgccttcgcgtccgggttgggagcttgctgtgtctaacctccaactgctgtgctgtctgctagggtcacatcctctgctgacccctggagcagctctcgagaactacctgttggtattgtccacaagctctcccgagcgccccatcttgtgccatgttttaagtcttcatggatgttctgcatgtcatggggactaaaactcacccaacagatctttccagaggtccatggtggaagacgataaccctgtgaaatactttataaaatgtcttaatgttcaataca

SEQ ID NO: 306372 - DNA, 456 bp, Homo sapiens
gagctcggtaccccccccgagccaccgcccgccgccccactgcccaaaaaaaaaagccctgccctgttgctcgtgggtgctgtgtttactctcccgtgtgccttcgcgtccgggttgggagcttgctgtgtctaacctccaactgctgtgctgtctgctagggtcacctcctgtttgtgaaaggggaccttcttgttcgggggtgggaagtggcgaccgtgacctgagaaggaaagaaagatcctctgctgacccctggagcagctctcgagaactacctgttggtattgtccacaagctctcccgagcgccccatcttgtgccatgttttaagtcttcatggatgttctgcatgtcatggggactaaaactcacccaacagatctttccagaggtccatggtggaagacgataaccctgtgaaatactttataaaatgtcttaatgttcaataca

SEQ ID NO: 306373 - DNA, 730 bp, Homo sapiens
aagcgtagcaatgaaccgagagaaattggcaagccgggggaatggactgatcaccaatgggagccaagtccgccagcctcgctccaagaagcccggagatcatgagcaccatctcaggtacacggagcacgacggtcaccttcactgttcgccccggcacctcccagcccatcaccctgcagagccggccccccgactatgaaagcaggacctcaggaacaagacgtgccccaagccctgtggtctcgccaacagagatgaacaaagagaccctgcccgcccccctgtcgggctagtcggggaggactagccactgcccaaaaaaaaaagccctgccctgttgctcgtgggtgctgtgtttactctcccgtgtgccttcgcgtccgggttgggagcttgctgtgtctaacctccaactgctgtgctgtctgctagggtcacctcctgtttgtgaaaggggaccttcttgttcgggggtgggaagtggcgaccgtgacctgagaaggaaagaaagatcctctgctgacccctggagcagctctcgagaactacctgttggtattgtccacaagctctcccgagcgccccatcttgtgccatgttttaagtcttcatggatgttctgcatgtcatggggactaaaactcacccaacagatctttccagaggtccatggtggaagacgataaccctgtgaaatactttataaaatgtcttaatgttcaataca

SEQ ID NO: 306374 - DNA, 330 bp, Homo sapiens
ccaccttgatcatcctgtacataattggagcccacggtggagagacttcctgggtcaccttggtgagtccagcccagggtggctgctggttgtaggggggcgcaggaagtactggtccctggcccagtaggatgggcttttccagtgccaggtgagacttctccgtagatgtcaccccaccatgttccaaggctgagcctgcccagggctcctggcagcagaatcaggagaggcaggggcagaggcaaggtcgccgctgccaaccctcactggacctgttctgtgttctcctgcatgactgcctttccatggataaccagctgcccagcc

SEQ ID NO: 306375 - DNA, 490 bp, Homo sapiens
gtgcttatgggtgcctggccctgggctgagtccttgatgtgcaaagggccttacaagaggttcaattcaactcagacttcataagaaagccaaagcctggttttatgattgcagccctcagcctgggctgcctgaagacgaagagaaagagcaaggttattgttggctcaggccttgttagccagacttcgtgctctgtacgcattcaatttcctcccctccaaacatcatccctgggaactgctgagttcagatagaatatatgttggtagtttgcagttgggttattatccatttgttcataaaaattaaccttttgtattaaaatttggtcagatagtattaatagaaagttcaggatgttaaacaacttggagtggtgttgcttttttttttataaaagtaaaatggacttttttttgtttgagaaatgtcttcaagttttgtgtgaataaaacactttagcagcatctgtataaatacaattgga

SEQ ID NO: 306376 - DNA, 1971 bp, Homo sapiens
  misc_feature (2)..(2): n is a, c, g, or t
  misc_feature (17)..(18): n is a, c, g, or t
  misc_feature (1204)..(1204): n is a, c, g, or t
gntttgaaggacagtanncgttttctcaatcacctaaacaacagacttggtgaccaaagaagggtgtattcatttccgtgtattgctgcttttgctgatgagcatgagatgagaaaaccagcggatgaaaaattagagaaattttggatcgacttcaacctaggaagtcagagtgtcactttttatatagacaatgctgagaatactctatgggactcagtgacacttccgaaggaagcggtgatgaatttcagcataacagaaacggagaagataaagatatttatcatttacctgaagaagcccatgattatcagctacaaagaagtcatgaaaatagaaatccattttgatttgcagttcaacatatcacaagtttccattcaagctttaggagaagacaaacagatgttgcctgaccagacgaaaatctcctcagaactttttagtaagtctgataaagaagacagggagagtcccagtggccttgaaagagaaacagagcaggcagaagaatccactaacatggtggagtttatgagtgctgaagatgaccgctgcctaataactctccacttaaatgaccaatctgagccacctgttattggggaacctgcctctgatagtcaccttcagccggtccctccgttcggggtccctgacttcccgcaacaacctaagtctcattacagaaaacatctcttctctgagagtaatcaagattcaagtaccagtgaactatcttggaccagtaaccagaaaaagaaatccctaaaatcatattccagtagaaagaagacaagaaccagaagtaatttgagaatcttgccagttttccctcccagtagtggcagtggccatgagaaagaccaagctaagcttctatcaccatcagagaaagaaatacccgagcaaaataacaccacatctccaaagacttctgaacaaaaattccaagatagttttgcttttttgactgctgaagattctgcccagaaaacagagcttcaagatcctcactcactgagtgagctctcttccttgaagcactcagaagatgaagaaaaacctaagattgtgaaccaagaatcactaacagaaagtactagcttgaaacataagctgagaaacttggaagacaaagacataccagaaggtagttttgctaagtcacaacaatcaagattggaagaagaggttgctncgggatcccctttctcaataacagaagaaagagagttgccagaaggaatttccacttcatccctagaagttgtgccagagaacttgaacggttctgccattctcccaacctttgaaaacttcactaaaaaacggaaaagaaaatatgagcttaggtacagaaagcgtccgtttaattcagaaaatgcaaagaaagcaccggattgcctaataaaacttttaaaccagatgcaactgttcagactcaataaactagagcgctttcaaaatttggttcttcaagagttgagcagtcttaagcaggatattcaggccctggaacaccttgagaaggaggttctggaattctgggggaaacagtctgctgatctgcaatctttctgtgatctgcaagtgctgaggttcaattcaactcagacttcataagaaagccaaagcctggttttatgattgcagccctcagcctgggctgcctgaagacgaagagaaagagcaaggttattgttggctcaggccttgttagccagacttcgtgctctgtacgcattcaatttcctcccctccaaacatcatccctgggaactgctgagttcagatagaatatatgttggtagtttgcagttgggttattatccatttgttcataaaaattaaccttttgtattaaaatttggtcagatagtattaatagaaagttcaggatgttaaacaacttggagtggtgttgcttttttttttataaaagtaaaatggacttttttttgtttg

SEQ ID NO: 306377 - DNA, 2035 bp, Homo sapiens
  misc_feature (2)..(2): n is a, c, g, or t
  misc_feature (17)..(18): n is a, c, g, or t
  misc_feature (1204)..(1204): n is a, c, g, or t
gntttgaaggacagtanncgttttctcaatcacctaaacaacagacttggtgaccaaagaagggtgtattcatttccgtgtattgctgcttttgctgatgagcatgagatgagaaaaccagcggatgaaaaattagagaaattttggatcgacttcaacctaggaagtcagagtgtcactttttatatagacaatgctgagaatactctatgggactcagtgacacttccgaaggaagcggtgatgaatttcagcataacagaaacggagaagataaagatatttatcatttacctgaagaagcccatgattatcagctacaaagaagtcatgaaaatagaaatccattttgatttgcagttcaacatatcacaagtttccattcaagctttaggagaagacaaacagatgttgcctgaccagacgaaaatctcctcagaactttttagtaagtctgataaagaagacagggagagtcccagtggccttgaaagagaaacagagcaggcagaagaatccactaacatggtggagtttatgagtgctgaagatgaccgctgcctaataactctccacttaaatgaccaatctgagccacctgttattggggaacctgcctctgatagtcaccttcagccggtccctccgttcggggtccctgacttcccgcaacaacctaagtctcattacagaaaacatctcttctctgagagtaatcaagattcaagtaccagtgaactatcttggaccagtaaccagaaaaagaaatccctaaaatcatattccagtagaaagaagacaagaaccagaagtaatttgagaatcttgccagttttccctcccagtagtggcagtggccatgagaaagaccaagctaagcttctatcaccatcagagaaagaaatacccgagcaaaataacaccacatctccaaagacttctgaacaaaaattccaagatagttttgcttttttgactgctgaagattctgcccagaaaacagagcttcaagatcctcactcactgagtgagctctcttccttgaagcactcagaagatgaagaaaaacctaagattgtgaaccaagaatcactaacagaaagtactagcttgaaacataagctgagaaacttggaagacaaagacataccagaaggtagttttgctaagtcacaacaatcaagattggaagaagaggttgctncgggatcccctttctcaataacagaagaaagagagttgccagaaggaatttccacttcatccctagaagttgtgccagagaacttgaacggttctgccattctcccaacctttgaaaacttcactaaaaaacggaaaagaaaatatgagcttaggtacagaaagcgtccgtttaattcagaaaatgcaaagaaagcaccggattgcctaataaaacttttaaaccagatgcaactgttcagactcaataaactagagcgctttcaaaatttggttcttcaagagttgagcagtcttaagcaggatattcaggccctggaacaccttgagaaggaggttctggaattctgggggaaacagtctgctgatctgcaatctttctgtgatctgcaagtgctgaggttcaattcaactcagacttcataagaaagccaaagcctggttttatgattgcagccctcagcctgggctgcctgaagacgaagagaaagagcaaggttattgttggctcaggccttgttagccagacttcgtgctctgtacgcattcaatttcctcccctccaaacatcatccctgggaactgctgagttcagatagaatatatgttggtagtttgcagttgggttattatccatttgttcataaaaattaaccttttgtattaaaatttggtcagatagtattaatagaaagttcaggatgttaaacaacttggagtggtgttgcttttttttttataaaagtaaaatggacttttttttgtttgagaaatgtcttcaagttttgtgtgaataaaacactttagcagcatctgtataaatacaattgga

SEQ ID NO: 306378 - DNA, 1837 bp, Homo sapiens
  misc_feature (1006)..(1006): n is a, c, g, or t
agatggcgccactgcactccagcctgggcgatagggtgagactccatctcaaaaaaaagaaaaaagaaaaagaaataactctcctctttggttttggttcttctaaaatgtagagaggcttgtctttgcaaaaaatattcccatacttttcttttgccatctgacttagtattttcaagtagtattaggcacaatattgagattggtctgcttttgaacagtcatccaccatctcttctgttgcaaacgttttattagaaaggattttgtcatcctatacaacagcaacttggttgagaattgactgatggaataatccttttcttccactccatacttctttgcttttatattatataagagagcccagtcttctagaagggtacttctcttatctctagctttgtagaatatgtttagttatacataagaggcactaacacccctctaaaaattctcatttatgatctgtgcttgtagaagtctcattacagaaaacatctcttctctgagagtaatcaagattcaagtaccagtgaactatcttggaccagtaaccagaaaaagaaatccctaaaatcatattccagtagaaagaagacaagaaccagaagtaatttgagaatcttgccagttttccctcccagtagtggcagtggccatgagaaagaccaagctaagcttctatcaccatcagagaaagaaatacccgagcaaaataacaccacatctccaaagacttctgaacaaaaattccaagatagttttgcttttttgactgctgaagattctgcccagaaaacagagcttcaagatcctcactcactgagtgagctctcttccttgaagcactcagaagatgaagaaaaacctaagattgtgaaccaagaatcactaacagaaagtactagcttgaaacataagctgagaaacttggaagacaaagacataccagaaggtagttttgctaagtcacaacaatcaagattggaagaagaggttgctncgggatcccctttctcaataacagaagaaagagagttgccagaaggaatttccacttcatccctagaagttgtgccagagaacttgaacggttctgccattctcccaacctttgaaaacttcactaaaaaacggaaaagaaaatatgagcttaggtacagaaagcgtccgtttaattcagaaaatgcaaagaaagcaccggattgcctaataaaacttttaaaccagatgcaactgttcagactcaataaactagagcgctttcaaaatttggttcttcaagagttgagcagtcttaagcaggatattcaggccctggaacaccttgagaaggaggttctggaattctgggggaaacagtctgctgatctgcaatctttctgtgatctgcaagtgctgaggttcaattcaactcagacttcataagaaagccaaagcctggttttatgattgcagccctcagcctgggctgcctgaagacgaagagaaagagcaaggttattgttggctcaggccttgttagccagacttcgtgctctgtacgcattcaatttcctcccctccaaacatcatccctgggaactgctgagttcagatagaatatatgttggtagtttgcagttgggttattatccatttgttcataaaaattaaccttttgtattaaaatttggtcagatagtattaatagaaagttcaggatgttaaacaacttggagtggtgttgcttttttttttataaaagtaaaatggacttttttttgtttgagaaatgtcttcaagttttgtgtgaataaaacactttagcagcatctgtataaatacaattgga

SEQ ID NO: 306379 - DNA, 805 bp, Homo sapiens
catgacaagaaatgtctggagaagagtctgaagtatccttgtaatcagatgacttattaagaaagtctgctgtcacatccaagcgatcccaatgatatttactgcttttatgtttattagactcaataaactagagcgctttcaaaatttggttcttcaagagttgagcagtcttaagcaggatattcaggccctggaacaccttgagaaggaggttctggtaagttctttctgtgtggaacattttctgacttcggatctttcccagggaaaaataacgctagctacttaaacaaaacttttgttcaatcttaggaattctgggggaaacagtctgctgatctgcaatctttctgtgatctgcaagtgctgaggttcaattcaactcagacttcataagaaagccaaagcctggttttatgattgcagccctcagcctgggctgcctgaagacgaagagaaagagcaaggttattgttggctcaggccttgttagccagacttcgtgctctgtacgcattcaatttcctcccctccaaacatcatccctgggaactgctgagttcagatagaatatatgttggtagtttgcagttgggttattatccatttgttcataaaaattaaccttttgtattaaaatttggtcagatagtattaatagaaagttcaggatgttaaacaacttggagtggtgttgcttttttttttataaaagtaaaatggacttttttttgtttgagaaatgtcttcaagttttgtgtgaataaaacactttagcagcatctgtataaatacaattgga

SEQ ID NO: 306380 - DNA, 2012 bp, Homo sapiens
  misc_feature (2)..(2): n is a, c, g, or t
  misc_feature (17)..(18): n is a, c, g, or t
  misc_feature (1204)..(1204): n is a, c, g, or t
gntttgaaggacagtanncgttttctcaatcacctaaacaacagacttggtgaccaaagaagggtgtattcatttccgtgtattgctgcttttgctgatgagcatgagatgagaaaaccagcggatgaaaaattagagaaattttggatcgacttcaacctaggaagtcagagtgtcactttttatatagacaatgctgagaatactctatgggactcagtgacacttccgaaggaagcggtgatgaatttcagcataacagaaacggagaagataaagatatttatcatttacctgaagaagcccatgattatcagctacaaagaagtcatgaaaatagaaatccattttgatttgcagttcaacatatcacaagtttccattcaagctttaggagaagacaaacagatgttgcctgaccagacgaaaatctcctcagaactttttagtaagtctgataaagaagacagggagagtcccagtggccttgaaagagaaacagagcaggcagaagaatccactaacatggtggagtttatgagtgctgaagatgaccgctgcctaataactctccacttaaatgaccaatctgagccacctgttattggggaacctgcctctgatagtcaccttcagccggtccctccgttcggggtccctgacttcccgcaacaacctaagtctcattacagaaaacatctcttctctgagagtaatcaagattcaagtaccagtgaactatcttggaccagtaaccagaaaaagaaatccctaaaatcatattccagtagaaagaagacaagaaccagaagtaatttgagaatcttgccagttttccctcccagtagtggcagtggccatgagaaagaccaagctaagcttctatcaccatcagagaaagaaatacccgagcaaaataacaccacatctccaaagacttctgaacaaaaattccaagatagttttgcttttttgactgctgaagattctgcccagaaaacagagcttcaagatcctcactcactgagtgagctctcttccttgaagcactcagaagatgaagaaaaacctaagattgtgaaccaagaatcactaacagaaagtactagcttgaaacataagctgagaaacttggaagacaaagacataccagaaggtagttttgctaagtcacaacaatcaagattggaagaagaggttgctncgggatcccctttctcaataacagaagaaagagagttgccagaaggaatttccacttcatccctagaagttgtgccagagaacttgaacggttctgccattctcccaacctttgaaaacttcactaaaaaacggaaaagaaaatatgagcttaggtacagaaagcgtccgtttaattcagaaaatgcaaagaaagcaccggattgcctaataaaacttttaaaccagatgcaactgttcagactcaataaactagagcgctttcaaaatttggttcttcaagagttgagcagtcttaagcaggatattcaggccctggaacaccttgagaaggaggttctggtaagttctttctgtgtggaacattttctgacttcggatctttcccagggaaaaataacgctagctacttaaacaaaacttttgttcaatcttaggaattctgggggaaacagtctgctgatctgcaatctttctgtgatctgcaagtgctgaggttcaattcaactcagacttcataagaaagccaaagcctggttttatgattgcagccctcagcacttcaacaaaagtgtcacctttagcagggcagaaatattcatcatgttgttattaattactagatgctctagtgaagtttgagtggatgaaattgcacatacaggtctaaactagcttgaaaagaataggagctggttctacatgagctgtcttacgtacagtgcttcagtctcagagaaatctgcaacatctatcatttgtttctagggccactgccgcctgggcaacaaagtgagactcttgtctca

SEQ ID NO: 306381 - DNA, 2179 bp, Homo sapiens
ctattctatacattgtattttaacaatattttactcatgtatcatctccactatcaaattagtgtataatcatttggtaaattagatcaaaaacatatactggtcattgtttttgaaaaatctaaatttcatcttgatgaagactaaatgtgaaatatcttgggcagtagtagtaggagccatacaccagtgaacaaattatgaaaatctgtgaaaggaagaggaaaaatgttcaaaatttagaagtatatttattttaggattgcttaacctactgtattattcgtaacaaccagagctactaatctgacctgacaactaatatgtttacattagcgccttcttttacaaatttgtgagaagtttcattatgaacactctgctgacaaattgtgaatttaaagccacatgtttctatgttaaaaaggatcaaaatgtttggttataaatcctcaggattaaaagtattagaaataattttacatattcaggcaagaagagaaaagctatttaagatttcccagaaatattttggaaaagagcagcactgggaaatagaaattaatgtaatcagttgcaagatacttgccttctataattataacaacttaatctgttaggcacctttggctattcaataatcattggatgttgtaatagaatgtaagtggcttttaatgtagctccaaggatatttataaattgtgttattgctgttattgttttaaatgtgagtgaatattaaattataggaagtggtatcaagtgataggaaaatggcattaggttttgaaattttattttgataatttaacacatatggagggtttgctatatgtatgagatattctgttagatgctgtgggagctagagagatatactctttttcactcaaagagagtaaaatatagtgggagagaccctaataactattttggtgaaggatgaatctaattccttatctctgacatcgtaagaagtgattagagacctagtttatgcataagcaattccttagtgtccaattaggttttattggcatgaaaaagaaatattaaaaaacctaatatttatagaactccaaatctcctagaattggataatgtattttctagtaagaaaactatagaaattttaaatatatatatttcctgtagtatcaagactctggctgacattgagagaaatatatgtacatgttgtgtttattttcagttttggtgttggattcctggtattgtcacctaagtgctcattttcaggaaaatcagattctacaataaacacttactgcttaaagttcagtaaacttgtgataacctcataacctctgtagtctaaaagttaaggaattataagatgtcacatgtcaagttaacatccagttctacttcttaaccttttttccctttgtaaacagcactttaattagacatgatttaattagataacaattattccatggctggatatgtactggattttcacttacagtacattgatttggtgttgatacacatttgaaaagagtgaggaatacaatacatttttaatacaataggtttacaaattttcctactggtgtgaatatggagtcaaataaaaatccagtttacatctctgcagagagaaaaattgttatccatatgtcttttatattatacatctttactagagataacttattgttaattttgtcaagttatgtgtaagtcccatttatttttaaatactaagcaaaaagttccaagtttgccttaaaatacaagtgaagttaaagaactggatgataatgcctatatttttgccttatgaattgtgctgtgtattataaaccagcaacggttttgattttaacaggattctgaaattttgtagctgtagagtactaatatttgtactctcttgcaaagaatgtgatctagttgtggattatgttagtttaaatgtttttgtatatgtattttacctctgaacatgtacctttttagcatcagggttttattttatttatgtttacacactaaagtgtcatttaactagttaagaattgtattcttttttattttaaaggttatttgtgtgtatcattgtggtaatgttctgtaattattatggttaaatttcatttaatgtaaaatgtttaaaataaaaatgaaaaatctaaaaatgtatatg

SEQ ID NO: 306382 - DNA, 1904 bp, Homo sapiens
gcggcgtttcttttgcggctccacgtcggcaccagctgcggggcaagatggaggcgctgattttggaaccttccctgtatactgtcaaagccatcctgattctggacaatgatggagatcgactttttgccaagtactatgacgacacctaccccagtgtcaaggagcaaaaggcctttgagaagaacattttcaacaagacccatcggactgacagtgaaattgccctcttggaaggcctgacagtggtatacaaaagcagtatagatctctatttctatgtgattggcagctcctatgaaaatgagctgatgcttatggctgttctgaactgtctcttcgactcattgagccagatgctgaggaaaaatgtagaaaagcgagcactgctggagaacatggaggggctgttcttggctgtggatgaaattgtagatggaggggtgatcctagagagtgatccccagcaggtggtacaccgggtggcattaaggggtgaagatgtcccccttacggagcagaccgtgtctcaggtgctgcagtcagccaaagaacagatcaagtggtcactccttcggtgaagacctcactgttcctggctcttcatcctcttcaaaaaatttgcatgtctgctgtgaattttcatctagttccccaatcgatgctctcagggtcatctcggggatcacagggatccttaaatctccattctgtttgtggttgccccctcaacctcccctacacccttcctattctttttcattcttcttgcagttctgggagtaaagctcccagcatatttagataatagggcaggggaagcaccctctttctttctagactggattatgctcacatgctcccttgccctgacatttttgtaaattctgtgccctttgctgtagctacacttcagattaaagtaggagaaagaatgtgctgagtgttttcctccctttgcctctacctggccctcatcccaacagcccagcaaggggagagagaaagagaattcttttctatagaacgagtgggggcggggatgggtagggatttatccaatctaagccctaaccccacttagtgacctcagtgttttcttccattccttcttactgccctgtcctctgccttggaagaggctttgggaatagttcatagggaagggacaacatggaagaaacagcgatttaaattgtattgaacagggcatataaaatgcattctgtaccctgatctggcatatagcttcaaaactgcagtggcgagtgtccatctcttagttagctaccttaactgtccacccttactacctgtgggatcgttgcctggtttgtcttctctgtgtcctggagcaaagccagttcctaaaactaaaactccattctagtcttgggaagaaaagtttctactcagaactggggaaggagtggaacttatgacttgggcctctaggctgtctctgtcccctcagctccccgacatgcatttactctctgccgtgggtctgcagtcgctgcaacctaccctctctctgcctcagccttacacccaagcagtaggtctgtgctctccctgtctctaggtcgctgagagaggtgcttttcttcataaaacctttggggtttggatttccccaggaagatggagaatggaatactcactcttgggtctaatctttccccttgacccagaacttcctccccacaaaaatgcctttaaaaaccttcctgagacttaagcattctgccccacttactaactgccagttctccagcactgaggtggggcagataacggggcatatttaagggggcatctttgtgtaaaagatgcatggagtcaggagaaaaccaccttcataaactgctctgtgcaaagaggaataaaacattttttccaaa

SEQ ID NO: 306383 - DNA, 935 bp, Homo sapiens
gcggcgtttcttttgcggctccacgtcggcaccagctgcggggcaagatggaggcgctgattttggaaccttccctgtatactgtcaaagccatcctgattctggacaatgatggagatcgactttttgccaagtactatgacgacacctaccccagtgtcaaggagcaaaaggcctttgagaagaacattttcaacaagacccatcggactgacagtgaaattgccctcttggaaggcctgacagtggtatacaaaagcagtatagatctctatttctatgtgattggcagctcctatgaaaatgagctgatgcttatggctgttctgaactgtctcttcgactcattgagccagatgctgaggaaaaatgtagaaaagcgagcactgctggagaacatggaggggctgttcttggctgtggatgaaattgtagatggaggggtgatcctagagagtgatccccagcaggtggtacaccgggtggcattaaggggtgaagatgtcccccttacggagcagaccgtgtctcaggtgctgcagtcagccaaagaacagatcaagtggtcactccttcggtgaagacctcactgttcctggctcttcatcctcttcaaaaaatttgcatgtctgctgtgaattttcatctagttccccaatcgatgctctcagggtcatctcggggatcacagggatccttaaatctccattctgtttgtggttgccccctcaacctcccctacacccttcctattctttttcattcttcttgcagttctgggagtaaagctcccagcatatttagataatagggcaggggaagcaccctctttctttctagactggattatgctcacatgctcccttgccctgacatttttgtaaattctgtgccctttgctgtagctacacttcagattaaagtaggagaaagaa

SEQ ID NO: 306384 - DNA, 787 bp, Homo sapiens
gcggcgtttcttttgcggctccacgtcggcaccagctgcggggcaagatggaggcgctgattttggaaccttccctgtatactgtcaaagccatcctgattctggacaatgatggagatcgactttttgccaagtactatgacgacacctaccccagtgtcaaggagcaaaaggcctttgagaagaacattttcaacaagacccatcggactgacagtgaaattgccctcttggaaggcctgacagtggtatacaaaagcagtatagatctctatttctatgtgattggcagctcctatgaaaatgagctgatgcttatggctgttctgaactgtctcttcgactcattgagccagatgctgaggaaaaatgtagaaaagcgagcactgctggagaacatggaggggctgttcttggctgtggatgaaattgtagatggaggggtgatcctagagagtgatccccagcaggtggtacaccgggtggcattaaggggtgaagatgtcccccttacggagcagaccgtgtctcaggtgctgcagtcagccaaagaacagatcaagtggtcactccttcggtgaagacctcactgttcctggctcttcatcctcttcaaaaaatttgcatgtctgctgtgaattttcatctagttccccaatcgatgctctcagggtcatctcggggatcacagggatccttaaatctccattctgtttgtggttgcccctttcctccttccatattttgcatctatctgcgactgggataagttcagcttttgtatggg

SEQ ID NO: 306385 - DNA, 1921 bp, Homo sapiens
  misc_feature (40)..(40): n is a, c, g, or t
gacccacgcgtccgcggacgcgtgggtcgacccacgcgtncgtcggcaccagctgcggggcaagatggaggcgctgattttggaaccttccctgtatactgtcaaagccatcctgattctggacaatgatggagatcgactttttgccaagtactatgacgacacctaccccagtgtcaaggagcaaaaggcctttgagaagaacattttcaacaagacccatcggactgacagtgaaattgccctcttggaaggcctgacagtggtatacaaaagcagtatagatctctatttctatgtgattggcagctcctatgaaaatgagctgatgcttatggctgttctgaactgtctcttcgactcattgagccagatgctgaggaaaaatgtagaaaagcgagcactgctggagaacatggaggggctgttcttggctgtggatgaaattgtagatggaggggtgatcctagagagtgatccccagcaggtggtacaccgggtggcattaaggggtgaagatgtcccccttacggagcagaccgtgtctcaggtgctgcagtcagccaaagaacagatcaagtggtcactccttcggtgaagacctcactgttcctggctcttcatcctcttcaaaaaatttgcatgtctgctgtgaattttcatctagttccccaatcgatgctctcagggtcatctcggggatcacagggatccttaaatctccattctgtttgtggttgccccctcaacctcccctacacccttcctattctttttcattcttcttgcagttctgggagtaaagctcccagcatatttagataatagggcaggggaagcaccctctttctttctagactggattatgctcacatgctcccttgccctgacatttttgtaaattctgtgccctttgctgtagctacacttcagattaaagtaggagaaagaatgtgctgagtgttttcctccctttgcctctacctggccctcatcccaacagcccagcaaggggagagagaaagagaattcttttctatagaacgagtgggggcggggatgggtagggatttatccaatctaagccctaaccccacttagtgacctcagtgttttcttccattccttcttactgccctgtcctctgccttggaagaggctttgggaatagttcatagggaagggacaacatggaagaaacagcgatttaaattgtattgaacagggcatataaaatgcattctgtaccctgatctggcatatagcttcaaaactgcagtggcgagtgtccatctcttagttagctaccttaactgtccacccttactacctgtgggatcgttgcctggtttgtcttctctgtgtcctggagcaaagccagttcctaaaactaaaactccattctagtcttgggaagaaaagtttctactcagaactggggaaggagtggaacttatgacttgggcctctaggctgtctctgtcccctcagctccccgacatgcatttactctctgccgtgggtctgcagtcgctgcaacctaccctctctctgcctcagccttacacccaagcagtaggtctgtgctctccctgtctctaggtcgctgagagaggtgcttttcttcataaaacctttggggtttggatttccccaggaagatggagaatggaatactcactcttgggtctaatctttccccttgacccagaacttcctccccacaaaaatgcctttaaaaaccttcctgagacttaagcattctgccccacttactaactgccagttctccagcactgaggtggggcagataacggggcatatttaagggggcatctttgtgtaaaagatgcatggagtcaggagaaaaccaccttcataaactgctctgtgcaaagaggaataaaacattttttccaaa

SEQ ID NO: 306386 - DNA, 1815 bp, Homo sapiens
gcggcgtttcttttgcggctccacgtcggcaccagctgcggggcaagatggaggcgctgattttggaaccttccctgtatactgtcaaagccatcctgattctggacaatgatggagatcgactttttgccaagtactatgacgacacctaccccagtgtcaaggagcaaaaggcctttgagaagaacattttcaacaagacccatcggactgacagtgaaattgccctcttggaaggcctgacagtggtatacaaaagcagtatagatctctatttctatgtgattggcagctcctatgaaaatgagctgatgcttatggctgttctgaactgtctcttcgactcattgagccagatgctgaggaaaaatgtagaaaagcgagcactgctggagaacatggaggggctgttcttggctgtggatgaaattgtagatggaggggtgatcctagagagtgatccccagcaggtggtacaccgggtggcattaaggggtgaagatgtcccccttacggagcagaccgtgtctcaggtgctgcagtcagccaaagaacagatcaagtggtcactccttcggtgaagacctcactgttcctggctcttcatcctcttcaaaaaatttgcatgtctgctgtgaattttcatctagttccccaatcgatgctctcagggtcatctcggggatcacagggatccttaaatctccattctgtttgtggttgccccctcaacctcccctacacccttcctattctttttcattcttcttgcagttctgggagtaaagctcccagcatatttagataatagggcaggggaagcaccctctttctttctagactggattatgctcacatgctcccttgccctgacatttttgtaaattctgtgccctttgctgtagctacacttcagattaaagtaggagaaagaatgtgctgagtgttttcctccctttgcctctacctggccctcatcccaacagcccagcaaggggagagagaaagagaattcttttctatagaacgagtgggggcggggatgggtagggatttatccaatctaagccctaaccccacttagtgacctcagtgttttcttccattccttcttactgccctgtcctctgccttggaagaggctttgggaatagttcatagggaagggacaacatggaagaaacagcgatttaaattgtattgaacagggcatataaaatgcattctgtaccctgatctggcatatagcttctctgtgtcctggagcaaagccagttcctaaaactaaaactccattctagtcttgggaagaaaagtttctactcagaactggggaaggagtggaacttatgacttgggcctctaggctgtctctgtcccctcagctccccgacatgcatttactctctgccgtgggtctgcagtcgctgcaacctaccctctctctgcctcagccttacacccaagcagtaggtctgtgctctccctgtctctaggtcgctgagagaggtgcttttcttcataaaacctttggggtttggatttccccaggaagatggagaatggaatactcactcttgggtctaatctttccccttgacccagaacttcctccccacaaaaatgcctttaaaaaccttcctgagacttaagcattctgccccacttactaactgccagttctccagcactgaggtggggcagataacggggcatatttaagggggcatctttgtgtaaaagatgcatggagtcaggagaaaaccaccttcataaactgctctgtgcaaagaggaataaaacattttttccaaa

SEQ ID NO: 306387 - DNA, 1902 bp, Homo sapiens
aggctggtaccggtctgggatgtttgaggatcagctgcggggcagatggaggcgctgattttggaaccttccctgtatactgtcaaagccatcctgattctggacaatgatggagatcgactttttgccaagtactatgacgacacctaccccagtgtcaaggagcaaaaggcctttgagaagaacattttcaacaagacccatcggactgacagtgaaattgccctcttggaaggcctgacagtggtatacaaaagcagtatagatctctatttctatgtgattggcagctcctatgaaaatgagctgatgcttatggctgttctgaactgtctcttcgactcattgagccagatgctgaggaaaaatgtagaaaagcgagcactgctggagaacatggaggggctgttcttggctgtggatgaaattgtagatggaggggtgatcctagagagtgatccccagcaggtggtacaccgggtggcattaaggggtgaagatgtcccccttacggagcagaccgtgtctcaggtgctgcagtcagccaaagaacagatcaagtggtcactccttcggtgaagacctcactgttcctggctcttcatcctcttcaaaaaatttgcatgtctgctgtgaattttcatctagttccccaatcgatgctctcagggtcatctcggggatcacagggatccttaaatctccattctgtttgtggttgccccctcaacctcccctacacccttcctattctttttcattcttcttgcagttctgggagtaaagctcccagcatatttagataatagggcaggggaagcaccctctttctttctagactggattatgctcacatgctcccttgccctgacatttttgtaaattctgtgccctttgctgtagctacacttcagattaaagtaggagaaagaatgtgctgagtgttttcctccctttgcctctacctggccctcatcccaacagcccagcaaggggagagagaaagagaattcttttctatagaacgagtgggggcggggatgggtagggatttatccaatctaagccctaaccccacttagtgacctcagtgttttcttccattccttcttactgccctgtcctctgccttggaagaggctttgggaatagttcatagggaagggacaacatggaagaaacagcgatttaaattgtattgaacagggcatataaaatgcattctgtaccctgatctggcatatagcttcaaaactgcagtggcgagtgtccatctcttagttagctaccttaactgtccacccttactacctgtgggatcgttgcctggtttgtcttctctgtgtcctggagcaaagccagttcctaaaactaaaactccattctagtcttgggaagaaaagtttctactcagaactggggaaggagtggaacttatgacttgggcctctaggctgtctctgtcccctcagctccccgacatgcatttactctctgccgtgggtctgcagtcgctgcaacctaccctctctctgcctcagccttacacccaagcagtaggtctgtgctctccctgtctctaggtcgctgagagaggtgcttttcttcataaaacctttggggtttggatttccccaggaagatggagaatggaatactcactcttgggtctaatctttccccttgacccagaacttcctccccacaaaaatgcctttaaaaaccttcctgagacttaagcattctgccccacttactaactgccagttctccagcactgaggtggggcagataacggggcatatttaagggggcatctttgtgtaaaagatgcatggagtcaggagaaaaccaccttcataaactgctctgtgcaaagaggaataaaacattttttccaaa

SEQ ID NO: 306388 - DNA, 2167 bp, Homo sapiens
gcggcgtttcttttgcggctccacgtcggcaccagctgcggggcaagatggaggcgctgattttggaaccttccctgtatactgtcaaagccatcctgattctggacaatgatggagatcgactttttgccaagtactatgacgacacctaccccagtgtcaaggagcaaaaggcctttgagaagaacattttcaacaagacccatcggactgacagtgaaattgccctcttggaaggcctgacagtggtatacaaaagcagtatagatctctatttctatgtgattggcagctcctatgaaaatgagctgatgcttatggctgttctgaactgtctcttcgactcattgagccagatgctgaggaaaaatgtagaaaagcgagcactgctggagaacatggaggggctgttcttggctgtggatgaaattgtagatggaggggtgatcctagagagtgatccccagcaggtggtacaccgggtggcattaaggggtgaagatgtcccccttacggagcagaccgtgtctcaggtgctgcagtcagccaaagaacagatcaagtggtcactccttcggtgaagacctcactgttcctggctcttcatcctcttcaaaaaatttgcatgtctgctgtgaattttcatctagttccccaatcgatgctctcagggtcatctcggggatcacagggatccttaaatctccattctgtttgtggttgccccctcaacctcccctacacccttcctattctttttcattcttcttgcagttctgggagtaaagctcccagcatatttagataatagggcaggggaagcaccctctttctttctagactggattatgctcacatgctcccttgccctgacatttttgtaaattctgtgccctttgctgtagctacacttcagattaaagtaggagaaagaatgtgctgagtgttttcctccctttgcctctacctggccctcatcccaacagcccagcaaggggagagagaaagagaattcttttctatagaacgagtgggggcggggatgggtagggatttatccaatctaagccctaaccccacttagtgacctcagtgttttcttccattccttcttactgccctgtcctctgccttggaagaggctttgggaatagttcatagggaagggacaacatggaagaaacagcgatttaaattgtattgaacagggcatataaaatgcattctgtaccctgatctggcatatagcttcaaaactgcagtggcgagtgtccatctcttagttagctaccttaactgtccacccttactacctgtgggatcgttgcctggtttgtcttctctgtgtcctggagcaaagccagttcctaaaactaaaactccattctagtcttgggaagaaaagtttctactcagaactggggaaggagtggaacttatgacttgggcctctaggctgtctctgtcccctcagctccccgacatgcatttactctctgccgtgggtctgcagtcgctgcaacctaccctctctctgcctcagccttacacccaagcagtaggtctgtgctctccctgtctctaggtcgctgagagaggtgcttttcttcataaaacctttggggtttggatttccccaggaagatggagaatggaatactcactcttgggtctaatctttccccttgacccagaacttcctccccacaaaaatgcctttaaaaaccttcctgagacttaagcattctgccccacttactaactgccagttctccagcactgaggtggggcagataacggggcatatttaagggggcatctttgtgtaaaagatgcatggagtcaggagaaaaccaccttcataaactgctctgtgcaaagaggaataaaacattttttccaaagaaaaaaacagggcgcgccgcaagaagaacctagaggaggcccaagaaacgcgaacccagcgacatggacacacaggggggtcccacaaaggagcgcgcaattatacaagccaagaccacgggccgccgtgcaacaacggcataacctgggaaaacgcgcaagccatgggactcttgcgaagcaacctagccacgaggagtacacaagcgggcaacacacaacgagaataaacgcaaggcaaggacacgcaagcgtcaacgta

SEQ ID NO: 306389 - DNA, 2453 bp, Homo sapiens
taaattctattccaaattacaaagccgggcacggtggctcacgcctgtaaatccagcactttgggaggccgaggtgggcggatcacgaggtcaggagttggagaccagcctgaccaacatggtgaaacccggtctctgctaaaaatacaaaacttagctgggcgtggccacgcctgtaatcccagctactcaggaagctgaggcaagagaatcacttgaacctgggaggcagaggtcgcggtgagccgagatgcgccactgcactccagcctgggtgacagagcaaggctctgtctcagaaaagttaaagaaaaagaaagtctctctgtcacatttctcttcccttagttctctgtctctgcttcttcagtgaagtctgtttcagcctgcttcttccttattcttttgctttaatctatgcctaataggctgcattcacagatccctgctaacttgatcaggtaaccctggactttgcttttaaaaccacactggttctttgttatgggaaacctatgtaatgcggttagggacaatctgatcaaagcatattcttctgtccttaactctacaaggtacatacatagctgcaggatgtcgagaaaaagggacaggaaccttccctgtatactgtcaaagccatcctgattctggacaatgatggagatcgactttttgccaagtactatgacgacacctaccccagtgtcaaggagcaaaaggcctttgagaagaacattttcaacaagacccatcggactgacagtgaaattgccctcttggaaggcctgacagtggtatacaaaagcagtatagatctctatttctatgtgattggcagctcctatgaaaatgagctgatgcttatggctgttctgaactgtctcttcgactcattgagccagatgctgaggaaaaatgtagaaaagcgagcactgctggagaacatggaggggctgttcttggctgtggatgaaattgtagatggaggggtgatcctagagagtgatccccagcaggtggtacaccgggtggcattaaggggtgaagatgtcccccttacggagcagaccgtgtctcaggtgctgcagtcagccaaagaacagatcaagtggtcactccttcggtgaagacctcactgttcctggctcttcatcctcttcaaaaaatttgcatgtctgctgtgaattttcatctagttccccaatcgatgctctcagggtcatctcggggatcacagggatccttaaatctccattctgtttgtggttgccccctcaacctcccctacacccttcctattctttttcattcttcttgcagttctgggagtaaagctcccagcatatttagataatagggcaggggaagcaccctctttctttctagactggattatgctcacatgctcccttgccctgacatttttgtaaattctgtgccctttgctgtagctacacttcagattaaagtaggagaaagaatgtgctgagtgttttcctccctttgcctctacctggccctcatcccaacagcccagcaaggggagagagaaagagaattcttttctatagaacgagtgggggcggggatgggtagggatttatccaatctaagccctaaccccacttagtgacctcagtgttttcttccattccttcttactgccctgtcctctgccttggaagaggctttgggaatagttcatagggaagggacaacatggaagaaacagcgatttaaattgtattgaacagggcatataaaatgcattctgtaccctgatctggcatatagcttcaaaactgcagtggcgagtgtccatctcttagttagctaccttaactgtccacccttactacctgtgggatcgttgcctggtttgtcttctctgtgtcctggagcaaagccagttcctaaaactaaaactccattctagtcttgggaagaaaagtttctactcagaactggggaaggagtggaacttatgacttgggcctctaggctgtctctgtcccctcagctccccgacatgcatttactctctgccgtgggtctgcagtcgctgcaacctaccctctctctgcctcagccttacacccaagcagtaggtctgtgctctccctgtctctaggtcgctgagagaggtgcttttcttcataaaacctttggggtttggatttccccaggaagatggagaatggaatactcactcttgggtctaatctttccccttgacccagaacttcctccccacaaaaatgcctttaaaaaccttcctgagacttaagcattctgccccacttactaactgccagttctccagcactgaggtggggcagataacggggcatatttaagggggcatctttgtgtaaaagatgcatggagtcaggagaaaaccaccttcataaactgctctgtgcaaagaggaataaaacattttttccaaa

SEQ ID NO: 306390 - DNA, 1943 bp, Homo sapiens
  misc_feature (84)..(84): n is a, c, g, or t
gacaaactttcatttcagagcatcactactgtctgtggccctggaaattaaaatggatcacagaagtgaatgggacaaaaggcnagatggaggcgctgattttggaaccttccctgtatactgtcaaagccatcctgattctggacaatgatggagatcgactttttgccaagtactatgacgacacctaccccagtgtcaaggagcaaaaggcctttgagaagaacattttcaacaagacccatcggactgacagtgaaattgccctcttggaaggcctgacagtggtatacaaaagcagtatagatctctatttctatgtgattggcagctcctatgaaaatgagctgatgcttatggctgttctgaactgtctcttcgactcattgagccagatgctgaggaaaaatgtagaaaagcgagcactgctggagaacatggaggggctgttcttggctgtggatgaaattgtagatggaggggtgatcctagagagtgatccccagcaggtggtacaccgggtggcattaaggggtgaagatgtcccccttacggagcagaccgtgtctcaggtgctgcagtcagccaaagaacagatcaagtggtcactccttcggtgaagacctcactgttcctggctcttcatcctcttcaaaaaatttgcatgtctgctgtgaattttcatctagttccccaatcgatgctctcagggtcatctcggggatcacagggatccttaaatctccattctgtttgtggttgccccctcaacctcccctacacccttcctattctttttcattcttcttgcagttctgggagtaaagctcccagcatatttagataatagggcaggggaagcaccctctttctttctagactggattatgctcacatgctcccttgccctgacatttttgtaaattctgtgccctttgctgtagctacacttcagattaaagtaggagaaagaatgtgctgagtgttttcctccctttgcctctacctggccctcatcccaacagcccagcaaggggagagagaaagagaattcttttctatagaacgagtgggggcggggatgggtagggatttatccaatctaagccctaaccccacttagtgacctcagtgttttcttccattccttcttactgccctgtcctctgccttggaagaggctttgggaatagttcatagggaagggacaacatggaagaaacagcgatttaaattgtattgaacagggcatataaaatgcattctgtaccctgatctggcatatagcttcaaaactgcagtggcgagtgtccatctcttagttagctaccttaactgtccacccttactacctgtgggatcgttgcctggtttgtcttctctgtgtcctggagcaaagccagttcctaaaactaaaactccattctagtcttgggaagaaaagtttctactcagaactggggaaggagtggaacttatgacttgggcctctaggctgtctctgtcccctcagctccccgacatgcatttactctctgccgtgggtctgcagtcgctgcaacctaccctctctctgcctcagccttacacccaagcagtaggtctgtgctctccctgtctctaggtcgctgagagaggtgcttttcttcataaaacctttggggtttggatttccccaggaagatggagaatggaatactcactcttgggtctaatctttccccttgacccagaacttcctccccacaaaaatgcctttaaaaaccttcctgagacttaagcattctgccccacttactaactgccagttctccagcactgaggtggggcagataacggggcatatttaagggggcatctttgtgtaaaagatgcatggagtcaggagaaaaccaccttcataaactgctctgtgcaaagaggaataaaacattttttccaaa

SEQ ID NO: 306391 - DNA, 1938 bp, Homo sapiens
tgatggtttcccaagtttgactctccattgccgattccctgccacattccttcaggaaactgttttgtcttcggtttcctgttaatccctattatataggaaccttccctgtatactgtcaaagccatcctgattctggacaatgatggagatcgactttttgccaagtactatgacgacacctaccccagtgtcaaggagcaaaaggcctttgagaagaacattttcaacaagacccatcggactgacagtgaaattgccctcttggaaggcctgacagtggtatacaaaagcagtatagatctctatttctatgtgattggcagctcctatgaaaatgagctgatgcttatggctgttctgaactgtctcttcgactcattgagccagatgctgaggaaaaatgtagaaaagcgagcactgctggagaacatggaggggctgttcttggctgtggatgaaattgtagatggaggggtgatcctagagagtgatccccagcaggtggtacaccgggtggcattaaggggtgaagatgtcccccttacggagcagaccgtgtctcaggtgctgcagtcagccaaagaacagatcaagtggtcactccttcggtgaagacctcactgttcctggctcttcatcctcttcaaaaaatttgcatgtctgctgtgaattttcatctagttccccaatcgatgctctcagggtcatctcggggatcacagggatccttaaatctccattctgtttgtggttgccccctcaacctcccctacacccttcctattctttttcattcttcttgcagttctgggagtaaagctcccagcatatttagataatagggcaggggaagcaccctctttctttctagactggattatgctcacatgctcccttgccctgacatttttgtaaattctgtgccctttgctgtagctacacttcagattaaagtaggagaaagaatgtgctgagtgttttcctccctttgcctctacctggccctcatcccaacagcccagcaaggggagagagaaagagaattcttttctatagaacgagtgggggcggggatgggtagggatttatccaatctaagccctaaccccacttagtgacctcagtgttttcttccattccttcttactgccctgtcctctgccttggaagaggctttgggaatagttcatagggaagggacaacatggaagaaacagcgatttaaattgtattgaacagggcatataaaatgcattctgtaccctgatctggcatatagcttcaaaactgcagtggcgagtgtccatctcttagttagctaccttaactgtccacccttactacctgtgggatcgttgcctggtttgtcttctctgtgtcctggagcaaagccagttcctaaaactaaaactccattctagtcttgggaagaaaagtttctactcagaactggggaaggagtggaacttatgacttgggcctctaggctgtctctgtcccctcagctccccgacatgcatttactctctgccgtgggtctgcagtcgctgcaacctaccctctctctgcctcagccttacacccaagcagtaggtctgtgctctccctgtctctaggtcgctgagagaggtgcttttcttcataaaacctttggggtttggatttccccaggaagatggagaatggaatactcactcttgggtctaatctttccccttgacccagaacttcctccccacaaaaatgcctttaaaaaccttcctgagacttaagcattctgccccacttactaactgccagttctccagcactgaggtggggcagataacggggcatatttaagggggcatctttgtgtaaaagatgcatggagtcaggagaaaaccaccttcataaactgctctgtgcaaagaggaataaaacattttttccaaa

SEQ ID NO: 306392 - DNA, 1872 bp, Homo sapiens
gtaccatgtatagcggatagggtgctgattttggaaccttccctgtatactgtcaaagccatcctgattctggacaatgatggagatcgactttttgccaagtactatgacgacacctaccccagtgtcaaggagcaaaaggcctttgagaagaacattttcaacaagacccatcggactgacagtgaaattgccctcttggaaggcctgacagtggtatacaaaagcagtatagatctctatttctatgtgattggcagctcctatgaaaatgagctgatgcttatggctgttctgaactgtctcttcgactcattgagccagatgctgaggaaaaatgtagaaaagcgagcactgctggagaacatggaggggctgttcttggctgtggatgaaattgtagatggaggggtgatcctagagagtgatccccagcaggtggtacaccgggtggcattaaggggtgaagatgtcccccttacggagcagaccgtgtctcaggtgctgcagtcagccaaagaacagatcaagtggtcactccttcggtgaagacctcactgttcctggctcttcatcctcttcaaaaaatttgcatgtctgctgtgaattttcatctagttccccaatcgatgctctcagggtcatctcggggatcacagggatccttaaatctccattctgtttgtggttgccccctcaacctcccctacacccttcctattctttttcattcttcttgcagttctgggagtaaagctcccagcatatttagataatagggcaggggaagcaccctctttctttctagactggattatgctcacatgctcccttgccctgacatttttgtaaattctgtgccctttgctgtagctacacttcagattaaagtaggagaaagaatgtgctgagtgttttcctccctttgcctctacctggccctcatcccaacagcccagcaaggggagagagaaagagaattcttttctatagaacgagtgggggcggggatgggtagggatttatccaatctaagccctaaccccacttagtgacctcagtgttttcttccattccttcttactgccctgtcctctgccttggaagaggctttgggaatagttcatagggaagggacaacatggaagaaacagcgatttaaattgtattgaacagggcatataaaatgcattctgtaccctgatctggcatatagcttcaaaactgcagtggcgagtgtccatctcttagttagctaccttaactgtccacccttactacctgtgggatcgttgcctggtttgtcttctctgtgtcctggagcaaagccagttcctaaaactaaaactccattctagtcttgggaagaaaagtttctactcagaactggggaaggagtggaacttatgacttgggcctctaggctgtctctgtcccctcagctccccgacatgcatttactctctgccgtgggtctgcagtcgctgcaacctaccctctctctgcctcagccttacacccaagcagtaggtctgtgctctccctgtctctaggtcgctgagagaggtgcttttcttcataaaacctttggggtttggatttccccaggaagatggagaatggaatactcactcttgggtctaatctttccccttgacccagaacttcctccccacaaaaatgcctttaaaaaccttcctgagacttaagcattctgccccacttactaactgccagttctccagcactgaggtggggcagataacggggcatatttaagggggcatctttgtgtaaaagatgcatggagtcaggagaaaaccaccttcataaactgctctgtgcaaagaggaataaaacattttttccaaa

SEQ ID NO: 306393 - DNA, 2108 bp, Homo sapiens
tctcttgattaagccccctgtgagtcagagaaactgtttctctgatggtactttggaatcctttgtttaaatgctttctctgtcaattcagtttacttaccctgggtctttctcaatgggaaatatcaaaatctgaccaagttgaggtaagggacttacagaggtacctctgtatccccttgcagccccagtgggactaggggaaggtatctggtttaccagtggtgatgggaggcttcaggactgaaggtatgttcgtatctcttcaggaaccttccctgtatactgtcaaagccatcctgattctggacaatgatggagatcgactttttgccaagtactatgacgacacctaccccagtgtcaaggagcaaaaggcctttgagaagaacattttcaacaagacccatcggactgacagtgaaattgccctcttggaaggcctgacagtggtatacaaaagcagtatagatctctatttctatgtgattggcagctcctatgaaaatgagctgatgcttatggctgttctgaactgtctcttcgactcattgagccagatgctgaggaaaaatgtagaaaagcgagcactgctggagaacatggaggggctgttcttggctgtggatgaaattgtagatggaggggtgatcctagagagtgatccccagcaggtggtacaccgggtggcattaaggggtgaagatgtcccccttacggagcagaccgtgtctcaggtgctgcagtcagccaaagaacagatcaagtggtcactccttcggtgaagacctcactgttcctggctcttcatcctcttcaaaaaatttgcatgtctgctgtgaattttcatctagttccccaatcgatgctctcagggtcatctcggggatcacagggatccttaaatctccattctgtttgtggttgccccctcaacctcccctacacccttcctattctttttcattcttcttgcagttctgggagtaaagctcccagcatatttagataatagggcaggggaagcaccctctttctttctagactggattatgctcacatgctcccttgccctgacatttttgtaaattctgtgccctttgctgtagctacacttcagattaaagtaggagaaagaatgtgctgagtgttttcctccctttgcctctacctggccctcatcccaacagcccagcaaggggagagagaaagagaattcttttctatagaacgagtgggggcggggatgggtagggatttatccaatctaagccctaaccccacttagtgacctcagtgttttcttccattccttcttactgccctgtcctctgccttggaagaggctttgggaatagttcatagggaagggacaacatggaagaaacagcgatttaaattgtattgaacagggcatataaaatgcattctgtaccctgatctggcatatagcttcaaaactgcagtggcgagtgtccatctcttagttagctaccttaactgtccacccttactacctgtgggatcgttgcctggtttgtcttctctgtgtcctggagcaaagccagttcctaaaactaaaactccattctagtcttgggaagaaaagtttctactcagaactggggaaggagtggaacttatgacttgggcctctaggctgtctctgtcccctcagctccccgacatgcatttactctctgccgtgggtctgcagtcgctgcaacctaccctctctctgcctcagccttacacccaagcagtaggtctgtgctctccctgtctctaggtcgctgagagaggtgcttttcttcataaaacctttggggtttggatttccccaggaagatggagaatggaatactcactcttgggtctaatctttccccttgacccagaacttcctccccacaaaaatgcctttaaaaaccttcctgagacttaagcattctgccccacttactaactgccagttctccagcactgaggtggggcagataacggggcatatttaagggggcatctttgtgtaaaagatgcatggagtcaggagaaaaccaccttcataaactgctctgtgcaaagaggaataaaacattttttccaaa

SEQ ID NO: 306394 - DNA, 1933 bp, Homo sapiens
gcggcgtttcttttgcggctccacgtcggcaccagctgcggggcaagatggaggcgctgattttggaaccttccctgtatactgtcaaagccatcctgattctggacaatgatggagatcgactttttgccaagtactatgacgacacctaccccagtgtcaaggagcaaaaggcctttgagaagaacattttcaacaagacccatcggactgacagtgaaattgccctcttggaaggcctgacagtggtatacaaaagcagtatagatctctatttctatgtgattggcagctcctatgaaaatgagctgatgcttatggctgttctgaactgtctcttcgactcattgagccagatgctgaggaaaaatgtagaaaagcgagcactgctggagaacatggaggggctgttcttggctgtggatgaaattgtagatggaggggtgatcctagagagtgatccccagcaggtggtacaccgggtggcattaaggggtgaagatgtcccccttacggagcagaccgtgtctcaggtgctgcagtcagccaaagaacagatcaagtggtcactccttcggtgaagacctcactgttcctggctcttcatcctcttcaaaaaatttgcatgtctgctgtgaattttcatctagttccccaatcgatgctctcagggtcatctcggggatcacagggatccttaaatctccattctgtttgtggttgccccctcaacctcccctacacccttcctattctttttcattcttcttgcagttctgggagtaaagctcccagcatatttagataatagggcaggggaagcaccctctttctttctagactggattatgctcacatgctcccttgccctgacatttttgtaaattctgtgccctttgctgtagctacacttcagattaaagtaggagaaagaatgtgctgagtgttttcctccctttgcctctacctggccctcatcccaacagcccagcaaggggagagagaaagagaattcttttctatagaacgagtgggggcggggatgggtagggatttatccaatctaagccctaaccccacttagtgacctcagtgttttcttccattccttcttactgccctgtcctctgccttggaagaggctttgggaatagttcatagggaagggacaacatggaagaaacagcgatttaaattgtattgaacagggcatataaaatgcattctgtaccctgatctggcatatagcttcaaaactgcagtggcgagtgtccatctcttagttagctaccttaactgtccacccttactacctgtgggatcgttgcctggtttgtcttctctgtgtcctggagcaaagccagttcctaaaactaaaactccattctagtcttgggaagaaaagtttctactcagaactggggaaggagtggaacttatgacttgggcctctaggctgtctctgtcccctcagctccccgacatgcatttactctctgccgtgggtctgcagtcgctgcaacctaccctctctctgcctcagccttacacccaagcagtaggtctgtgctctccctgtctctaggtcgctgagagaggtgcttttcttcataaaacctttggggtttggatttccccaggaagatggagaatggaatactcactcttgggtctaatctttccccttgacccagaacttcctccccacaaaaatgcctttaaaaaccttcctgagacttaagcattctgccccacttactaactgccagttctccagcactgaggtggggcagataacggggcatatttaagggggcatctttgtgtaaaagatgcatggagtcaggagaaaaccaccttcataaactgctctgtgcaaagaggaataaaacattttttccaaatcagtcgacgcggccgcgaatttagtagt

SEQ ID NO: 306395 - DNA, 1812 bp, Homo sapiens
gcggcgtttcttttgcggctccacgtcggcaccagctgcggggcaagatggaggcgctgattttggaaccttccctgtatactgtcaaagccatcctgattctggacaatgatggagatcgactttttgccaagtactatgacgacacctaccccagtgtcaaggagcaaaaggcctttgagaagaacattttcaacaagacccatcggactgacactgatgcttatggctgttctgaactgtctcttcgactcattgagccagatgctgaggaaaaatgtagaaaagcgagcactgctggagaacatggaggggctgttcttggctgtggatgaaattgtagatggaggggtgatcctagagagtgatccccagcaggtggtacaccgggtggcattaaggggtgaagatgtcccccttacggagcagaccgtgtctcaggtgctgcagtcagccaaagaacagatcaagtggtcactccttcggtgaagacctcactgttcctggctcttcatcctcttcaaaaaatttgcatgtctgctgtgaattttcatctagttccccaatcgatgctctcagggtcatctcggggatcacagggatccttaaatctccattctgtttgtggttgccccctcaacctcccctacacccttcctattctttttcattcttcttgcagttctgggagtaaagctcccagcatatttagataatagggcaggggaagcaccctctttctttctagactggattatgctcacatgctcccttgccctgacatttttgtaaattctgtgccctttgctgtagctacacttcagattaaagtaggagaaagaatgtgctgagtgttttcctccctttgcctctacctggccctcatcccaacagcccagcaaggggagagagaaagagaattcttttctatagaacgagtgggggcggggatgggtagggatttatccaatctaagccctaaccccacttagtgacctcagtgttttcttccattccttcttactgccctgtcctctgccttggaagaggctttgggaatagttcatagggaagggacaacatggaagaaacagcgatttaaattgtattgaacagggcatataaaatgcattctgtaccctgatctggcatatagcttcaaaactgcagtggcgagtgtccatctcttagttagctaccttaactgtccacccttactacctgtgggatcgttgcctggtttgtcttctctgtgtcctggagcaaagccagttcctaaaactaaaactccattctagtcttgggaagaaaagtttctactcagaactggggaaggagtggaacttatgacttgggcctctaggctgtctctgtcccctcagctccccgacatgcatttactctctgccgtgggtctgcagtcgctgcaacctaccctctctctgcctcagccttacacccaagcagtaggtctgtgctctccctgtctctaggtcgctgagagaggtgcttttcttcataaaacctttggggtttggatttccccaggaagatggagaatggaatactcactcttgggtctaatctttccccttgacccagaacttcctccccacaaaaatgcctttaaaaaccttcctgagacttaagcattctgccccacttactaactgccagttctccagcactgaggtggggcagataacggggcatatttaagggggcatctttgtgtaaaagatgcatggagtcaggagaaaaccaccttcataaactgctctgtgcaaagaggaataaaacattttttccaaa

SEQ ID NO: 306396 - DNA, 1807 bp, Homo sapiens
gcggcgtttcttttgcggctccacgtcggcaccagctgcggggcaagatggaggcgctgattttggaaccttccctgtatactgtcaaagccatcctgattctggacaatgatggagatcgactttttgccaagtactatgacgacacctaccccagtgtcaaggagcaaaaggcctttgagaagaacattttcaacaagacccatcggactgacagtgaaattgccctcttggaaggcctgacagtggtatacaaaagcagtatagatctctatttctatgtgattggcagctcctatgaaaatgagctgatgcttatggctgttctgaactgtctcttcgactcattgagccagatgctgaggaaaaatgtagaaaagcgagcactgctggagaacatggaggggctgttcttggctgtggatgaaattgtagatggaggggtgatcctagagagtgatccccagcaggtggtacaccgggtggcattaaggggtgaagatgtcccccttacggagcagaccgtgtctcaggtgctgcagtcagccaaagaacagatcaagtggtcactccttcggtgaagacctcactgttcctggctcttcatcctcttcaaaaaatttgcatgtctgctgtgaattttcatctagttccccaatcgatgctctcagggtcatctcggggatcacagggatccttaaatctccattctgtttgtggttgccccctcaacctcccctacacccttcctattctttttcattcttcttgcagttctgggagtaaagctcccagcatatttagataatagggcaggggaagcaccctctttctttctagactggattatgctcacatgctcccttgccctgacatttttgtaaattctgtgccctttgctgtagctacacttcagattaaagtaggagaaagaatgtgctgagtgttttcctccctttgcctctacctggccctcatcccaacagcccagcaaggggagagagaaagagaattcttttctatagaacgagtgggggcggggatgggtagggatttatccaatctaagccctaaccccacttagtgacctcagtgttttcttccattccttcttactgccctgtcctctgccttggaagaggctttgggaatagttcatagggaagggacaacatggaagaaacagcgatttaaattgtattgaacagggcatataaaatgcattctgtaccctgatctggcatatagcttcaaaactgcagtggcgagtgtccatctcttagttagctaccttaactgtccacccttactacctgtgggatcgttgcctggtttgtcttctctgtgtcctggagcaaagccagttcctaaaactaaaactccattctagtcttgggaagaaaagtttctactcagaactggggaaggagtggaacttatgacttgggcctctaggctgtctctgtcccctcagctccctgtctctaggtcgctgagagaggtgcttttcttcataaaacctttggggtttggatttccccaggaagatggagaatggaatactcactcttgggtctaatctttccccttgacccagaacttcctccccacaaaaatgcctttaaaaaccttcctgagacttaagcattctgccccacttactaactgccagttctccagcactgaggtggggcagataacggggcatatttaagggggcatctttgtgtaaaagatgcatggagtcaggagaaaaccaccttcataaactgctctgtgcaaagaggaataaaacattttttccaaa

SEQ ID NO: 306397 - DNA, 1850 bp, Homo sapiens
gcggcgtttcttttgcggctccacgtcggcaccagctgcggggcaagatggaggcgctgattttggaaccttccctgtatactgtcaaagccatcctgattctggacaatgatggagatcgactttttgccaagtactatgacgacacctaccccagtgtcaaggagcaaaaggcctttgagaagaacattttcaacaagacccatcggactgacagtgaaattgccctcttggaaggcctgacagtggtatacaaaagcagtatagatctctatttctatgtgattggcagctcctatgaaaatgagctgatgcttatggctgttctgaactgtctcttcgactcattgagccagatgctgaggaaaaatgtagaaaagcgagcactgctggagaacatggaggggctgttcttggctgtggatgaaattgtagatggaggggtgatcctagagagtgatccccagcaggtggtacaccgggtggcattaaggggtgaagatgtcccccttacggagcagaccgtgtctcaggtgctgcagtcagccaaagaacagatcaagtggtcactccttcggtgaagacctcactgttcctggctcttcatcctcttcaaaaaatttgcatgtctgctgtgaattttcatctagttccccaatcgatgctctcagggtcatctcggggatcacagggatccttaaatctccattctgtttgtggttgccccctcaacctcccctacacccttcctattctttttcattcttcttgcagttctgggagtaaagctcccagcatatttagataatagggcaggggaagcaccctctttctttctagactggattatgctcacatgctcccttgccctgacatttttgtaaattctgtgccctttgctgtagctacacttcagattaaagtaggagaaagaatgtgctgagtgttttcctccctttgcctctacctggccctcatcccaacagcccagcaaggggagagagaaagagaattcttttctatagaacgagtgggggcggggatgggtagggatttatccaatctaagccctaaccccacttagtgacctcagtgttttcttccattccttcttactgccctgtcctctgccttggaagaggctttgggaatagttcatagggaagggacaacatggaagaaacagcgatttaaattgtattgaacagggcatataaaatgcattctgtaccctgatctggcatatagcttcaaaactgcagtggcgagtgtccatctcttagttagctaccttaactgtccacccttactacctgtgggatcgttgcctggtttgtcttctctgtgtcctggagcaaagccagttcctaaaactaaaactccattctagtcttgggaagaaaagtttctactcagaactggggaaggagtggaacttatgacttgggcctctaggctgtctctgtcccctcagctccccgacatgcatttactctctgccgtgggtctgcagtcgctgcaacctaccctctctctgcctcagccttacacccaagcagtaggtctgtgctctccctgtctctaggtcgctgagagaggtgcttttcttcataaaacctttggggtttggatttccccaggaagatggagaatggaatactcactcttgggtctaatctttccccttgacccagaacttcctccccacaaaaatgcctttaaaaactgaggtggggcagataacggggcatatttaagggggcatctttgtgtaaaagatgcatggagtcaggagaaaaccaccttcataaactgctctgtgcaaagaggaataaaacattttttccaaa

SEQ ID NO: 306398 - DNA, 1847 bp, Homo sapiens
  misc_feature (84)..(84): n is a, c, g, or t
gacaaactttcatttcagagcatcactactgtctgtggccctggaaattaaaatggatcacagaagtgaatgggacaaaaggcnagatggaggcgctgattttggaaccttccctgtatactgtcaaagccatcctgattctggacaatgatggagatcgactttttgccaagtactatgacgacacctaccccagtgtcaaggagcaaaaggcctttgagaagaacattttcaacaagacccatcggactgacagtgaaattgccctcttggaaggcctgacagtggtatacaaaagcagtatagatctctatttctatgtgattggcagctcctatgaaaatgaggggctgttcttggctgtggatgaaattgtagatggaggggtgatcctagagagtgatccccagcaggtggtacaccgggtggcattaaggggtgaagatgtcccccttacggagcagaccgtgtctcaggtgctgcagtcagccaaagaacagatcaagtggtcactccttcggtgaagacctcactgttcctggctcttcatcctcttcaaaaaatttgcatgtctgctgtgaattttcatctagttccccaatcgatgctctcagggtcatctcggggatcacagggatccttaaatctccattctgtttgtggttgccccctcaacctcccctacacccttcctattctttttcattcttcttgcagttctgggagtaaagctcccagcatatttagataatagggcaggggaagcaccctctttctttctagactggattatgctcacatgctcccttgccctgacatttttgtaaattctgtgccctttgctgtagctacacttcagattaaagtaggagaaagaatgtgctgagtgttttcctccctttgcctctacctggccctcatcccaacagcccagcaaggggagagagaaagagaattcttttctatagaacgagtgggggcggggatgggtagggatttatccaatctaagccctaaccccacttagtgacctcagtgttttcttccattccttcttactgccctgtcctctgccttggaagaggctttgggaatagttcatagggaagggacaacatggaagaaacagcgatttaaattgtattgaacagggcatataaaatgcattctgtaccctgatctggcatatagcttcaaaactgcagtggcgagtgtccatctcttagttagctaccttaactgtccacccttactacctgtgggatcgttgcctggtttgtcttctctgtgtcctggagcaaagccagttcctaaaactaaaactccattctagtcttgggaagaaaagtttctactcagaactggggaaggagtggaacttatgacttgggcctctaggctgtctctgtcccctcagctccccgacatgcatttactctctgccgtgggtctgcagtcgctgcaacctaccctctctctgcctcagccttacacccaagcagtaggtctgtgctctccctgtctctaggtcgctgagagaggtgcttttcttcataaaacctttggggtttggatttccccaggaagatggagaatggaatactcactcttgggtctaatctttccccttgacccagaacttcctccccacaaaaatgcctttaaaaaccttcctgagacttaagcattctgccccacttactaactgccagttctccagcactgaggtggggcagataacggggcatatttaagggggcatctttgtgtaaaagatgcatggagtcaggagaaaaccaccttcataaactgctctgtgcaaagaggaataaaacattttttccaaa

SEQ ID NO: 306399 - DNA, 1777 bp, Homo sapiens
gcggcgtttcttttgcggctccacgtcggcaccagctgcggggcaagatggaggcgctgattttggaaccttccctgtatactgtcaaagccatcctgattctggacaatgatggagatcgactttttgccaagtactatgacgacacctaccccagtgtcaaggagcaaaaggcctttgagaagaacattttcaacaagacccatcggactgacagtgaaattgccctcttggaaggcctgacagtggtatacaaaagcagtatagatctctatttctatgtgattggcagctcctatgaaaatgagctgatgcttatggctgttctgaactgtctcttcgactcattgagccagatgctgaggaaaaatgtagaaaagcgagcactgctggagaacatggaggggctgttcttggctgtggatgaaattgtagatggaggggtgatcctagagagtgatccccagcaggtggtacaccgggtggcattaaggggtgaagatgtcccccttacggagcagaccgtgtctcaggtgctgcagtcagccaaagaacagatcaagtggtcactccttcggtgaagacctcactgttcctggctcttcatcctcttcaaaaaatttgcatgtctgctgtgaattttcatctagttccccaatcgatgctctcagggtcatctcggggatcacagggatccttaaatctccattctgtttgtggttgccccctcaacctcccctacacccttcctattctttttcattcttcttgcagttctgggagtaaagctcccagcatatttagataatagggcaggggaagcaccctctttctttctagactggattatgctcacatgctcccttgccctgacatttttgtaaattctgtgccctttgctgtagctacacttcagattaaagtaggagaaagaatgtgctgagtgttttcctccctttgcctctacctggccctcatcccaacagcccagcaaggggagagagaaagagaattcttttctatagaacgagtgggggcggggatgggtagggatttatccaatctaagccctaaccccacttagtgacctcagtgttttcttccattccttcttactgccctgtcctctgccttggaagaggctttgggaatagttcatagggaagggacaacatggaagaaacagcgatttaaattgtattgaacagggcatataaaatgcattctgtaccctgatctggcatatagcttcaaaactgcagtggcgagtgtccatctcttagttagctaccttaactgtccacccttactacctgtgggatcgttgcctggtttgtcttctctgtgtcctggagcaaagccagttcctaaaactaaaactccattctagtcttgggaagaaaagtttctactcagaactggggaaggagtggaacttatgacttgggcctctaggctgtctctgtcccctcagctccccgacatgcatttactctctgccgtgggtctgcagtcgctgcaacctaccctctctctgcctcagccttacacccaagcagtaggtctgtgctctccctgtctctaggtcgctgagagaggtgcttttcttcataaaacctttggggtttggatttccccaggaagatggagaatggaatactcactcttgggtctaatctttccttgacagaattctcccaaaaatgcttaaaacttctggaattagattcgcccactatactgcagtctaggctgagtgggagataacggctctcag

SEQ ID NO: 306400 - DNA, 1706 bp, Homo sapiens
aggaaagaatagatgatagatttgaggacctgctctaccaaatattagtactacggcaagtaaaatttagtgtggcattggtgtggaatagactaaccagtgaaacagactaaagggcttagaatcgtagtcacacatgtttggaaatgcaatataaaacagaagacattgcagataaatggcgaaaggagaatggagagacaagtgaatatccacatgagaaaaatgaaattgtagatggaggggtgatcctagagagtgatccccagcaggtggtacaccgggtggcattaaggggtgaagatgtcccccttacggagcagaccgtgtctcaggtgctgcagtcagccaaagaacagatcaagtggtcactccttcggtgaagacctcactgttcctggctcttcatcctcttcaaaaaatttgcatgtctgctgtgaattttcatctagttccccaatcgatgctctcagggtcatctcggggatcacagggatccttaaatctccattctgtttgtggttgccccctcaacctcccctacacccttcctattctttttcattcttcttgcagttctgggagtaaagctcccagcatatttagataatagggcaggggaagcaccctctttctttctagactggattatgctcacatgctcccttgccctgacatttttgtaaattctgtgccctttgctgtagctacacttcagattaaagtaggagaaagaatgtgctgagtgttttcctccctttgcctctacctggccctcatcccaacagcccagcaaggggagagagaaagagaattcttttctatagaacgagtgggggcggggatgggtagggatttatccaatctaagccctaaccccacttagtgacctcagtgttttcttccattccttcttactgccctgtcctctgccttggaagaggctttgggaatagttcatagggaagggacaacatggaagaaacagcgatttaaattgtattgaacagggcatataaaatgcattctgtaccctgatctggcatatagcttcaaaactgcagtggcgagtgtccatctcttagttagctaccttaactgtccacccttactacctgtgggatcgttgcctggtttgtcttctctgtgtcctggagcaaagccagttcctaaaactaaaactccattctagtcttgggaagaaaagtttctactcagaactggggaaggagtggaacttatgacttgggcctctaggctgtctctgtcccctcagctccccgacatgcatttactctctgccgtgggtctgcagtcgctgcaacctaccctctctctgcctcagccttacacccaagcagtaggtctgtgctctccctgtctctaggtcgctgagagaggtgcttttcttcataaaacctttggggtttggatttccccaggaagatggagaatggaatactcactcttgggtctaatctttccccttgacccagaacttcctccccacaaaaatgcctttaaaaaccttcctgagacttaagcattctgccccacttactaactgccagttctccagcactgaggtggggcagataacggggcatatttaagggggcatctttgtgtaaaagatgcatggagtcaggagaaaaccaccttcataaactgctctgtgcaaagaggaataaaacattttttccaaa

SEQ ID NO: 306401 - DNA, 1835 bp, Homo sapiens
gcggcgtttcttttgcggctccacgtcggcaccagctgcggggcaagatggaggcgctgattttggaaccttccctgtatactgtcaaagccatcctgattctggacaatgatggagatcgactttttgccaagtactatgacgacacctaccccagtgtcaaggagcaaaaggcctttgagaagaacattttcaacaagacccatcggactgacagtgaaattgccctcttggaaggcctgacagtggtatacaaaagcagtatagatctctatttctatgtgattggcagctcctatgaaaatgagctgatgcttatggctgttctgaactgtctcttcgactcattgagccagatgctgaggaaaaatgtagaaaagcgagcactgctggagaacatggaggggctgttcttggctgtggatgaaattgtagatggaggggtgatcctagagagtgatccccagcaggtggtacaccgggtggcattaaggggtgaagatgtcccccttacggagcagaccgtgtctcaggtgctgcagtcagccaaagaacagatcaagtggtcactccttcggtgaagacctcactgttcctggctcttcattctcggggatcacagggatccttaaatctccattctgtttgtggttgccccctcaacctcccctacacccttcctattctttttcattcttcttgcagttctgggagtaaagctcccagcatatttagataatagggcaggggaagcaccctctttctttctagactggattatgctcacatgctcccttgccctgacatttttgtaaattctgtgccctttgctgtagctacacttcagattaaagtaggagaaagaatgtgctgagtgttttcctccctttgcctctacctggccctcatcccaacagcccagcaaggggagagagaaagagaattcttttctatagaacgagtgggggcggggatgggtagggatttatccaatctaagccctaaccccacttagtgacctcagtgttttcttccattccttcttactgccctgtcctctgccttggaagaggctttgggaatagttcatagggaagggacaacatggaagaaacagcgatttaaattgtattgaacagggcatataaaatgcattctgtaccctgatctggcatatagcttcaaaactgcagtggcgagtgtccatctcttagttagctaccttaactgtccacccttactacctgtgggatcgttgcctggtttgtcttctctgtgtcctggagcaaagccagttcctaaaactaaaactccattctagtcttgggaagaaaagtttctactcagaactggggaaggagtggaacttatgacttgggcctctaggctgtctctgtcccctcagctccccgacatgcatttactctctgccgtgggtctgcagtcgctgcaacctaccctctctctgcctcagccttacacccaagcagtaggtctgtgctctccctgtctctaggtcgctgagagaggtgcttttcttcataaaacctttggggtttggatttccccaggaagatggagaatggaatactcactcttgggtctaatctttccccttgacccagaacttcctccccacaaaaatgcctttaaaaaccttcctgagacttaagcattctgccccacttactaactgccagttctccagcactgaggtggggcagataacggggcatatttaagggggcatctttgtgtaaaagatgcatggagtcaggagaaaaccaccttcataaactgctctgtgcaaagaggaataaaacattttttccaaa

SEQ ID NO: 306402 - DNA, 1454 bp, Homo sapiens
acaaatcccacaccacatccacagcctaggtccatcaccattctaggcgactagtcccccttacggagcaggccgcgtctcaggtgctgcagtcagccaaagaacagatcaagtggtcactccttcggtgaagacctcactgttcctggctcttcatcctcttcaaaaaatttgcatgtctgctgtgaattttcatctagttccccaatcgatgctctcagggtcatctcggggatcacagggatccttaaatctccattctgtttgtggttgccccctcaacctcccctacacccttcctattctttttcattcttcttgcagttctgggagtaaagctcccagcatatttagataatagggcaggggaagcaccctctttctttctagactggattatgctcacatgctcccttgccctgacatttttgtaaattctgtgccctttgctgtagctacacttcagattaaagtaggagaaagaatgtgctgagtgttttcctccctttgcctctacctggccctcatcccaacagcccagcaaggggagagagaaagagaattcttttctatagaacgagtgggggcggggatgggtagggatttatccaatctaagccctaaccccacttagtgacctcagtgttttcttccattccttcttactgccctgtcctctgccttggaagaggctttgggaatagttcatagggaagggacaacatggaagaaacagcgatttaaattgtattgaacagggcatataaaatgcattctgtaccctgatctggcatatagcttcaaaactgcagtggcgagtgtccatctcttagttagctaccttaactgtccacccttactacctgtgggatcgttgcctggtttgtcttctctgtgtcctggagcaaagccagttcctaaaactaaaactccattctagtcttgggaagaaaagtttctactcagaactggggaaggagtggaacttatgacttgggcctctaggctgtctctgtcccctcagctccccgacatgcatttactctctgccgtgggtctgcagtcgctgcaacctaccctctctctgcctcagccttacacccaagcagtaggtctgtgctctccctgtctctaggtcgctgagagaggtgcttttcttcataaaacctttggggtttggatttccccaggaagatggagaatggaatactcactcttgggtctaatctttccccttgacccagaacttcctccccacaaaaatgcctttaaaaaccttcctgagacttaagcattctgccccacttactaactgccagttctccagcactgaggtggggcagataacggggcatatttaagggggcatctttgtgtaaaagatgcatggagtcaggagaaaaccaccttcataaactgctctgtgcaaagaggaataaaacattttttccaaa

SEQ ID NO: 306403 - DNA, 1632 bp, Homo sapiens
gcggcgtttcttttgcggctccacgtcggcaccagctgcggggcaagatggaggcgctgattttggaaccttccctgtatactgtcaaagccatcctgattctggacaatgatggagatcgactttttgccaagtactatgacgacacctaccccagtgtcaaggagcaaaaggcctttgagaagaacattttcaacaagacccatcggactgacagtgaaattgccctcttggaaggcctgacagtggtatacaaaagcagtatagatctctatttctatgtgattggcagctcctatgaaaatgagctgatgcttatggctgttctgaactgtcctcttcaaaaaatttgcatgtctgctgtgaattttcatctagttccccaatcgatgctctcagggtcatctcggggatcacagggatccttaaatctccattctgtttgtggttgccccctcaacctcccctacacccttcctattctttttcattcttcttgcagttctgggagtaaagctcccagcatatttagataatagggcaggggaagcaccctctttctttctagactggattatgctcacatgctcccttgccctgacatttttgtaaattctgtgccctttgctgtagctacacttcagattaaagtaggagaaagaatgtgctgagtgttttcctccctttgcctctacctggccctcatcccaacagcccagcaaggggagagagaaagagaattcttttctatagaacgagtgggggcggggatgggtagggatttatccaatctaagccctaaccccacttagtgacctcagtgttttcttccattccttcttactgccctgtcctctgccttggaagaggctttgggaatagttcatagggaagggacaacatggaagaaacagcgatttaaattgtattgaacagggcatataaaatgcattctgtaccctgatctggcatatagcttcaaaactgcagtggcgagtgtccatctcttagttagctaccttaactgtccacccttactacctgtgggatcgttgcctggtttgtcttctctgtgtcctggagcaaagccagttcctaaaactaaaactccattctagtcttgggaagaaaagtttctactcagaactggggaaggagtggaacttatgacttgggcctctaggctgtctctgtcccctcagctccccgacatgcatttactctctgccgtgggtctgcagtcgctgcaacctaccctctctctgcctcagccttacacccaagcagtaggtctgtgctctccctgtctctaggtcgctgagagaggtgcttttcttcataaaacctttggggtttggatttccccaggaagatggagaatggaatactcactcttgggtctaatctttccccttgacccagaacttcctccccacaaaaatgcctttaaaaaccttcctgagacttaagcattctgccccacttactaactgccagttctccagcactgaggtggggcagataacggggcatatttaagggggcatctttgtgtaaaagatgcatggagtcaggagaaaaccaccttcataaactgctctgtgcaaagaggaataaaacattttttccaaa

SEQ ID NO: 306404 - DNA, 1162 bp, Homo sapiens
  misc_feature (40)..(40): n is a, c, g, or t
gacccacgcgtccgcggacgcgtgggtcgacccacgcgtnctaaagctcccagcatatttagataatagggcaggggaagcaccctctttctttctagactggattatgctcacatgctcccttgccctgacatttttgtaaattctgtgccctttgctgtagctacacttcagattaaagtaggagaaagaatgtgctgagtgttttcctccctttgcctctacctggccctcatcccaacagcccagcaaggggagagagaaagagaattcttttctatagaacgagtgggggcggggatgggtagggatttatccaatctaagccctaaccccacttagtgacctcagtgttttcttccattccttcttactgccctgtcctctgccttggaagaggctttgggaatagttcatagggaagggacaacatggaagaaacagcgatttaaattgtattgaacagggcatataaaatgcattctgtaccctgatctggcatatagcttcaaaactgcagtggcgagtgtccatctcttagttagctaccttaactgtccacccttactacctgtgggatcgttgcctggtttgtcttctctgtgtcctggagcaaagccagttcctaaaactaaaactccattctagtcttgggaagaaaagtttctactcagaactggggaaggagtggaacttatgacttgggcctctaggctgtctctgtcccctcagctccccgacatgcatttactctctgccgtgggtctgcagtcgctgcaacctaccctctctctgcctcagccttacacccaagcagtaggtctgtgctctccctgtctctaggtcgctgagagaggtgcttttcttcataaaacctttggggtttggatttccccaggaagatggagaatggaatactcactcttgggtctaatctttccccttgacccagaacttcctccccacaaaaatgcctttaaaaaccttcctgagacttaagcattctgccccacttactaactgccagttctccagcactgaggtggggcagataacggggcatatttaagggggcatctttgtgtaaaagatgcatggagtcaggagaaaaccaccttcataaactgctctgtgcaaagaggaataaaacattttttccaaa

SEQ ID NO: 306405 - DNA, 1088 bp, Homo sapiens
tcttttggggtctttgctcttttggggtctttgctcttttggggtctttgctctttggggtctttgctcttttggggcctttgctgtagctacacttcagattaaagtaggagaaagaatgtgctgagtgttttcctccctttgcctctacctggccctcatcccaacagcccagcaaggggagagagaaagagaattcttttctatagaacgagtgggggcggggatgggtagggatttatccaatctaagccctaaccccacttagtgacctcagtgttttcttccattccttcttactgccctgtcctctgccttggaagaggctttgggaatagttcatagggaagggacaacatggaagaaacagcgatttaaattgtattgaacagggcatataaaatgcattctgtaccctgatctggcatatagcttcaaaactgcagtggcgagtgtccatctcttagttagctaccttaactgtccacccttactacctgtgggatcgttgcctggtttgtcttctctgtgtcctggagcaaagccagttcctaaaactaaaactccattctagtcttgggaagaaaagtttctactcagaactggggaaggagtggaacttatgacttgggcctctaggctgtctctgtcccctcagctccccgacatgcatttactctctgccgtgggtctgcagtcgctgcaacctaccctctctctgcctcagccttacacccaagcagtaggtctgtgctctccctgtctctaggtcgctgagagaggtgcttttcttcataaaacctttggggtttggatttccccaggaagatggagaatggaatactcactcttgggtctaatctttccccttgacccagaacttcctccccacaaaaatgcctttaaaaaccttcctgagacttaagcattctgccccacttactaactgccagttctccagcactgaggtggggcagataacggggcatatttaagggggcatctttgtgtaaaagatgcatggagtcaggagaaaaccaccttcataaactgctctgtgcaaagaggaataaaacattttttccaaa

SEQ ID NO: 306406 - DNA, 1332 bp, Homo sapiens
gcggcgtttcttttgcggctccacgtcggcaccagctgcggggcaagatggaggcgctgattttggaaccttccctgtatactgtcaaagccatcctgattctggacaatgatggagatcgactttttgccaagtactatgacgacacctaccccagtgtcaaggagcaaaaggcctttgagaagaacattttcaacaagacccatcggactgacagtgaaattgccctcttggaaggcctgacagtggtatacaaaagcagtatagatctctatttctatgtgattggcagctcctatgaaaatgagctgatgcttatggctgttctgaactgtctcttcgactcattgagccagatgctgaggaaaaatgtagaaaagcgagcactgctggagaacatggaggggctgttcttggctgtggatgaaattgtagatggaggggtgatcctagagagtgatccccagcaggtggtacaccgggtggcattaaggggtgaagatgtcccccttacggagcagaccgtgtctcaggtgctgcagtcagccaaagaacagatcaagtggtcactccttcggtgaagacctcactgttcctggctcttcatcctcttcaaaaaatttgcatgtctgctgtgaattttcatctagttccccaatcgatgctctcagggtcatctcggggatcacagggatccttaaatctccattctgtttgtggttgccccctcaacctcccctacacccttcctattctttttcattcttcttgcagttctgggagtaaagctcccagcatatttagataatagggcaggggaagcaccctctttctttctagactggattatgctcacatgctcccttgccctgacatttttgtaaattctgtgccctttgctgtagctacacttcagattaaagtaggagaaagaaaaaaaaaaaaaaaaaaagaaaaaaaaaaagaagaagaaaaaaaaaaataaaaaaaaggaaaaaaaaaaaagggggggggcggacaaataaacctgcccagggccaaagttaacaggaaccacacgaattttgttaaaagggacgaccacaaagaggagattaattacgagagcaagggaccgcttaacaaagtgagctggaaacatgctatcgtattatgagataggcccaccttgggggggcgatctgaaccccccccagtatacggcaggcgacatacagtagggtatgtgtcaaccgcgattgagcggatgtcctgattatgaatcagagcaataattaaaggagaaagactacaagactagaaggaatggtaggtaatgtacaagtacagaca

SEQ ID NO: 306407 - DNA, 1158 bp, Homo sapiens
gcggcgtttcttttgcggctccacgtcggcaccagctgcggggcaagatggaggcgctgattttggaaccttccctgtatactgtcaaagccatcctgattctggacaatgatggagatcgactttttgccaagctgatgcttatggctgttctgaactgtctcttcgactcattgagccagatgctgaggaaaaatgtagaaaagcgagcactgctggagaacatggaggggctgttcttggctgtggatgaaattgtagatggaggggtgatcctagagagtgatccccagcaggtggtacaccgggtggcattaaggggtgaagatgtcccccttacggagcagaccgtgtctcaggtgctgcagtcagccaaagaacagatcaagtggtcactccttcggtgaagacctcactgttcctggctcttcatcctcttcaaaaaatttgcatgtctgctgtgaattttcatctagttccccaatcgatgctctcagggtcatctcggggatcacagggatccttaaatctccattctgtttgtggttgccccctcaacctcccctacacccttcctattctttttcattcttcttgcagttctgggagtaaagctcccagcatatttagataatagggcaggggaagcaccctctttctttctagactggattatgctcacatgctcccttgccctgacatttttgtaaattctgtgccctttgctgtagctacacttcagattaaagtaggagaaagaaaaaaaaaaaaaaaaaaagaaaaaaaaaaagaagaagaaaaaaaaaaataaaaaaaaggaaaaaaaaaaaagggggggggcggacaaataaacctgcccagggccaaagttaacaggaaccacacgaattttgttaaaagggacgaccacaaagaggagattaattacgagagcaagggaccgcttaacaaagtgagctggaaacatgctatcgtattatgagataggcccaccttgggggggcgatctgaaccccccccagtatacggcaggcgacatacagtagggtatgtgtcaaccgcgattgagcggatgtcctgattatgaatcagagcaataattaaaggagaaagactacaagactagaaggaatggtaggtaatgtacaagtacagaca

SEQ ID NO: 306408 - DNA, 210 bp, Homo sapiens
  misc_feature (14)..(14): n is a, c, g, or t
agagagagagaganagagagagagagagagagagagagagagagagagagagagagagagagaggagttctcaggcctggggtggggccccgggtgggtgcgggggcgattcaacctgtgtgctgcgaaggacgagacttcctcttgaacagtgtgctgttgtaaacatatttgaaaactattaccaataaagttttgtttaaaaaaaaa

SEQ ID NO: 306409 - DNA, 2619 bp, Homo sapiens
cccagtggcctctgggttgggtttctcttcctgctcccaccccacggctccctagctccccctgcaggcagggttctggggacagacagccgaacagacacggcaggtctcatgagccttcccagccaccgtagtgccggtgccctgagaacaggactgagtgatggcttccaactccagcgatgtgaaagaattcttagccaaagccaaagaagattttcttaaaaaatgggaaagtcccgctcagaacacagcccacttggatcagtttgaacgaatcaagaccctcggcacgggctccttcgggcgggtgatgctggtgaaacacaaggagaccgggaaccactatgccatgaagatcctcgacaaacagaaggtggtgaaactgaaacagatcgaacacaccctgaatgaaaagcgcatcctgcaagctgtcaactttccgttcctcgtcaaactcgagttctccttcaaggacaactcaaacttatacatggtcatggagtacgtgcccggcggggagatgttctcacacctacggcggatcggaaggttcagtgagccccatgcccgtttctacgcggcccagatcgtcctgacctttgagtatctgcactcgctggatctcatctacagggacctgaagccggagaatctgctcattgaccagcagggctacattcaggtgacagacttcggtttcgccaagcgcgtgaagggccgcacttggaccttgtgcggcacccctgagtacctggcccctgagattatcctgagcaaaggctacaacaaggccgtggactggtgggccctgggggttcttatctatgaaatggccgctggctacccgcccttcttcgcagaccagcccatccagatctatgagaagatcgtctctgggaaggtgcgcttcccttcccacttcagctctgacttgaaggacctgctgcggaacctcctgcaggtagatctcaccaagcgctttgggaacctcaagaatggggtcaacgatatcaagaaccacaagtggtttgccacaactgactggattgccatctaccagaggaaggtggaagctcccttcataccaaagtttaaaggccctggggatacgagtaactttgacgactatgaggaagaagaaatccgggtctccatcaatgagaagtgtggcaaggagttttctgagttttaggggcatgcctgtgcccccatgggttttcttttttcttttttcttttttttggtcgggggggtgggagggttggattgaacagccagagggccccagagttccttgcatctaatttcacccccaccccaccctccagggttagggggagcaggaagcccagataatcagagggacagaaacaccagctgctccccctcatccccttcaccctcctgccccctctcccacttttcccttcctctttccccacagccccccagcccctcagccctcccagcccacttctgcctgttttaaacgagtttctcaactccagtcagaccaggtcttgctggtgtatccagggacagggtatggaaagaggggctcacgcttaactccagcccccacccacacccccatcccacccaaccacaggccccacttgctaagggcaaatgaacgaagcgccaaccttcctttcggagtaatcctgcctgggaaggagagatttttagtgacatgttcagtgggttgcttgctagaatttttttaaaaaaacaacaatttaaaatcttatttaagttccaccagtgcctccctccctccttcctctactcccacccctcccatgtccccccattcctcaaatccattttaaagagaagcagactgactttggaaagggaggcgctggggtttgaacctccccgctgctaatctcccctgggcccctccccggggaatcctctctgccaatcctgcgagggtctaggcccctttaggaagcctccgctctctttttccccaacagacctgtcttcacccttgggctttgaaagccagacaaagcagctgcccctctccctgccaaagaggagtcatcccccaaaaagacagagggggagccccaagcccaagtctttcctcccagcagcgtttccccccaactccttaattttattctccgctagattttaacgtccagccttccctcagctgagtggggagggcatccctgcaaaagggaacagaagaggccaagtccccccaagccacggcccggggttcaaggctagagctgctggggaggggctgcctgttttactcacccaccagcttccgcctcccccatcctgggcgcccctcctccagcttagctgtcagctgtccatcacctctcccccactttctcatttgtgcttttttctctcgtaatagaaaagtggggagccgctggggagccaccccattcatccccgtatttccccctctcataacttctccccatcccaggaggagttctcaggcctggggtggggccccgggtgggtgcgggggcgattcaacctgtgtgctgcgaaggacgagacttcctcttgaacagtgtgctgttgtaaacatatttgaaaactattaccaataaagttttgtttaaaaaaaaa

SEQ ID NO: 306410 - DNA, 2600 bp, Homo sapiens
cgcggagatgacgcggtgaatgcacgtgtgctggtgctggggtgtcgcaggcgcctgagttaatgcgcaggcagtcccgagtggccagccgtcagccgcccgttcgcgatgggtcaacgacgcgcgccgtcaagaaggtgcagcagagcaggagagcgtaaagaattcttagcctaattgccaacaggacatcattatcttagaacaatggggatagtcccgctcatgaacacagcccacttggatcagtttgaacgaatcaagaccctcggcacgggctccttcgggcgggtgatgctggtgaaacacaaggagaccgggaaccactatgccatgaagatcctcgacaaacagaaggtggtgaaactgaaacagatcgaacacaccctgaatgaaaagcgcatcctgcaagctgtcaactttccgttcctcgtcaaactcgagttctccttcaaggacaactcaaacttatacatggtcatggagtacgtgcccggcggggagatgttctcacacctacggcggatcggaaggttcagtgagccccatgcccgtttctacgcggcccagatcgtcctgacctttgagtatctgcactcgctggatctcatctacagggacctgaagccggagaatctgctcattgaccagcagggctacattcaggtgacagacttcggtttcgccaagcgcgtgaagggccgcacttggaccttgtgcggcacccctgagtacctggcccctgagattatcctgagcaaaggctacaacaaggccgtggactggtgggccctgggggttcttatctatgaaatggccgctggctacccgcccttcttcgcagaccagcccatccagatctatgagaagatcgtctctgggaaggtgcgcttcccttcccacttcagctctgacttgaaggacctgctgcggaacctcctgcaggtagatctcaccaagcgctttgggaacctcaagaatggggtcaacgatatcaagaaccacaagtggtttgccacaactgactggattgccatctaccagaggaaggtggaagctcccttcataccaaagtttaaaggccctggggatacgagtaactttgacgactatgaggaagaagaaatccgggtctccatcaatgagaagtgtggcaaggagttttctgagttttaggggcatgcctgtgcccccatgggttttcttttttcttttttcttttttttggtcgggggggtgggagggttggattgaacagccagagggccccagagttccttgcatctaatttcacccccaccccaccctccagggttagggggagcaggaagcccagataatcagagggacagaaacaccagctgctccccctcatccccttcaccctcctgccccctctcccacttttcccttcctctttccccacagccccccagcccctcagccctcccagcccacttctgcctgttttaaacgagtttctcaactccagtcagaccaggtcttgctggtgtatccagggacagggtatggaaagaggggctcacgcttaactccagcccccacccacacccccatcccacccaaccacaggccccacttgctaagggcaaatgaacgaagcgccaaccttcctttcggagtaatcctgcctgggaaggagagatttttagtgacatgttcagtgggttgcttgctagaatttttttaaaaaaacaacaatttaaaatcttatttaagttccaccagtgcctccctccctccttcctctactcccacccctcccatgtccccccattcctcaaatccattttaaagagaagcagactgactttggaaagggaggcgctggggtttgaacctccccgctgctaatctcccctgggcccctccccggggaatcctctctgccaatcctgcgagggtctaggcccctttaggaagcctccgctctctttttccccaacagacctgtcttcacccttgggctttgaaagccagacaaagcagctgcccctctccctgccaaagaggagtcatcccccaaaaagacagagggggagccccaagcccaagtctttcctcccagcagcgtttccccccaactccttaattttattctccgctagattttaacgtccagccttccctcagctgagtggggagggcatccctgcaaaagggaacagaagaggccaagtccccccaagccacggcccggggttcaaggctagagctgctggggaggggctgcctgttttactcacccaccagcttccgcctcccccatcctgggcgcccctcctccagcttagctgtcagctgtccatcacctctcccccactttctcatttgtgcttttttctctcgtaatagaaaagtggggagccgctggggagccaccccattcatccccgtatttccccctctcataacttctccccatcccaggaggagttctcaggcctggggtggggccccgggtgggtgcgggggcgattcaacctgtgtgctgcgaaggacgagacttcctcttgaacagtgtgctgttgtaaacatatttgaaaactattaccaataaagttttgtttaaaaaaaaa

SEQ ID NO: 306411 - DNA, 2323 bp, Homo sapiens
agactgcgtctccgccccgccctctcacccccggattgacactgagcgttctgctggggggcttggcggacccggcacctccgccaatcggcggcctcgcagggcggaccccgggcccagtccagcgtctcggccaatcggacgcgtctgcccgcccagctgcggcctcgcgagcgagtgaatggccgagagtccgcgtgaaagaattcttagccaaagccaaagaagattttcttaaaaaatgggaaagtcccgctcagaacacagcccacttggatcagtttgaacgaatcaagaccctcggcacgggctccttcgggcgggtgatgctggtgaaacacaaggagaccgggaaccactatgccatgaagatcctcgacaaacagaaggtgacagacttcggtttcgccaagcgcgtgaagggccgcacttggaccttgtgcggcacccctgagtacctggcccctgagattatcctgagcaaaggctacaacaaggccgtggactggtgggccctgggggttcttatctatgaaatggccgctggctacccgcccttcttcgcagaccagcccatccagatctatgagaagatcgtctctgggaaggtgcgcttcccttcccacttcagctctgacttgaaggacctgctgcggaacctcctgcaggtagatctcaccaagcgctttgggaacctcaagaatggggtcaacgatatcaagaaccacaagtggtttgccacaactgactggattgccatctaccagaggaaggtggaagctcccttcataccaaagtttaaaggccctggggatacgagtaactttgacgactatgaggaagaagaaatccgggtctccatcaatgagaagtgtggcaaggagttttctgagttttaggggcatgcctgtgcccccatgggttttcttttttcttttttcttttttttggtcgggggggtgggagggttggattgaacagccagagggccccagagttccttgcatctaatttcacccccaccccaccctccagggttagggggagcaggaagcccagataatcagagggacagaaacaccagctgctccccctcatccccttcaccctcctgccccctctcccacttttcccttcctctttccccacagccccccagcccctcagccctcccagcccacttctgcctgttttaaacgagtttctcaactccagtcagaccaggtcttgctggtgtatccagggacagggtatggaaagaggggctcacgcttaactccagcccccacccacacccccatcccacccaaccacaggccccacttgctaagggcaaatgaacgaagcgccaaccttcctttcggagtaatcctgcctgggaaggagagatttttagtgacatgttcagtgggttgcttgctagaatttttttaaaaaaacaacaatttaaaatcttatttaagttccaccagtgcctccctccctccttcctctactcccacccctcccatgtccccccattcctcaaatccattttaaagagaagcagactgactttggaaagggaggcgctggggtttgaacctccccgctgctaatctcccctgggcccctccccggggaatcctctctgccaatcctgcgagggtctaggcccctttaggaagcctccgctctctttttccccaacagacctgtcttcacccttgggctttgaaagccagacaaagcagctgcccctctccctgccaaagaggagtcatcccccaaaaagacagagggggagccccaagcccaagtctttcctcccagcagcgtttccccccaactccttaattttattctccgctagattttaacgtccagccttccctcagctgagtggggagggcatccctgcaaaagggaacagaagaggccaagtccccccaagccacggcccggggttcaaggctagagctgctggggaggggctgcctgttttactcacccaccagcttccgcctcccccatcctgggcgcccctcctccagcttagctgtcagctgtccatcacctctcccccactttctcatttgtgcttttttctctcgtaatagaaaagtggggagccgctggggagccaccccattcatccccgtatttccccctctcataacttctccccatcccaggaggagttctcaggcctggggtggggccccgggtgggtgcgggggcgattcaacctgtgtgctgcgaaggacgagacttcctcttgaacagtgtgctgttgtaaacatatttgaaaactattaccaataaagttttgtttaaaaaaaaa

SEQ ID NO: 306412 - DNA, 1426 bp, Homo sapiens
gagagacgcgggaagcaggggctgggcgggggtcgcggcgccgcagctagcgcaccagcccgagggccgccgccgccgccgcccagcgcgctccggggccgccggccgcagccagcacccgccgcgccgcagctccgggaccggccccggccgccgccgccgcgatgggcaacgccgccgccgccaagaagggcagcgagcaggagagcgtgaaagaattcttagccaaagccaaagaagattttcttaaaaaatgggaaagtcccgctcagctcccagcccacttctgcctgttttaaacgagtttctcaactccagtcagaccaggtcttgctggtgtatccagggacagggtatggaaagaggggctcacgcttaactccagcccccacccacacccccatcccacccaaccacaggccccacttgctaagggcaaatgaacgaagcgccaaccttcctttcggagtaatcctgcctgggaaggagagatttttagtgacatgttcagtgggttgcttgctagaatttttttaaaaaaacaacaatttaaaatcttatttaagttccaccagtgcctccctccctccttcctctactcccacccctcccatgtccccccattcctcaaatccattttaaagagaagcagactgactttggaaagggaggcgctggggtttgaacctccccgctgctaatctcccctgggcccctccccggggaatcctctctgccaatcctgcgagggtctaggcccctttaggaagcctccgctctctttttccccaacagacctgtcttcacccttgggctttgaaagccagacaaagcagctgcccctctccctgccaaagaggagtcatcccccaaaaagacagagggggagccccaagcccaagtctttcctcccagcagcgtttccccccaactccttaattttattctccgctagattttaacgtccagccttccctcagctgagtggggagggcatccctgcaaaagggaacagaagaggccaagtccccccaagccacggcccggggttcaaggctagagctgctggggaggggctgcctgttttactcacccaccagcttccgcctcccccatcctgggcgcccctcctccagcttagctgtcagctgtccatcacctctcccccactttctcatttgtgcttttttctctcgtaatagaaaagtggggagccgctggggagccaccccattcatccccgtatttccccctctcataacttctccccatcccaggaggagttctcaggcctggggtggggccccgggtgggtgcgggggcgattcaacctgtgtgctgcgaaggacgagacttcctcttgaacagtgtgctgttgtaaacatatttgaaaactattaccaataaagttttgtttaaaaaaaaa

SEQ ID NO: 306413 - DNA, 2460 bp, Homo sapiens
cccagtggcctctgggttgggtttctcttcctgctcccaccccacggctccctagctccccctgcaggcagggttctggggacagacagccgaacagacacggcaggtctcatgagccttcccagccaccgtagtgccggtgccctgagaacaggactgagtgatggcttccaactccagcgatgtgaaagaattcttagccaaagccaaagaagattttcttaaaaaatgggaaagtcccgctcagaacacagcccacttggatcagtttgaacgaatcaagaccctcggcacgggctccttcgggcgggtgatgctggtgaaacacaaggagaccgggaaccactatgccatgaagatcctcgacaaacagaaggtggtgaaactgaaacagatcgaacacaccctgaatgaaaagcgcatcctgcaagctgtcaactttccgttcctcgtcaaactcgagttctccttcaaggacaactcaaacttatacatggtcatggagtacgtgcccggcggggagatgttctcacacctacggcggatcggaaggttcagtgagccccatgcccgtttctacgcggcccagatcgtcctgacctttgagtatctgcactcgctggatctcatctacagggacctgaagccggagaatctgctcattgaccagcagggctacattcaggtgacagacttcggtttcgccaagcgcgtgaagggccgcacttggaccttgtgcggcacccctgagtacctggcccctgagattatcctgagcaaaggctacaacaaggccgtggactggtgggccctgggggttcttatctatgaaatggccgctggctacccgcccttcttcgcagaccagcccatccagatctatgagaagatcgtctctgggaaggtgcgcttcccttcccacttcagctctgacttgaaggacctgctgcggaacctcctgcaggtagatctcaccaagcgctttgggaacctcaagaatggggtcaacgatatcaagaaccacaagtggtttgccacaactgactggattgccatctaccagaggaaggtggaagctcccttcataccaaagtttaaaggccctggggatacgagtaactttgacgactatgaggaagaagaaatccgggtctccatcaatgagaagtgtggcaaggagttttctgagttttaggggcatgcctgtgcccccatgggttttcttttttcttttttcttttttttggtcgggggggtgggagggttggattgaacagccagagggccccagagttccttgcatctaatttcacccccaccccaccctccagggttagggggagcaggaagcccagataatcagagggacagaaacaccagctgctccccctcatccccttcaccctcctgccccctctcccacttttcccttcctctttccccacagccccccagcccctcagccctcccagcccacttctgcctgttttaaacgagtttctcaactccagtcagaccaggtcttgctggtgtatccagggacagggtatggaaagaggggctcacgcttaactccagcccccacccacacccccatcccacccaaccacaggccccacttgctaagggcaaatgaacgaagcgccaaccttcctttcggagtaatcctgcctgggaaggagagatttttagtgacatgttcagtgggttgcttgctagaatttttttaaaaaaacaacaatttaaaatcttatttaagttccaccagtgcctccctccctccttcctctactcccacccctcccatgtccccccattcctcaaatccattttaaagagaagcagactgactttggaaagggaggcgctggggtttgaacctccccgctgctaatctcccctgggcccctccccggggaatcctctctgccaatcctgcgagggtctaggcccctttaggaagcctccgctctctttttccccaacagacctgtcttcacccttgggctttgaaagccagacaaagcagctgcccctctcccggaacagaagaggccaagtccccccaagccacggcccggggttcaaggctagagctgctggggaggggctgcctgttttactcacccaccagcttccgcctcccccatcctgggcgcccctcctccagcttagctgtcagctgtccatcacctctcccccactttctcatttgtgcttttttctctcgtaatagaaaagtggggagccgctggggagccaccccattcatccccgtatttccccctctcataacttctccccatcccaggaggagttctcaggcctggggtggggccccgggtgggtgcgggggcgattcaacctgtgtgctgcgaaggacgagacttcctcttgaacagtgtgctgttgtaaacatatttgaaaactattaccaataaagttttgtttaaaaaaaaa

SEQ ID NO: 306414 - DNA, 3149 bp, Homo sapiens
cccagtggcctctgggttgggtttctcttcctgctcccaccccacggctccctagctccccctgcaggcagggttctggggacagacagccgaacagacacggcaggtctcatgagccttcccagccaccgtagtgccggtgccctgagaacaggactgagtgatggcttccaactccagcgatgtgaaagaattcttagccaaagccaaagaagattttcttaaaaaatgggaaagtcccgctcagaacacagcccacttggatcagtttgaacgaatcaagaccctcggcacgggctccttcgggcgggtgatgctggtgaaacacaaggagaccgggaaccactatgccatgaagatcctcgacaaacagaaggtggtgaaactgaaacagatcgaacacaccctgaatgaaaagcgcatcctgcaagctgtcaactttccgttcctcgtcaaactcgagttctccttcaaggacaactcaaacttatacatggtcatggagtacgtgcccggcggggagatgttctcacacctacggcggatcggaaggttcagtgagccccatgcccgtttctacgcggcccagatcgtcctgacctttgagtatctgcactcgctggatctcatctacagggacctgaagccggagaatctgctcattgaccagcagggctacattcaggtgacagacttcggtttcgccaagcgcgtgaagggccgcacttggaccttgtgcggcacccctgagtacctggcccctgagattatcctgagcaaaggctacaacaaggccgtggactggtgggccctgggggttcttatctatgaaatggccgctggctacccgcccttcttcgcagaccagcccatccagatctatgagaagatcgtctctgggaaggtgcgcttcccttcccacttcagctctgacttgaaggacctgctgcggaacctcctgcaggtagatctcaccaagcgctttgggaacctcaagaatggggtcaacgatatcaagaaccacaagtggtttgccacaactgactggattgccatctaccagaggaaggtggaagctcccttcataccaaagtttaaaggccctggggatacgagtaactttgacgactatgaggaagaagaaatccgggtctccatcaatgagaagtgtggcaaggagttttctgagttttaggggcatgcctgtgcccccatgggttttcttttttcttttttcttttttttggtcgggggggtgggagggttggattgaacagccagagggccccagagttccttgcatctaatttcacccccaccccaccctccagggttagggggagcaggaagcccagataatcagagggacagaaacaccagctgctccccctcatccccttcaccctcctgccccctctcccacttttcccttcctctttccccacagccccccagcccctcagccctcccagcccacttctgcctgttttaaacgagtttctcaactccagtcagaccaggtcttgctggtgtatccagggacagggtatggaaagaggggctcacgcttaactccagcccccacccacacccccatcccacccaaccacaggccccacttgctaagggcaaatgaacgaagcgccaaccttcctttcggagtaatcctgcctgggaaggagagatttttagtgacatgttcagtgggttgcttgctagaatttttttaaaaaaacaacaatttaaaatcttatttaagttccaccagtgcctccctccctccttcctctactcccacccctcccatgtccccccattcctcaaatccattttaaagagaagcagactgactttggaaagggaggcgctggggtttgaacctccccgctgctaatctcccctgggcccctccccggggaatcctctctgccaatcctgcgagggtctaggcccctttaggaagcctccgctctctttttccccaacagacctgtcttcacccttgggctttgaaagccagacaaagcagctgcccctctccctgccaaagaggagtcatcccccaaaaagacagagggggagccccaagcccaagtctttcctcccagcagcgtttccccccaactccttaattttattctccgctagattttaacgtccagccttccctcagctgagtggggagggcatccctgcaaaagggaacagaagaggccaagtccccccaagccacggcccggggttcaaggctagagctgctggggaggggctgcctgttttactcacccaccagcttccgcctcccccatcctgggcgcccctcctccagcttagctgtcagctgtccatcacctctcccccactttctcatttgtgcttttttctctcgtaatagaaaagtggggagccgctggggagccaccccattcatccccgtatttccccctctcataacttctccccatcccaggaggagttctcaggcctggggtggggccccgggtgggtgcgggggcgattcaacctgtgtgctgcgaaggacgagacttcctcttgaacagtgtgctgttgtaaacatatttgaaaactattaccaataaagttttgtttaaaaaaaaacaaaaaaaaaacaagaaaaacaaacaaaaaaaacaaaaaaaaaaacaaacatgcgtgtgtggcgcgcgcgcgcgccgcgcgcgcccccccgagaacgaagttttcttaaacaaccacaccgtggggggggcgcgcgcgcgcgcgcgccccaagtggagtagcagggagcgaacgcggcgcgcgcacaaaaagagggtctcctcacaagagagagaacacactcgggccggagcacaagacaaaaagaggcgggggggggggcgctctctccccccacaaatataaaaagaagcgccgcggggggggggagaacaacaacagagacgtggttcttagtgagaggacaaacacacccgcacaagagagaaggaggtatgcacagagagagagcgtaactcatcagcgaggggggcggccttttatcacaagaagagaggagagagatacaaacaagagagagcagccgcacaaaaatatataaaaataaattatacgcgccccccccagaggagggggggggggggggggga

SEQ ID NO: 306415 - DNA, 1488 bp, Homo sapiens
cccagtggcctctgggttgggtttctcttcctgctcccaccccacggctccctagctccccctgcaggcagggttctggggacagacagccgaacagacacggcaggtctcatgagccttcccagccaccgtagtgccggtgccctgagaacaggactgagtgatggcttccaactccagcgatgtgaaagaattcttagccaaagccaaagaagattttcttaaaaaatgggaaagtcccgctcagaacacagcccacttggatcagtttgaacgaatcaagaccctcggcacgggctccttcgggcgggtgatgctggtgaaacacaaggagaccgggaaccactatgccatgaagatcctcgacaaacagaaggtggtgaaactgaaacagatcgaacacaccctgaatgaaaagcgcatcctgcaagctgtcaactttccgttcctcgtcaaactcgagttctccttcaaggacaactcaaacttatacatggtcatggagtacgtgcccggcggggagatgttctcacacctacggcggatcggaaggttcagtgagccccatgcccgtttctacgcggcccagatcgtcctgacctttgagtatctgcactcgctggatctcatctacagggacctgaagccggagaatctgctcattgaccagcagggctacattcaggtgacagacttcggtttcgccaagcgcgtgaagggccgcacttggaccttgtgcggcacccctgagtacctggcccctgagattatcctgagcaaaggctacaacaaggccgtggactggtgggccctgggggttcttatctatgaaatggccgctggctacccgcccttcttcgcagaccagcccatccagatctatgagaagatcgtctctgggaaggtgcgcttcccttcccacttcagctctgacttgaaggacctgctgcggaacctcctgcaggtagatctcaccaagcgctttgggaacctcaagaatggggtcaacgatatcaagaaccacaagtggtttgccacaactgactggattgccatctaccagaggaaggtggaagctcccttcataccaaagtttaaaggccctggggatacgagtaactttgacgactatgaggaagaagaaatccgggtctccatcaatgagaagtgtggcaaggagttttctgagttttaggggcatgcctgtgcccccatgggttttcttttttcttttttcttttttttggtcgggggggtgggagggttggattgaacagccagagggccccagagttccttgcatctaatttccccctctcataacttctccccatcccaggaggagttctcaggcctggggtggggccccgggtgggtgcgggggcgattcaacctgtgtgctgcgaaggacgagacttcctcttgaacagtgtgctgttgtaaacatatttgaaaactattaccaataaagttttgtttaaaaaaaaa

SEQ ID NO: 306416 - DNA, 2246 bp, Homo sapiens
  misc_feature (1926)..(1926): n is a, c, g, or t
  misc_feature (1949)..(1949): n is a, c, g, or t
  misc_feature (1952)..(1952): n is a, c, g, or t
  misc_feature (1962)..(1962): n is a, c, g, or t
  misc_feature (1965)..(1965): n is a, c, g, or t
  misc_feature (1968)..(1968): n is a, c, g, or t
  misc_feature (1981)..(1981): n is a, c, g, or t
cccagtggcctctgggttgggtttctcttcctgctcccaccccacggctccctagctccccctgcaggcagggttctggggacagacagccgaacagacacggcaggtctcatgagccttcccagccaccgtagtgccggtgccctgagaacaggactgagtgatggcttccaactccagcgatgtgaaagaattcttagccaaagccaaagaagattttcttaaaaaatgggaaagtcccgctcagaacacagcccacttggatcagtttgaacgaatcaagaccctcggcacgggctccttcgggcgggtgatgctggtgaaacacaaggagaccgggaaccactatgccatgaagatcctcgacaaacagaaggtggtgaaactgaaacagatcgaacacaccctgaatgaaaagcgcatcctgcaagctgtcaactttccgttcctcgtcaaactcgagttctccttcaaggacaactcaaacttatacatggtcatggagtacgtgcccggcggggagatgttctcacacctacggcggatcggaaggttcagtgagccccatgcccgtttctacgcggcccagatcgtcctgacctttgagtatctgcactcgctggatctcatctacagggacctgaagccggagaatctgctcattgaccagcagggctacattcaggtgacagacttcggtttcgccaagcgcgtgaagggccgcacttggaccttgtgcggcacccctgagtacctggcccctgagattatcctgagcaaaggctacaacaaggccgtggactggtgggccctgggggttcttatctatgaaatggccgctggctacccgcccttcttcgcagaccagcccatccagatctatgagaagatcgtctctgggaaggtgaggtccggatgtggggacacagccctggaagaaacagaccgttccctgctcacccatcctattccctggggagccctgcttgttgtcagaataatctagaagttccttaagtcaggccaggtggtgaagctggacgcgccggccacactgaggccaacacctcaagcccccttgctgtccagccccaaccccgcggttccagaatcccatgggcttccaaaatcccgagcctcacgggaacatcttggccacagaacacaaaccgccctgccagacgaccctccttttcgctcctcatcccagttagtgtgagttttcgcaaattccaaggcagaaaaacgaatgtatttggttcctgttcccaggtgctgtccatagcctcacccaggattgccctcacttagcatttatagcccatgcttcctctcccaaacccagacttgcctaactctgagggttcagatgaggggtggtgaagccatctcagctcacatctatgacaggtgcaaagtgcccaccatccaccaggccccagaatccccatcagtcacaccctgagatagtggcaccctctgtaggagaggtgaggaaacaggctgggaaaagggatgtgtcttggccaagatcacactttggtgagtaggtaatcaccgtaggcaatcattgtaggcactgatggccggagagaggttggggaccccacctctgccctcagctcaaccaccttgctgggaagacccgaccatcccccgacttggtccagcatctcctacacaggagcttttggttggcccggagtcatgacactgtggtgggagcaccctcaggctcagcctgggccccagtcccagctctgccaccgactggctttgaaactttggggctgggtacaatggctcacacctgtaatgccagcaccttgggaagtggaggcttgaggccaggagttccagaccagcctgggcaacatagccagaccccatctctaaaaaaaaaaagactaaggtgggggaatccantgaggccagaagttgagaccagnctnggcaacatancangancccatctaaaacnaaataaaacactcacaccaagggttctggtagtgaaagtgtcggattggggggtaaccccaagggtaagggcccgggggcagttggtgcccagcagcaccatcaggaccctggcatattgctatcccttcgctgtcatatgggggcactggccggcctcacagcaccacctcgagtcgtcaaagagagagaaccagacaaacaacaaaacccccggagaacaaccccgccgcgcagcaacgcaaccgagaccccctcccgcgcgc

SEQ ID NO: 306417 - DNA, 375 bp, Homo sapiens
agcctagaagttcaagaccagcctgggcaacgtagtgagaccctgtctctacaaaaacttcttaaaataactaactcttgaatttttaaagtttttaaagaaatgcagattctcaggccacagtatcagacttcctaaattggaaactgtagggtaggctcaaggagctgttttacaagatgctggcaggcactctgctttggaggcccacacccagtaggaccgttggatggagaaagaagcatcatgggcttcccaagttccagaccagcttcccaccctgtccttgtaccccttcctccaggtgcgcttcccttcccacttcagctctgacttgaaggacctgctgcggaacctcctgcaggtagatctcac

SEQ ID NO: 306418 - DNA, 358 bp, Homo sapiens
gacaactcaaacttatacatggtcatggagtacgtgcccggcggggagatgttctcacacctacggcggatcggaaggttcaggtaagcgggccaccccccatcacatcaggctgtcagggtgtccacaggtggcagtgcacgaccaagccccctgggaatgcagaggagtccagcatacttcaacatgcaggtggtctcccagaccctgtgggtttctgtttcccctctgctgaggaatatgtgatatttcaaccaccacaaaacaaaacagagcaaacagggcaacttaggtgtccaaactgaagttgctgccaggcacggtggttctcaccagtaatcccagcactttgggaggc

SEQ ID NO: 306419 - DNA, 2644 bp, Homo sapiens
gagagacgcgggaagcaggggctgggcgggggtcgcggcgccgcagctagcgcaccagcccgagggccgccgccgccgccgcccagcgcgctccggggccgccggccgcagccagcacccgccgcgccgcagctccgggaccggccccggccgccgccgccgcgatgggcaacgccgccgccgccaagaagggcagcgagcaggagagcgtgaaagaattcttagccaaagccaaagaagattttcttaaaaaatgggaaagtcccgctcagaacacagcccacttggatcagtttgaacgaatcaagaccctcggcacgggctccttcgggcgggtgatgctggtgaaacacaaggagaccgggaaccactatgccatgaagatcctcgacaaacagaaggtggtgaaactgaaacagatcgaacacaccctgaatgaaaagcgcatcctgcaagctgtcaactttccgttcctcgtcaaactcgagttctccttcaaggacaactcaaacttatacatggtcatggagtacgtgcccggcggggagatgttctcacacctacggcggatcggaaggttcagtgagccccatgcccgtttctacgcggcccagatcgtcctgacctttgagtatctgcactcgctggatctcatctacagggacctgaagccggagaatctgctcattgaccagcagggctacattcaggtgacagacttcggtttcgccaagcgcgtgaagggccgcacttggaccttgtgcggcacccctgagtacctggcccctgagattatcctgagcaaaggctacaacaaggccgtggactggtgggccctgggggttcttatctatgaaatggccgctggctacccgcccttcttcgcagaccagcccatccagatctatgagaagatcgtctctgggaaggtgcgcttcccttcccacttcagctctgacttgaaggacctgctgcggaacctcctgcaggtagatctcaccaagcgctttgggaacctcaagaatggggtcaacgatatcaagaaccacaagtggtttgccacaactgactggattgccatctaccagaggaaggtggaagctcccttcataccaaagtttaaaggccctggggatacgagtaactttgacgactatgaggaagaagaaatccgggtctccatcaatgagaagtgtggcaaggagttttctgagttttaggggcatgcctgtgcccccatgggttttcttttttcttttttcttttttttggtcgggggggtgggagggttggattgaacagccagagggccccagagttccttgcatctaatttcacccccaccccaccctccagggttagggggagcaggaagcccagataatcagagggacagaaacaccagctgctccccctcatccccttcaccctcctgccccctctcccacttttcccttcctctttccccacagccccccagcccctcagccctcccagcccacttctgcctgttttaaacgagtttctcaactccagtcagaccaggtcttgctggtgtatccagggacagggtatggaaagaggggctcacgcttaactccagcccccacccacacccccatcccacccaaccacaggccccacttgctaagggcaaatgaacgaagcgccaaccttcctttcggagtaatcctgcctgggaaggagagatttttagtgacatgttcagtgggttgcttgctagaatttttttaaaaaaacaacaatttaaaatcttatttaagttccaccagtgcctccctccctccttcctctactcccacccctcccatgtccccccattcctcaaatccattttaaagagaagcagactgactttggaaagggaggcgctggggtttgaacctccccgctgctaatctcccctgggcccctccccggggaatcctctctgccaatcctgcgagggtctaggcccctttaggaagcctccgctctctttttccccaacagacctgtcttcacccttgggctttgaaagccagacaaagcagctgcccctctccctgccaaagaggagtcatcccccaaaaagacagagggggagccccaagcccaagtctttcctcccagcagcgtttccccccaactccttaattttattctccgctagattttaacgtccagccttccctcagctgagtggggagggcatccctgcaaaagggaacagaagaggccaagtccccccaagccacggcccggggttcaaggctagagctgctggggaggggctgcctgttttactcacccaccagcttccgcctcccccatcctgggcgcccctcctccagcttagctgtcagctgtccatcacctctcccccactttctcatttgtgcttttttctctcgtaatagaaaagtggggagccgctggggagccaccccattcatccccgtatttccccctctcataacttctccccatcccaggaggagttctcaggcctggggtggggccccgggtgggtgcgggggcgattcaacctgtgtgctgcgaaggacgagacttcctcttgaacagtgtgctgttgtaaacatatttgaaaactattaccaataaagttttgtttaaaaaaaaa

SEQ ID NO: 306420 - DNA, 2714 bp, Homo sapiens
cccagtggcctctgggttgggtttctcttcctgctcccaccccacggctccctagctccccctgcaggcagggttctggggacagacagccgaacagacacggcaggtctcatgagccttcccagccaccgtagtgccggtgccctgagaacaggactgagtgatggcttccaactccagcgatgtgaaagaattcttagccaaagccaaagaagattttcttaaaaaatgggaaagtcccgctcagaacacagcccacttggatcagtttgaacgaatcaagaccctcggcacgggctccttcgggcgggtgatgctggtgaaacacaaggagaccgggaaccactatgccatgaagatcctcgacaaacagaaggtggtgaaactgaaacagatcgaacacaccctgaatgaaaagcgcatcctgcaagctgtcaactttccgttcctcgtcaaactcgagttctccttcaaggacaactcaaacttatacatggtcatggagtacgtgcccggcggggagatgttctcacacctacggcggatcggaaggttcagtgagccccatgcccgtttctacgcggcccagatcgtcctgacctttgagtatctgcactcgctggatctcatctacagggacctgaagccggagaatctgctcattgaccagcagggctacattcaggtgacagacttcggtttcgccaagcgcgtgaagggccgcacttggaccttgtgcggcacccctgagtacctggcccctgagattatcctgagcaaagtaggagcctccccagccctccccttcccctgaggccggctctgctctcctgctctcgcctcctcctcaccctgtgcccccccatcttgctccagggctacaacaaggccgtggactggtgggccctgggggttcttatctatgaaatggccgctggctacccgcccttcttcgcagaccagcccatccagatctatgagaagatcgtctctgggaaggtgcgcttcccttcccacttcagctctgacttgaaggacctgctgcggaacctcctgcaggtagatctcaccaagcgctttgggaacctcaagaatggggtcaacgatatcaagaaccacaagtggtttgccacaactgactggattgccatctaccagaggaaggtggaagctcccttcataccaaagtttaaaggccctggggatacgagtaactttgacgactatgaggaagaagaaatccgggtctccatcaatgagaagtgtggcaaggagttttctgagttttaggggcatgcctgtgcccccatgggttttcttttttcttttttcttttttttggtcgggggggtgggagggttggattgaacagccagagggccccagagttccttgcatctaatttcacccccaccccaccctccagggttagggggagcaggaagcccagataatcagagggacagaaacaccagctgctccccctcatccccttcaccctcctgccccctctcccacttttcccttcctctttccccacagccccccagcccctcagccctcccagcccacttctgcctgttttaaacgagtttctcaactccagtcagaccaggtcttgctggtgtatccagggacagggtatggaaagaggggctcacgcttaactccagcccccacccacacccccatcccacccaaccacaggccccacttgctaagggcaaatgaacgaagcgccaaccttcctttcggagtaatcctgcctgggaaggagagatttttagtgacatgttcagtgggttgcttgctagaatttttttaaaaaaacaacaatttaaaatcttatttaagttccaccagtgcctccctccctccttcctctactcccacccctcccatgtccccccattcctcaaatccattttaaagagaagcagactgactttggaaagggaggcgctggggtttgaacctccccgctgctaatctcccctgggcccctccccggggaatcctctctgccaatcctgcgagggtctaggcccctttaggaagcctccgctctctttttccccaacagacctgtcttcacccttgggctttgaaagccagacaaagcagctgcccctctccctgccaaagaggagtcatcccccaaaaagacagagggggagccccaagcccaagtctttcctcccagcagcgtttccccccaactccttaattttattctccgctagattttaacgtccagccttccctcagctgagtggggagggcatccctgcaaaagggaacagaagaggccaagtccccccaagccacggcccggggttcaaggctagagctgctggggaggggctgcctgttttactcacccaccagcttccgcctcccccatcctgggcgcccctcctccagcttagctgtcagctgtccatcacctctcccccactttctcatttgtgcttttttctctcgtaatagaaaagtggggagccgctggggagccaccccattcatccccgtatttccccctctcataacttctccccatcccaggaggagttctcaggcctggggtggggccccgggtgggtgcgggggcgattcaacctgtgtgctgcgaaggacgagacttcctcttgaacagtgtgctgttgtaaacatatttgaaaactattaccaataaagttttgtttaaaaaaaaa

SEQ ID NO: 306421 - DNA, 2310 bp, Homo sapiens
cccagtggcctctgggttgggtttctcttcctgctcccaccccacggctccctagctccccctgcaggcagggttctggggacagacagccgaacagacacggcaggtctcatgagccttcccagccaccgtagtgccggtgccctgagaacaggactgagtgatggcttccaactccagcgatgtgaaagaattcttagccaaagccaaagaagattttcttaaaaaatgggaaagtcccgctcagaacacagcccacttggatcagtttgaacgaatcaagaccctcggcacgggctccttcgggcgggtgatgctggtgaaacacaaggagaccgggaaccactatgccatgaagatcctcgacaaacagaaggtgacagacttcggtttcgccaagcgcgtgaagggccgcacttggaccttgtgcggcacccctgagtacctggcccctgagattatcctgagcaaaggctacaacaaggccgtggactggtgggccctgggggttcttatctatgaaatggccgctggctacccgcccttcttcgcagaccagcccatccagatctatgagaagatcgtctctgggaaggtgcgcttcccttcccacttcagctctgacttgaaggacctgctgcggaacctcctgcaggtagatctcaccaagcgctttgggaacctcaagaatggggtcaacgatatcaagaaccacaagtggtttgccacaactgactggattgccatctaccagaggaaggtggaagctcccttcataccaaagtttaaaggccctggggatacgagtaactttgacgactatgaggaagaagaaatccgggtctccatcaatgagaagtgtggcaaggagttttctgagttttaggggcatgcctgtgcccccatgggttttcttttttcttttttcttttttttggtcgggggggtgggagggttggattgaacagccagagggccccagagttccttgcatctaatttcacccccaccccaccctccagggttagggggagcaggaagcccagataatcagagggacagaaacaccagctgctccccctcatccccttcaccctcctgccccctctcccacttttcccttcctctttccccacagccccccagcccctcagccctcccagcccacttctgcctgttttaaacgagtttctcaactccagtcagaccaggtcttgctggtgtatccagggacagggtatggaaagaggggctcacgcttaactccagcccccacccacacccccatcccacccaaccacaggccccacttgctaagggcaaatgaacgaagcgccaaccttcctttcggagtaatcctgcctgggaaggagagatttttagtgacatgttcagtgggttgcttgctagaatttttttaaaaaaacaacaatttaaaatcttatttaagttccaccagtgcctccctccctccttcctctactcccacccctcccatgtccccccattcctcaaatccattttaaagagaagcagactgactttggaaagggaggcgctggggtttgaacctccccgctgctaatctcccctgggcccctccccggggaatcctctctgccaatcctgcgagggtctaggcccctttaggaagcctccgctctctttttccccaacagacctgtcttcacccttgggctttgaaagccagacaaagcagctgcccctctccctgccaaagaggagtcatcccccaaaaagacagagggggagccccaagcccaagtctttcctcccagcagcgtttccccccaactccttaattttattctccgctagattttaacgtccagccttccctcagctgagtggggagggcatccctgcaaaagggaacagaagaggccaagtccccccaagccacggcccggggttcaaggctagagctgctggggaggggctgcctgttttactcacccaccagcttccgcctcccccatcctgggcgcccctcctccagcttagctgtcagctgtccatcacctctcccccactttctcatttgtgcttttttctctcgtaatagaaaagtggggagccgctggggagccaccccattcatccccgtatttccccctctcataacttctccccatcccaggaggagttctcaggcctggggtggggccccgggtgggtgcgggggcgattcaacctgtgtgctgcgaaggacgagacttcctcttgaacagtgtgctgttgtaaacatatttgaaaactattaccaataaagttttgtttaaaaaaaaa

SEQ ID NO: 306422 - DNA, 2512 bp, Homo sapiens
cccagtggcctctgggttgggtttctcttcctgctcccaccccacggctccctagctccccctgcaggcagggttctggggacagacagccgaacagacacggcaggtctcatgagccttcccagccaccgtagtgccggtgccctgagaacaggactgagtgatggcttccaactccagcgatgtgaaagaattcttagccaaagccaaagaagattttcttaaaaaatgggaaagtcccgctcagaacacagcccacttggatcagtttgaacgaatcaagaccctcggcacgggctccttcgggcgggtgatgctggtgaaacacaaggagaccgggaaccactatgccatgaagatcctcgacaaacagaaggtggtgaaactgaaacagatcgaacacaccctgaatgaaaagcgcatcctgcaagctgtcaactttccgttcctcgtcaaactcgagttctccttcaaggacaactcaaacttatacatggtcatggagtacgtgcccggcggggagatgttctcacacctacggcggatcggaaggttcagtgagccccatgcccgtttctacgcggcccagatcgtcctgacctttgagtatctgcactcgctggatctcatctacagggacctgaagccggagaatctgctcattgaccagcagggctacattcaggtgacagacttcggtttcgccaagcgcgtgaagggccgcacttggaccttgtgcggcacccctgagtacctggcccctgagattatcctgagcaaaggctacaacaaggccgtggactggtgggccctgggggttcttatctatgaaatggccgctggctacccgcccttcttcgcagaccagcccatccagatctatgagaagatcgtctctgggaaggtgcgcttcccttcccacttcagctctgacttgaaggacctgctgcggaacctcctgcaggtagatctcaccaagcgctttgggaacctcaagaatggggtcaacgatatcaagaaccacaagtggtttgccacaactgactggattgccatctaccagaggaaggtggaagctcccttcataccaaagtttaaaggccctggggatacgagtaactttgacgactatgaggaagaagaaatccgggtctccatcaatgagaagtgtggcaaggagttttctgagttttaggggcatgcctgtgcccccatgggttttcttttttcttttttcttttttttggtcgggggggtgggagggttggattgaacagccagagggccccagagttccttgcatctaatttcacccccaccccaccctccagggttagggggagcaggaagcccagataatcagagggacagaaacaccagctgctccccctcatccccttcaccctcctgccccctctcccacttttcccttcctctttccccacagccccccagcccctcagccctcccagcccacttctgcctgttttaaacgagtttctcaactccagtcagaccaggtcttgctggtgtatccagggacagggtatggaaagaggggctcacgcttaactccagcccccacccacacccccatcccacccaaccacaggccccacttgctaagggcaaatgaacgaagcgccaaccttcctttcggagtaatcctgcctgggaaggagagatttttagtgacatgttcagtgggttgcttgctagaatttttttaaaaaaacaacaatttaaaatcttatttaagttccaccagtgcctccctccctccttcctctactcccacccctcccatgtccccccattcctcaaatccattttaaagagaagcagactgactttggaaagggaggcgctggggtttgaacctccccgctgctaatctcccctgggcccctccccggggaatcctctctgccaatctgccaaagaggagtcatcccccaaaaagacagagggggagccccaagcccaagtctttcctcccagcagcgtttccccccaactccttaattttattctccgctagattttaacgtccagccttccctcagctgagtggggagggcatccctgcaaaagggaacagaagaggccaagtccccccaagccacggcccggggttcaaggctagagctgctggggaggggctgcctgttttactcacccaccagcttccgcctcccccatcctgggcgcccctcctccagcttagctgtcagctgtccatcacctctcccccactttctcatttgtgcttttttctctcgtaatagaaaagtggggagccgctggggagccaccccattcatccccgtatttccccctctcataacttctccccatcccaggaggagttctcaggcctggggtggggccccgggtgggtgcgggggcgattcaacctgtgtgctgcgaaggacgagacttcctcttgaacagtgtgctgttgtaaacatatttgaaaactattaccaataaagttttgtttaaaaaaaaa

SEQ ID NO: 306423 - DNA, 3178 bp, Homo sapiens
cccagtggcctctgggttgggtttctcttcctgctcccaccccacggctccctagctccccctgcaggcagggttctggggacagacagccgaacagacacggcaggtctcatgagccttcccagccaccgtagtgccggtgccctgagaacaggactgagtgatggcttccaactccagcgatgtgaaagaattcttagccaaagccaaagaagattttcttaaaaaatgggaaagtcccgctcagaacacagcccacttggatcagtttgaacgaatcaagaccctcggcacgggctccttcgggcgggtgatgctggtgaaacacaaggagaccgggaaccactatgccatgaagatcctcgacaaacagaaggtggtgaaactgaaacagatcgaacacaccctgaatgaaaagcgcatcctgcaagctgtcaactttccgttcctcgtcaaactcgagttctccttcaaggacaactcaaacttatacatggtcatggagtacgtgcccggcggggagatgttctcacacctacggcggatcggaaggttcagtgagccccatgcccgtttctacgcggcccagatcgtcctgacctttgagtatctgcactcgctggatctcatctacagggacctgaagccggagaatctgctcattgaccagcagggctacattcaggtgacagacttcggtttcgccaagcgcgtgaagggccgcacttggaccttgtgcggcacccctgagtacctggcccctgagattatcctgagcaaaggctacaacaaggccgtggactggtgggccctgggggttcttatctatgaaatggccgctggctacccgcccttcttcgcagaccagcccatccagatctatgagaagatcgtctctgggaaggtgcgcttcccttcccacttcagctctgacttgaaggacctgctgcggaacctcctgcaggtagatctcaccaagcgctttgggaacctcaagaatggggtcaacgatatcaagaaccacaagtggtttgccacaactgactggattgccatctaccagaggaaggtggaagctcccttcataccaaagtttaaaggccctggggatacgagtaactttgacgactatgaggaagaagaaatccgggtctccatcaatgagaagtgtggcaaggagttttctgagttttaggggcatgcctgtgcccccatgggttttcttttttcttttttcttttttttggtcgggggggtgggagggttggattgaacagccagagggccccagagttccttgcatctaatttcacccccaccccaccctccagggttagggggagcaggaagcccagataatcagagggacagaaacaccagctgctccccctcatccccttcaccctcctgccccctctcccacttttcccttcctctttccccacagccccccagcccctcagccctcccagcccacttctgcctgttttaaacgagtttctcaactccagtcagaccaggtcttgctggtgtatccagggacagggtatggaaagaggggctcacgcttaactccagcccccacccacacccccatcccacccaaccacaggccccacttgctaagggcaaatgaacgaagcgccaaccttcctttcggagtaatcctgcctgggaaggagagatttttagtgacatgttcagtgggttgcttgctagaatttttttaaaaaaacaacaatttaaaatcttatttaagttccaccagtgcctccctccctccttcctctactcccacccctcccatgtccccccattcctcaaatccattttaaagagaagcagactgactttggaaagggaggcgctggggtttgaacctccccgctgctaatctcccctgggcccctccccggggaatcctctctgccaatcctgcgagggtctaggcccctttaggaagcctccgctctctttttccccaacagacctgtcttcacccttgggctttgaaagccagacaaagcagctgcccctctccctgccaaagaggagtcatcccccaaaaagacagagggggagccccaagcccaagtctttcctcccagcagcgtttccccccaactccttaattttattctccgctagattttaacgtccagccttccctcagctgagtggggagggcatccctgcaaaagggaacagaagaggccaagtccccccaagccacggcccggggttcaaggctagagctgctggggaggggctgcctgttttactcacccaccagcttccgcctcccccatcctgggcgcccctcctccagcttagctgtcagctgtccatcacctctcccccactttctcatttgtgcttttttctctcgtaatagaaaagtggggagccgctggggagccaccccattcatccccgtatttccccctctcataacttctccccatcccaggaggagttctcaggcctggggtggggccccgggtgggtgcgggggcgattcaacctgtgtgctgcgaaggacgagacttcctcttgaacagtgtgctgttgtaaacatatttgaaaactattaccaataaagttttgtttaaaaaaaaaaaaaaaaaaaaaaaaaaaaaaaaaaaaaacaaaaaaaaaacaagaaaaacaaacaaaaaaaacaaaaaaaaaaacaaacatgcgtgtgtggcgcgcgcgcgcgccgcgcgcgcccccccgagaacgaagttttcttaaacaaccacaccgtggggggggcgcgcgcgcgcgcgcgccccaagtggagtagcagggagcgaacgcggcgcgcgcacaaaaagagggtctcctcacaagagagagaacacactcgggccggagcacaagacaaaaagaggcgggggggggggcgctctctccccccacaaatataaaaagaagcgccgcggggggggggagaacaacaacagagacgtggttcttagtgagaggacaaacacacccgcacaagagagaaggaggtatgcacagagagagagcgtaactcatcagcgaggggggcggccttttatcacaagaagagaggagagagatacaaacaagagagagcagccgcacaaaaatatataaaaataaattatacgcgccccccccagaggagggggggggggggggggga

SEQ ID NO: 306424 - DNA, 2341 bp, Homo sapiens
  misc_feature (2021)..(2021): n is a, c, g, or t
  misc_feature (2044)..(2044): n is a, c, g, or t
  misc_feature (2047)..(2047): n is a, c, g, or t
  misc_feature (2057)..(2057): n is a, c, g, or t
  misc_feature (2060)..(2060): n is a, c, g, or t
  misc_feature (2063)..(2063): n is a, c, g, or t
  misc_feature (2076)..(2076): n is a, c, g, or t
cccagtggcctctgggttgggtttctcttcctgctcccaccccacggctccctagctccccctgcaggcagggttctggggacagacagccgaacagacacggcaggtctcatgagccttcccagccaccgtagtgccggtgccctgagaacaggactgagtgatggcttccaactccagcgatgtgaaagaattcttagccaaagccaaagaagattttcttaaaaaatgggaaagtcccgctcagaacacagcccacttggatcagtttgaacgaatcaagaccctcggcacgggctccttcgggcgggtgatgctggtgaaacacaaggagaccgggaaccactatgccatgaagatcctcgacaaacagaaggtggtgaaactgaaacagatcgaacacaccctgaatgaaaagcgcatcctgcaagctgtcaactttccgttcctcgtcaaactcgagttctccttcaaggacaactcaaacttatacatggtcatggagtacgtgcccggcggggagatgttctcacacctacggcggatcggaaggttcagtgagccccatgcccgtttctacgcggcccagatcgtcctgacctttgagtatctgcactcgctggatctcatctacagggacctgaagccggagaatctgctcattgaccagcagggctacattcaggtgacagacttcggtttcgccaagcgcgtgaagggccgcacttggaccttgtgcggcacccctgagtacctggcccctgagattatcctgagcaaagtaggagcctccccagccctccccttcccctgaggccggctctgctctcctgctctcgcctcctcctcaccctgtgcccccccatcttgctccagggctacaacaaggccgtggactggtgggccctgggggttcttatctatgaaatggccgctggctacccgcccttcttcgcagaccagcccatccagatctatgagaagatcgtctctgggaaggtgaggtccggatgtggggacacagccctggaagaaacagaccgttccctgctcacccatcctattccctggggagccctgcttgttgtcagaataatctagaagttccttaagtcaggccaggtggtgaagctggacgcgccggccacactgaggccaacacctcaagcccccttgctgtccagccccaaccccgcggttccagaatcccatgggcttccaaaatcccgagcctcacgggaacatcttggccacagaacacaaaccgccctgccagacgaccctccttttcgctcctcatcccagttagtgtgagttttcgcaaattccaaggcagaaaaacgaatgtatttggttcctgttcccaggtgctgtccatagcctcacccaggattgccctcacttagcatttatagcccatgcttcctctcccaaacccagacttgcctaactctgagggttcagatgaggggtggtgaagccatctcagctcacatctatgacaggtgcaaagtgcccaccatccaccaggccccagaatccccatcagtcacaccctgagatagtggcaccctctgtaggagaggtgaggaaacaggctgggaaaagggatgtgtcttggccaagatcacactttggtgagtaggtaatcaccgtaggcaatcattgtaggcactgatggccggagagaggttggggaccccacctctgccctcagctcaaccaccttgctgggaagacccgaccatcccccgacttggtccagcatctcctacacaggagcttttggttggcccggagtcatgacactgtggtgggagcaccctcaggctcagcctgggccccagtcccagctctgccaccgactggctttgaaactttggggctgggtacaatggctcacacctgtaatgccagcaccttgggaagtggaggcttgaggccaggagttccagaccagcctgggcaacatagccagaccccatctctaaaaaaaaaaagactaaggtgggggaatccantgaggccagaagttgagaccagnctnggcaacatancangancccatctaaaacnaaataaaacactcacaccaagggttctggtagtgaaagtgtcggattggggggtaaccccaagggtaagggcccgggggcagttggtgcccagcagcaccatcaggaccctggcatattgctatcccttcgctgtcatatgggggcactggccggcctcacagcaccacctcgagtcgtcaaagagagagaaccagacaaacaacaaaacccccggagaacaaccccgccgcgcagcaacgcaaccgagaccccctcccgcgcgc

SEQ ID NO: 306425 - DNA, 426 bp, Homo sapiens
ctgtcttttcaatttcagttcagctgccccttcctccagaaagcgctgtctgattcccccttccccagaccacgccaggtactttacatgggcttcttgggggctgcttctccacaaccccaagataccctccaccacggctctgacctctgtgggggtaacccatgtattctttgccctggacttagtgccgtgcaaggacaagcagcccctagcctccctgatgctgtgtcctcagcatcagctaagggcccgacaggccacaggcacacaaatgattctggctgaaggaaccggcctggctccggcatccctagttccaggcattaggggaaatgaggcccctctcacctccccctcctttctgccctcccctccttcccttcccaggtggtgaaactgaaacagatcgaacacaccctgaat

SEQ ID NO: 306426 - DNA, 3026 bp, Homo sapiens
gctctctgtaactgcggggagcccagtctacacgggcagcgggagctacggcgctttgagttgccatttgattggccccggtgtccagtggtgtcccctggggggagcccagggcccaatgaggcagtgctgcccagtgaggacctatcacagattggtttccctgagggccttacacctgcccacctaggagaacctggagggtcctgctgggctcaccattggtgtgctgcatggtcggcaggcgtatgggggcaggagggcccagaactatgtggtgtggacaaggccatcttctcagggatctcacagcgctgctcccactgcaccaggctcggtgcctccatcccttgccgctcacctggatgtccacggctttaccacttcccctgcgcgactgccagcggttccttcctatccatgaaaacactgcagctgctatgcccagagcacagtgagggggctgcatatctggaggaggctcgctgtgcagtgtgtgaggggccaggggagttgtgtgacctgttcttctgtaccagctgtgggcatcactatcacggggcctgcctggacactgctctgactgcccgcaaacgtgctggctggcagtgccctgaatgcaaagtgtgccaagcctgcaggaaacctgggaatgactctaagatgttggtttgtgagacgtgtgacaaaggataccatactttctgcctaaaaccacccatggaggaactgcctgctcactcttggaagtgcaaggcgtgccgggtgtgccgggcctgtggggcgggctcagcagaactgaatcccaactcggagtggtttgagaactactctctctgtcaccgctgtcacaaagcccagggaggtcagactatccgctccgttgctgagcagcataccccggtgtgtagcagattttcacccccagagcctggcgatacccccactgacgagcccgatgctctgtacgttgcatgccaagggcagccaaagggtgggcacgtgacctctatgcaacccaaggaaccagggcccctgcaatgtgaagccaaaccactagggaaagcaggggtccaacttgagccccagttggaggcccccctaaacgaggagatgccactgctgcccccacctgaggagtcacccctgtccccaccacctgaggaatcacccacgtccccaccacctgaggcatcacgcctgtcaccaccacctgaggaattgcccgcatccccacttcctgaggcattgcacctgtcccggccgctggaggaatcgcccctctctccgccgcctgaggagtctcctctgtctcccccacctgaatcatcacctttttctccactggaggagtcgcccttgtctccaccggaagagtcacccccatctcctgcacttgagacgcctctatccccaccacctgaagcatcgcccctgtccccaccatttgaagaatctcctttgtccccgccacctgaggaattgcccacttccccgccacctgaagcatctcgcctgtctccaccacctgaggagtcacccatgtcccctccacctgaagagtcacccatgtctccaccaccggaggcatctcgtctgttcccaccatttgaagagtctcctctgtcccctccacctgaggagtctcccctttccccaccacctgaggcatcacgcctgtccccaccacctgaggactcgcctatgtccccaccacctgaagaatcacctatgtcccccccacctgaggtatcgcgcctatcccccctgcctgtggtgtcacgcctgtctccaccgcctgaggaatctcccttgtccccaccgcctgaggagtctcccacgtcccctccacctgaggcttcacgcctctccccaccacctgaggactcccccacatccccaccacctgaggactcacctgcttccccaccaccggaggactcgctcatgtccctgccgctggaggagtcacccctgttgccactacctgaggagccgcaactctgcccccggtccgaggggccgcacctgtcaccccggcctgaggagccgcacctgtccccccggcctgaggagccacacctatctccgcaggctgaggagccacacctgtccccccagcctgaggagccatgcctatgcgctgtgcctgaggagccacacttgtccccccaggctgagggaccacatctgtcccctcagcctgaggaattgcacctgtccccccagactgaggagccgcacctgtctcctgtgcctgaggagccatgcttgtccccccaacctgaggaatcacacctgtccccccagtctgaggagccatgcctgtccccccggcctgaggaatcgcatctgtcccctgagcttgagaagccacccctgtcccctcggcctgaaaagccccctgaggagccaggccaatgccctgcacctgaggagctgcccttgttccctccccctggggaaccatccttatctcccttgcttggagagccagccctgtctgagcctggggaaccacctctgtcccctctgcccgaggagctgccgttgtccccatctggggagccatccttgtcgcctcagctgatgccaccagatccccttcctcctccactctcacccattatcacagctgcggccccaccggccctgtctcctttgggggagttagagtacccctttggtgccaaaggggacagtgaccctgagtcaccgttggctgcccccatcctggagacacccatcagccctccaccagaagctaactgcactgaccctgagcctgtcccccctatgatccttcccccatctccaggctccccagtggggccggcttctcccatcctgatggagccccttcctcctcagtgttcgccactccttcagcattccctggttccccaaaactcccctccttcccagtgctctcctcctgccctaccactgtccgttccctccccgttgagtcccatagggaaggtagtgggggtctcagatgaggctgagctgcacgagatggagac

SEQ ID NO: 306427 - DNA, 2271 bp, Homo sapiens
tagctggtaccgacgctctctctgtggggcgggctcagcagaactgaatcccaactcggagtggtttgagaactactctctctgtcaccgctgtcacaaagcccagggaggtcagactatccgctccgttgctgagcagcataccccggtgtgtagcagattttcacccccagagcctggcgatacccccactgacgagcccgatgctctgtacgttgcatgccaagggcagccaaagggtgggcacgtgacctctatgcaacccaaggaaccagggcccctgcaatgtgaagccaaaccactagggaaagcaggggtccaacttgagccccagttggaggcccccctaaacgaggagatgccactgctgcccccacctgaggagtcacccctgtccccaccacctgaggaatcacccacgtccccaccacctgaggcatcacgcctgtcaccaccacctgaggaattgcccgcatccccacttcctgaggcattgcacctgtcccggccgctggaggaatcgcccctctctccgccgcctgaggagtctcctctgtctcccccacctgaatcatcacctttttctccactggaggagtcgcccttgtctccaccggaagagtcacccccatctcctgcacttgagacgcctctatccccaccacctgaagcatcgcccctgtccccaccatttgaagaatctcctttgtccccgccacctgaggaattgcccacttccccgccacctgaagcatctcgcctgtctccaccacctgaggagtcacccatgtcccctccacctgaagagtcacccatgtctccaccaccggaggcatctcgtctgttcccaccatttgaagagtctcctctgtcccctccacctgaggagtctcccctttccccaccacctgaggcatcacgcctgtccccaccacctgaggactcgcctatgtccccaccacctgaagaatcacctatgtcccccccacctgaggtatcgcgcctatcccccctgcctgtggtgtcacgcctgtctccaccgcctgaggaatctcccttgtccccaccgcctgaggagtctcccacgtcccctccacctgaggcttcacgcctctccccaccacctgaggactcccccacatccccaccacctgaggactcacctgcttccccaccaccggaggactcgctcatgtccctgccgctggaggagtcacccctgttgccactacctgaggagccgcaactctgcccccggtccgaggggccgcacctgtcaccccggcctgaggagccgcacctgtccccccggcctgaggagccacacctatctccgcaggctgaggagccacacctgtccccccagcctgaggagccatgcctatgcgctgtgcctgaggagccacacttgtccccccaggctgagggaccacatctgtcccctcagcctgaggaattgcacctgtccccccagactgaggagccgcacctgtctcctgtgcctgaggagccatgcttgtccccccaacctgaggaatcacacctgtccccccagtctgaggagccatgcctgtccccccggcctgaggaatcgcatctgtcccctgagcttgagaagccacccctgtcccctcggcctgaaaagccccctgaggagccaggccaatgccctgcacctgaggagctgcccttgttccctccccctggggaaccatccttatctcccttgcttggagagccagccctgtctgagcctggggaaccacctctgtcccctctgcccgaggagctgccgttgtccccatctggggagccatccttgtcgcctcagctgatgccaccagatccccttcctcctccactctcacccattatcacagctgcggccccaccggccctgtctcctttgggggagttagagtacccctttggtgccaaaggggacagtgaccctgagtcaccgttggctgcccccatcctggagacacccatcagccctccaccagaagctaactgcactgaccctgagcctgtcccccctatgatccttcccccatctccaggctccccagtggggccggcttctcccatcctgatggagccccttcctcctcagtgttcgccactccttcagcattccctggttccccaaaactcccctccttcccagtgctctcctcctgccctaccactgtccgttccctccccgttgagtcccatagggaaggtagtgggggtctcagatgaggctgagctgcacgagatggagac

SEQ ID NO: 306428 - DNA, 2670 bp, Homo sapiens
  misc_feature (13)..(13): n is a, c, g, or t
  misc_feature (48)..(48): n is a, c, g, or t
  misc_feature (93)..(93): n is a, c, g, or t
  misc_feature (125)..(125): n is a, c, g, or t
  misc_feature (128)..(128): n is a, c, g, or t
  misc_feature (142)..(142): n is a, c, g, or t
  misc_feature (144)..(144): n is a, c, g, or t
gggagtttaaaanggaatttttattttttagaacaaccctaacatganattttttttttttaaaaaacaatgcttcaattcccaaattaaatnaacagtcaaaataaatggaggagtttcaaganganatcagtcccatttntnttaagtccgggagttgtgtgacctgttcttctgtaccagctgtgggcatcactatcacggggcctgcctggacactgctctgactgcccgcaaacgtgctggctggcagtgccctgaatgcaaagtgtgccaagcctgcaggaaacctgggaatgactctaagatgttggtttgtgagacgtgtgacaaaggataccatactttctgcctaaaaccacccatggaggaactgcctgctcactcttggaagtgcaaggcgtgccgggtgtgccgggcctgtggggcgggctcagcagaactgaatcccaactcggagtggtttgagaactactctctctgtcaccgctgtcacaaagcccagggaggtcagactatccgctccgttgctgagcagcataccccggtgtgtagcagattttcacccccagagcctggcgatacccccactgacgagcccgatgctctgtacgttgcatgccaagggcagccaaagggtgggcacgtgacctctatgcaacccaaggaaccagggcccctgcaatgtgaagccaaaccactagggaaagcaggggtccaacttgagccccagttggaggcccccctaaacgaggagatgccactgctgcccccacctgaggagtcacccctgtccccaccacctgaggaatcacccacgtccccaccacctgaggcatcacgcctgtcaccaccacctgaggaattgcccgcatccccacttcctgaggcattgcacctgtcccggccgctggaggaatcgcccctctctccgccgcctgaggagtctcctctgtctcccccacctgaatcatcacctttttctccactggaggagtcgcccttgtctccaccggaagagtcacccccatctcctgcacttgagacgcctctatccccaccacctgaagcatcgcccctgtccccaccatttgaagaatctcctttgtccccgccacctgaggaattgcccacttccccgccacctgaagcatctcgcctgtctccaccacctgaggagtcacccatgtcccctccacctgaagagtcacccatgtctccaccaccggaggcatctcgtctgttcccaccatttgaagagtctcctctgtcccctccacctgaggagtctcccctttccccaccacctgaggcatcacgcctgtccccaccacctgaggactcgcctatgtccccaccacctgaagaatcacctatgtcccccccacctgaggtatcgcgcctatcccccctgcctgtggtgtcacgcctgtctccaccgcctgaggaatctcccttgtccccaccgcctgaggagtctcccacgtcccctccacctgaggcttcacgcctctccccaccacctgaggactcccccacatccccaccacctgaggactcacctgcttccccaccaccggaggactcgctcatgtccctgccgctggaggagtcacccctgttgccactacctgaggagccgcaactctgcccccggtccgaggggccgcacctgtcaccccggcctgaggagccgcacctgtccccccggcctgaggagccacacctatctccgcaggctgaggagccacacctgtccccccagcctgaggagccatgcctatgcgctgtgcctgaggagccacacttgtccccccaggctgagggaccacatctgtcccctcagcctgaggaattgcacctgtccccccagactgaggagccgcacctgtctcctgtgcctgaggagccatgcttgtccccccaacctgaggaatcacacctgtccccccagtctgaggagccatgcctgtccccccggcctgaggaatcgcatctgtcccctgagcttgagaagccacccctgtcccctcggcctgaaaagccccctgaggagccaggccaatgccctgcacctgaggagctgcccttgttccctccccctggggaaccatccttatctcccttgcttggagagccagccctgtctgagcctggggaaccacctctgtcccctctgcccgaggagctgccgttgtccccatctggggagccatccttgtcgcctcagctgatgccaccagatccccttcctcctccactctcacccattatcacagctgcggccccaccggccctgtctcctttgggggagttagagtacccctttggtgccaaaggggacagtgaccctgagtcaccgttggctgcccccatcctggagacacccatcagccctccaccagaagctaactgcactgaccctgagcctgtcccccctatgatccttcccccatctccaggctccccagtggggccggcttctcccatcctgatggagccccttcctcctcagtgttcgccactccttcagcattccctggttccccaaaactcccctccttcccagtgctctcctcctgccctaccactgtccgttccctccccgttgagtcccatagggaaggtagtgggggtctcagatgaggctgagctgcacgagatggagac

SEQ ID NO: 306429 - DNA, 2354 bp, Homo sapiens
gctctctgtaactgcggggagcccagtctacacgggcagcgggagctacggcgctttgagttgccatttgattggccccggtgtccagtggtgtcccctggggggagcccagggcccaatgaggcagtgctgcccagtgaggacctatcacagattggtttccctgagggccttacacctgcccacctaggagaacctggagggtcctgctgggctcaccattggtgtgctgcatggtcggcaggcgtatgggggcaggagggcccagaactatgtggtgtggacaaggccatcttctcagggatctcacagcgctgctcccactgcaccaggctcggtgcctccatcccttgccgctcacctggatgtccacggctttaccacttcccctgcgcgactgccagcggttccttcctatccatgaaaacactgcagctgctatgcccagagcacagtgagggggctgcatatctggaggaggctcgctgtgcagtgtgtgaggggccaggggagttgtgtgacctgttcttctgtaccagctgtgggcatcactatcacggggcctgcctggacactgctctgactgcccgcaaacgtgctggctggcagtgccctgaatgcaaagtgtgccaagcctgcaggaaacctgggaatgactctaagatgttggtttgtgagacgtgtgacaaaggataccatactttctgcctaaaaccacccatggaggaactgcctgctcactcttggaagtgcaaggcgtgccgggtgtgccgggcctgtggggcgggctcagcagaactgaatcccaactcggagtggtttgagaactactctctctgtcaccgctgtcacaaagcccagggaggtcagactatccgctccgttgctgagcagcataccccggtgtgtagcagattttcacccccagagcctggcgatacccccactgacgagcccgatgctctgtacgttgcatgccaagggcagccaaagggtgggcacgtgacctctatgcaacccaaggaaccagggcccctgcaatgtgaagccaaaccactagggaaagcaggggtccaacttgagccccagttggaggcccccctaaacgaggagatgccactgctgcccccacctgaggagtcacccctgtccccaccacctgaggaatcacccacgtccccaccacctgaggcatcacgcctgtcaccaccacctgaggaattgcccgcatccccacttcctgaggcattgcacctgtcccggccgctggaggaatcgcccctctctccgccgcctgaggagtctcctctgtctcccccacctgaatcatcacctttttctccactggaggagtcgcccttgtctccaccggaagagtcacccccatctcctgcacttgagacgcctctatccccaccacctgaagcatcgcccctgtccccaccatttgaagaatctcctttgtccccgccacctgaggaattgcccacttccccgccacctgaagcatctcgcctgtctccaccacctgaggagtcacccatgtcccctccacctgaagagtcacccatgtctccaccaccggaggcatctcgtctgttcccaccatttgaagagtctcctctgtcccctccacctgaggagtctcccctttccccaccacctgaggcatcacgcctgtccccaccacctgaggactcgcctatgtccccaccacctgaagaatcacctatgtcccccccacctgaggtatcgcgcctatcccccctgcctgtggtgtcacgcctgtctccaccgcctgaggaatctcccttgtccccaccgcctgaggagtctcccacgtcccctccacctgaggcttcacgcctctccccaccacctgaggactcccccacatccccaccacctgaggactcacctgcttccccaccaccggaggactcgctcatgtccctgccgctggaggagtcacccctgttgccactacctgaggagccgcaactctgcccccggtccgaggggccgcacctgtcaccccggcctgaggagccgcacctgtccccccggcctgaggagccacacctatctccgcaggctgaggagccacacctgtccccccagcctgaggagccatgcctatgcgctgtgcctgaggagccacacttgtccccccaggctgagggaccacatctgtcccctcagcctgaggaattgcacctgtccccccagactgaggagccgcacctgtctcctgtgcctgaggagccatgcttgtccccccaacctgaggaatcacacctgtccccccaggccggggggacaggcatggctcctcagactgggggggggtaccg

SEQ ID NO: 306430 - DNA, 2027 bp, Homo sapiens
cccacactttctgtggagtagatctgagctagataggagcatcgtgttgttgtgtctgcagggaaagcaggggtccaacttgagccccagttggaggcccccctaaacgaggagatgccactgctgcccccacctgaggagtcacccctgtccccaccacctgaggaatcacccacgtccccaccacctgaggcatcacgcctgtcaccaccacctgaggaattgcccgcatccccacttcctgaggcattgcacctgtcccggccgctggaggaatcgcccctctctccgccgcctgaggagtctcctctgtctcccccacctgaatcatcacctttttctccactggaggagtcgcccttgtctccaccggaagagtcacccccatctcctgcacttgagacgcctctatccccaccacctgaagcatcgcccctgtccccaccatttgaagaatctcctttgtccccgccacctgaggaattgcccacttccccgccacctgaagcatctcgcctgtctccaccacctgaggagtcacccatgtcccctccacctgaagagtcacccatgtctccaccaccggaggcatctcgtctgttcccaccatttgaagagtctcctctgtcccctccacctgaggagtctcccctttccccaccacctgaggcatcacgcctgtccccaccacctgaggactcgcctatgtccccaccacctgaagaatcacctatgtcccccccacctgaggtatcgcgcctatcccccctgcctgtggtgtcacgcctgtctccaccgcctgaggaatctcccttgtccccaccgcctgaggagtctcccacgtcccctccacctgaggcttcacgcctctccccaccacctgaggactcccccacatccccaccacctgaggactcacctgcttccccaccaccggaggactcgctcatgtccctgccgctggaggagtcacccctgttgccactacctgaggagccgcaactctgcccccggtccgaggggccgcacctgtcaccccggcctgaggagccgcacctgtccccccggcctgaggagccacacctatctccgcaggctgaggagccacacctgtccccccagcctgaggagccatgcctatgcgctgtgcctgaggagccacacttgtccccccaggctgagggaccacatctgtcccctcagcctgaggaattgcacctgtccccccagactgaggagccgcacctgtctcctgtgcctgaggagccatgcttgtccccccaacctgaggaatcacacctgtccccccagtctgaggagccatgcctgtccccccggcctgaggaatcgcatctgtcccctgagcttgagaagccacccctgtcccctcggcctgaaaagccccctgaggagccaggccaatgccctgcacctgaggagctgcccttgttccctccccctggggaaccatccttatctcccttgcttggagagccagccctgtctgagcctggggaaccacctctgtcccctctgcccgaggagctgccgttgtccccatctggggagccatccttgtcgcctcagctgatgccaccagatccccttcctcctccactctcacccattatcacagctgcggccccaccggccctgtctcctttgggggagttagagtacccctttggtgccaaaggggacagtgaccctgagtcaccgttggctgcccccatcctggagacacccatcagccctccaccagaagctaactgcactgaccctgagcctgtcccccctatgatccttcccccatctccaggctccccagtggggccggcttctcccatcctgatggagccccttcctcctcagtgttcgccactccttcagcattccctggttccccaaaactcccctccttcccagtgctctcctcctgccctaccactgtccgttccctccccgttgagtcccatagggaaggtagtgggggtctcagatgaggctgagctgcacgagatggagac

SEQ ID NO: 306431 - DNA, 1692 bp, Homo sapiens
  misc_feature (17)..(17): n is a, c, g, or t
tgagctcggtaccggtnagtacggatgtgctccaccggaagagtcacccccatctcctgcacttgagacgcctctatccccaccacctgaagcatcgcccctgtccccaccatttgaagaatctcctttgtccccgccacctgaggaattgcccacttccccgccacctgaagcatctcgcctgtctccaccacctgaggagtcacccatgtcccctccacctgaagagtcacccatgtctccaccaccggaggcatctcgtctgttcccaccatttgaagagtctcctctgtcccctccacctgaggagtctcccctttccccaccacctgaggcatcacgcctgtccccaccacctgaggactcgcctatgtccccaccacctgaagaatcacctatgtcccccccacctgaggtatcgcgcctatcccccctgcctgtggtgtcacgcctgtctccaccgcctgaggaatctcccttgtccccaccgcctgaggagtctcccacgtcccctccacctgaggcttcacgcctctccccaccacctgaggactcccccacatccccaccacctgaggactcacctgcttccccaccaccggaggactcgctcatgtccctgccgctggaggagtcacccctgttgccactacctgaggagccgcaactctgcccccggtccgaggggccgcacctgtcaccccggcctgaggagccgcacctgtccccccggcctgaggagccacacctatctccgcaggctgaggagccacacctgtccccccagcctgaggagccatgcctatgcgctgtgcctgaggagccacacttgtccccccaggctgagggaccacatctgtcccctcagcctgaggaattgcacctgtccccccagactgaggagccgcacctgtctcctgtgcctgaggagccatgcttgtccccccaacctgaggaatcacacctgtccccccagtctgaggagccatgcctgtccccccggcctgaggaatcgcatctgtcccctgagcttgagaagccacccctgtcccctcggcctgaaaagccccctgaggagccaggccaatgccctgcacctgaggagctgcccttgttccctccccctggggaaccatccttatctcccttgcttggagagccagccctgtctgagcctggggaaccacctctgtcccctctgcccgaggagctgccgttgtccccatctggggagccatccttgtcgcctcagctgatgccaccagatccccttcctcctccactctcacccattatcacagctgcggccccaccggccctgtctcctttgggggagttagagtacccctttggtgccaaaggggacagtgaccctgagtcaccgttggctgcccccatcctggagacacccatcagccctccaccagaagctaactgcactgaccctgagcctgtcccccctatgatccttcccccatctccaggctccccagtggggccggcttctcccatcctgatggagccccttcctcctcagtgttcgccactccttcagcattccctggttccccaaaactcccctccttcccagtgctctcctcctgccctaccactgtccgttccctccccgttgagtcccatagggaaggtagtgggggtctcagatgaggctgagctgcacgagatggagac

SEQ ID NO: 306432 - DNA, 1323 bp, Homo sapiens
gctctctgtaactgcggggagcccagtctacacgggcagcgggagctacggcgctttgagttgccatttgattggccccggtgtccagtggtgtcccctggggggagcccagggcccaatgaggcagtgctgcccagtgaggacctatcacagattggtttccctgagggccttacacctgcccacctaggagaacctggagggtcctgctgggctcaccattggtgtgctgcatggtcggcaggcgtatgggggcaggagggcccagaactatgtggtgtggacaaggccatcttctcagggatctcacagcgctgctcccactgcaccaggctcggtgcctccatcccttgccgctcacctggatgtccacggctttaccacttcccctgcgcgactgccagcggttccttcctatccatgaaaacactgcagctgctatgcccagagcacagtgagggggctgcatatctggaggaggctcgctgtgcagtgtgtgaggggccaggggagttgtgtgacctgttcttctgtaccagctgtgggcatcactatcacggggcctgcctggacactgctctgactgcccgcaaacgtgctggctggcagtgccctgaatgcaaagtgtgccaagcctgcaggaaacctgggaatgactctaagatgttggtttgtgagacgtgtgacaaaggataccatactttctgcctaaaaccacccatggaggaactgcctgctcactcttggaagtgcaaggcgtgccgggtgtgccgggcctgtggggcgggctcagcagaactgaatcccaactcggagtggtttgagaactactctctctgtcaccgctgtcacaaagcccagggaggtcagactatccgctccgttgctgagcagcataccccggtgtgtagcagattttcacccccagagcctggcgatacccccactgacgagcccgatgctctgtacgttgcatgccaagggcagccaaagggtgggcacgtgacctctatgcaacccaaggaaccagggcccctgcaatgtgaagccaaaccactagggaaagcaggggtccaacttgagccccagttggaggcccccctaaacgaggagatgccactgctgcccccacctgaggagtcacccctgtccccaccacctgaggaatcacccacgtccccaccaccttggcatgcaacgtacagagcatcgggctcgtcagtgggggtatcgccaggctctgggggtgaaaatctgctacacaccgggatatgctgctcagcaacggagcaggatagtctgacctcactgggctttgtgaca

SEQ ID NO: 306433 - DNA, 1214 bp, Homo sapiens
gctctctgtaactgcggggagcccagtctacacgggcagcgggagctacggcgctttgagttgccatttgattggccccggtgtccagtggtgtcccctggggggagcccagggcccaatgaggcagtgctgcccagtgaggacctatcacagattggtttccctgagggccttacacctgcccacctaggagaacctggagggtcctgctgggctcaccattggtgtgctgcatggtcggcaggcgtatgggggcaggagggcccagaactatgtggtgtggacaaggccatcttctcagggatctcacagcgctgctcccactgcaccaggctcggtgcctccatcccttgccgctcacctggatgtccacggctttaccacttcccctgcgcgactgccagcggttccttcctatccatgaaaacactgcagctgctatgcccagagcacagtgagggggctgcatatctggaggaggctcgctgtgcagtgtgtgaggggccaggggagttgtgtgacctgttcttctgtaccagctgtgggcatcactatcacggggcctgcctggacactgctctgactgcccgcaaacgtgctggctggcagtgccctgaatgcaaagtgtgccaagcctgcaggaaacctgggaatgactctaagatgttggtttgtgagacgtgtgacaaaggataccatactttctgcctaaaaccacccatggaggaactgcctgctcactcttggaagtgcaaggcgtgccgggtgtgccgggcctgtggggcgggctcagcagaactgaatcccaactcggagtggtttgagaactactctctctgtcaccgctgtcacaaagcccagggaggtcagactatccgctccgttgctgagcagcataccccggtgtgtagcagattttcacccccagagcctggcgatacccccactgacgagcccgatgctctgtacgttgcatgccaagggcagccaaagggtgggcacgtgacctctatgcaacccaaggaaccagggcccctgcaatgtgaagccaaaccactagggaaagcaggggtccaacttgagccccagttggaggcccccctaaacgaggagatgccactgctgcccccacctgaggagtcacccctgtccccacccccaaatatctcatcaacaacgactaatcaccacccaggcacatgcatgcaccacgg

SEQ ID NO: 306434 - DNA, 1201 bp, Homo sapiens
gctctctgtaactgcggggagcccagtctacacgggcagcgggagctacggcgctttgagttgccatttgattggccccggtgtccagtggtgtcccctggggggagcccagggcccaatgaggcagtgctgcccagtgaggacctatcacagattggtttccctgagggccttacacctgcccacctaggagaacctggagggtcctgctgggctcaccattggtgtgctgcatggtcggcaggcgtatgggggcaggagggcccagaactatgtggtgtggacaaggccatcttctcagggatctcacagcgctgctcccactgcaccaggctcggtgcctccatcccttgccgctcacctggatgtccacggctttaccacttcccctgcgcgactgccagcggttccttcctatccatgaaaacactgcagctgctatgcccagagcacagtgagggggctgcatatctggaggaggctcgctgtgcagtgtgtgaggggccaggggagttgtgtgacctgttcttctgtaccagctgtgggcatcactatcacggggcctgcctggacactgctctgactgcccgcaaacgtgctggctggcagtgccctgaatgcaaagtgtgccaagcctgcaggaaacctgggaatgactctaagatgttggtttgtgagacgtgtgacaaaggataccatactttctgcctaaaaccacccatggaggaactgcctgctcactcttggaagtgcaaggcgtgccgggtgtgccgggcctgtggggcgggctcagcagaactgaatcccaactcggagtggtttgagaactactctctctgtcaccgctgtcacaaagcccagggaggtcagactatccgctccgttgctgagcagcataccccggtgtgtagcagattttcacccccagagcctggcgatacccccactgacgagcccgatgctctgtacgttgcatgccaagggcagccaaagggtgggcacgtgacctctatgcaacccaaggaaccagggcccctgcaatgtgaagccaaaccactagggaaagcaggggtccaacttgagccccagttggaggcccccctaaacgaggagaatcacttgaacctggaggcagaggttgcagtgagtcgaggttgcgctactgcactccagcctggacaacagagggagactctgtctc

SEQ ID NO: 306435 - DNA, 1061 bp, Homo sapiens
gctctctgtaactgcggggagcccagtctacacgggcagcgggagctacggcgctttgagttgccatttgattggccccggtgtccagtggtgtcccctggggggagcccagggcccaatgaggcagtgctgcccagtgaggacctatcacagattggtttccctgagggccttacacctgcccacctaggagaacctggagggtcctgctgggctcaccattggtgtgctgcatggtcggcaggcgtatgggggcaggagggcccagaactatgtggtgtggacaaggccatcttctcagggatctcacagcgctgctcccactgcaccaggctcggtgcctccatcccttgccgctcacctggatgtccacggctttaccacttcccctgcgcgactgccagcggttccttcctatccatgaaaacactgcagctgctatgcccagagcacagtgagggggctgcatatctggaggaggctcgctgtgcagtgtgtgaggggccaggggagttgtgtgacctgttcttctgtaccagctgtgggcatcactatcacggggcctgcctggacactgctctgactgcccgcaaacgtgctggctggcagtgccctgaatgcaaagtgtgccaagcctgcaggaaacctgggaatgactctaagatgttggtttgtgagacgtgtgacaaaggataccatactttctgcctaaaaccacccatggaggaactgcctgctcactcttggaagtgcaaggcgtgccgggtgtgccgggcctgtggggcgggctcagcagaactgaatcccaactcggagtggtttgagaactactctctctgtcaccgctgtcacaaagcccagggaggtcagactatccgctccgttgctgagcagcataccccggtgtgtagcagattttcacccccagagcctggcgatacccccactgacgagcccgatgctctgtacgttgcatgccaagggcagccaaaggtgctaagaccagggccctgcaattgaaccaaaccactaggcactgccattggagccccccttacgag

SEQ ID NO: 306436 - DNA, 954 bp, Homo sapiens
gctctctgtaactgcggggagcccagtctacacgggcagcgggagctacggcgctttgagttgccatttgattggccccggtgtccagtggtgtcccctggggggagcccagggcccaatgaggcagtgctgcccagtgaggacctatcacagattggtttccctgagggccttacacctgcccacctaggagaacctggagggtcctgctgggctcaccattggtgtgctgcatggtcggcaggcgtatgggggcaggagggcccagaactatgtggtgtggacaaggccatcttctcagggatctcacagcgctgctcccactgcaccaggctcggtgcctccatcccttgccgctcacctggatgtccacggctttaccacttcccctgcgcgactgccagcggttccttcctatccatgaaaacactgcagctgctatgcccagagcacagtgagggggctgcatatctggaggaggctcgctgtgcagtgtgtgaggggccaggggagttgtgtgacctgttcttctgtaccagctgtgggcatcactatcacggggcctgcctggacactgctctgactgcccgcaaacgtgctggctggcagtgccctgaatgcaaagtgtgccaagcctgcaggaaacctgggaatgactctaagatgttggtttgtgagacgtgtgacaaaggataccatactttctgcctaaaaccacccatggaggaactgcctgctcactcttggaagtgcaaggcgtgccgggtgtgccgggcctgtggggcgggctcagcagaactgaatcccaactcggagtggtttgagaactactctctctgtcaccgctgtcacaaagcccagggaggtcagactatccgctccgttgctgagcagcataccccggtgtgtagcagagttttcacccccagagcgtcgggatcctctagaacgccc

SEQ ID NO: 306437 - DNA, 386 bp, Homo sapiens
ctgtggggcgggctcagcagaactgaatcccaactcggagtggtttgagaactactctctctgtcaccgctgtcacaaagcccagggaggtcagactatccgctccgttgctgagcagcataccccggtgtgtagcaggtaagtggtggggactgactgagattgggctggcaggttggaagaactgacattggcaggggccttgttaaattgagtggactttgagaggagagccctaaggtgggcagtgccatccacagcattcgtgcctccccccagtgtgctctctaggatttgttagctggtgagagccacagtgcctgctcccctgtaccctctgcagattttcacccccagagcctggcgatacccccactgacgagccc

SEQ ID NO: 306438 - DNA, 648 bp, Homo sapiens
aaacagcatcccatcagaagtggctaaggacataatgaccattctcaaaagaagatatacaaatggccaaccaacatatgaagagatgctcaacatcactaatgatcagggaaatgccaatccaaaccaccatgagatactaccttactcctgcaagaatggccatcatccaaaaatcaaaaaacagatgttggcatgaatgcggttaacagggaacacttctatgctgctgatgggacgtctttgctcccaaacaccaaccaacaccccttcacaggaccagcactgttaggatggctaagtggatgttttatgttcccacgtccctgactctgtttcagaggttgtgtctgctctcccagcccctgaagccaaaatgacttcctgcagctttcatgagctcagcctcttccctggggtatgtgtgaggggagaagatgcgccatcttgctcccatcaggggttccaattacacttggcacaatcttggctcactgcaacctccacctcccaggttcaagcgattctcccgccccagtctcctgagcagctagtactacaggtgtatgccacccatgcctggcctcttttagctttatatataatatgttatgccattacttttctcttttttttgagacgggtgtt

SEQ ID NO: 306439 - DNA, 2661 bp, Homo sapiens
ccacgaccctgccactgtttttgctgtgttcaccacatctctgatcctgaagtgaattctggaactatggaccacattagactgggcagagattcgcccaacccctagcactccggctctgggctttcggccagaagttaattaacctcagagccaggagcctggggctggggcctccctcccaggccctgtttagctgtttagctggttgtgttttaagcaagttcttgcccaatcatgcatcctgctagaaaaggaaatgaagcaacgttcccagccaccgcaggcagttgtcggcgactttctgatgtaagcacctgggctccgacttgaggggggcccttcaagacccaatgtccatttcccaatccttgtcatcggcagggcccagggatgtgacaatttttgctaatggaggagtcacttcttttttttttttttttcttttggagatggtctggctctgtcacccaggctggagtgcagtggtgcaatcatagctcaccacagcctcaaactaggggtcacttctaagggatgctgggggttgggcggaaggggtgaggaggtaggattgagtaacttgctgtcactgcttgtactttgtagacagcctgagagtggcaggaccttatgtgaatgggggggatggactgtgatcagtgccggggagtctctgaagctggggtccccacctccaggggcttctgctcagaggttacgtgtgcagtttgaagatgtacatcttgacctccggtttagaggcactttctgcccatcagattccaaactctaggggcgcagcaccttttctttgctcccaaacaccaaccaacaccccttcacaggaccagcactgttaggatggctaagtggatgttttatgttcccacgtccctgactctgtttcagaggttgtgtctgctctcccagcccctgaagccaaaatgacttcctgcagctttcatgagctcagcctcttccctggggtatgtgtgagggggaaagcctggttcaagtttagatttatttctagggagccctggtttcttcataccagaggctacccttagaactttggagtggggtatctttttttcatttgtttttttgatacagagtctcgctctattgcccaggctggagtgcggtggcacaatctcagcttactgcaacctccacctccagggttcaagcgattctcctgcctcagcctcccgagtagctggcattacaggcacctgccaccacacccggctaaattttgtatttttagtagagaaggggtttcaccatgttggtgaggcttgtctcaaactgacttcaagtgatccacttgcttcggcctcccaaagtgctgggattacaggcgtgagccatcacgcccagccgagggtatcttttataccaacaaattagatgactgaggtgtaatggacaaatcctatgcacaaagtgagggtatctgaatatgtgggcgggagtcaaaaatttttagctactttaacactaaagtcaaactaaagtagcttcaaaaagacttctcaagatgcagtatggcctgctgaggtttttttgtttttttttttttaagacagagagtcgctcgtcgcccaggccgcagtgcagtagcatgatctcagctcactgcaacctccacctcccgggttcaagcgattctcctgtctcagcctcctaagtagctgggactacaggcacctgccaccacgcccatctaagtttggcatttttagtagcgacggtttcaccttgttggccaggctggttttgttggccaattgtctctaaactgctgtcaaaaaaaggaatggatcagattgtcttgaatagggcagagctaacctgtaatcacctgtgtgatgagaaacagctttgactgcattttactcctgacctggcctaagctttctgtttacataagatttttcaagaattcaacttcaagtagcagccgagagagctgcctcaggattctctcaaaaactgggaataatatgggaacatttgtttcttctaaaaataaggcaaatgttacattgaatgatttggggggtgaggtttaattggaaatggtctctggggactgaaaactgatgtttttgcagattacctcagggaaacggaggtttgttgagtttacagacacattaaaccaaaggccgtgggaaaacccctcttccagctccaggggattggtcaggaccacccactaaccagtgccttccttcttaacattcacttttagcagcttgtgtttattttacatgggcagttttgatgggaaattgccatgaccacaggggtttggagttctgctttttttttttcttcttctttttcgggggactgggggactcctcccaagatcacattttagcatctttctctcctactccatttagaaaaataagtaacaggtgaaatgtggtctcagtgttaacgggataattctgctaccggctcctccctgatgattctgaaatacactactgaacgagctctggctggtcctttctatcctggatgtggttcttctgtgtagcaattccttgatgtccagtttggaaagatgtactcttctcaacaagaaaaacttaaatccgtcgtgcccaaatatagttgtgcttttatttccattag

SEQ ID NO: 306440 - DNA, 2742 bp, Homo sapiens
accaccgggccgggctggggagtctctgaagctggggtccccacctccaggggcttctgctcagaggttaacgtgtgcagtttgaagatgtacatcttgactccggtttaggaggcactttctgcccatcagattccaaactcttaggggcgcagcaccttttctttgctcccatacaccaacccctagcactccggctctgggctttcggccagaagttaattaacctcagagccaggagcctggggctggggcctccctcccaggccctgtttagctgtttagctggttgtgttttaagcaagttcttgcccaatcatgcatcctgctagaaaaggaaatgaagcaacgttcccagccaccgcaggcagttgtcggcgactttctgatgtaagcacctgggctccgacttgaggggggcccttcaagacccaatgtccatttcccaatccttgtcatcggcagggcccagggatgtgacaatttttgctaatggaggagtcacttcttttttttttttttttcttttggagatggtctggctctgtcacccaggctggagtgcagtggtgcaatcatagctcaccacagcctcaaactaggggtcacttctaagggatgctgggggttgggcggaaggggtgaggaggtaggattgagtaacttgctgtcactgcttgtactttgtagacagcctgagagtggcaggaccttatgtgaatgggggggatggactgtgatcagtgccggggagtctctgaagctggggtccccacctccaggggcttctgctcagaggttacgtgtgcagtttgaagatgtacatcttgacctccggtttagaggcactttctgcccatcagattccaaactctaggggcgcagcaccttttctttgctcccaaacaccaaccaacaccccttcacaggaccagcactgttaggatggctaagtggatgttttatgttcccacgtccctgactctgtttcagaggttgtgtctgctctcccagcccctgaagccaaaatgacttcctgcagctttcatgagctcagcctcttccctggggtatgtgtgagggggaaagcctggttcaagtttagatttatttctagggagccctggtttcttcataccagaggctacccttagaactttggagtggggtatctttttttcatttgtttttttgatacagagtctcgctctattgcccaggctggagtgcggtggcacaatctcagcttactgcaacctccacctccagggttcaagcgattctcctgcctcagcctcccgagtagctggcattacaggcacctgccaccacacccggctaaattttgtatttttagtagagaaggggtttcaccatgttggtgaggcttgtctcaaactgacttcaagtgatccacttgcttcggcctcccaaagtgctgggattacaggcgtgagccatcacgcccagccgagggtatcttttataccaacaaattagatgactgaggtgtaatggacaaatcctatgcacaaagtgagggtatctgaatatgtgggcgggagtcaaaaatttttagctactttaacactaaagtcaaactaaagtagcttcaaaaagacttctcaagatgcagtatggcctgctgaggtttttttgtttttttttttttaagacagagagtcgctcgtcgcccaggccgcagtgcagtagcatgatctcagctcactgcaacctccacctcccgggttcaagcgattctcctgtctcagcctcctaagtagctgggactacaggcacctgccaccacgcccatctaagtttggcatttttagtagcgacggtttcaccttgttggccaggctggttttgttggccaattgtctctaaactgctgtcaaaaaaaggaatggatcagattgtcttgaatagggcagagctaacctgtaatcacctgtgtgatgagaaacagctttgactgcattttactcctgacctggcctaagctttctgtttacataagatttttcaagaattcaacttcaagtagcagccgagagagctgcctcaggattctctcaaaaactgggaataatatgggaacatttgtttcttctaaaaataaggcaaatgttacattgaatgatttggggggtgaggtttaattggaaatggtctctggggactgaaaactgatgtttttgcagattacctcagggaaacggaggtttgttgagtttacagacacattaaaccaaaggccgtgggaaaacccctcttccagctccaggggattggtcaggaccacccactaaccagtgccttccttcttaacattcacttttagcagcttgtgtttattttacatgggcagttttgatgggaaattgccatgaccacaggggtttggagttctgctttttttttttcttcttctttttcgggggactgggggactcctcccaagatcacattttagcatctttctctcctactccatttagaaaaataagtaacaggtgaaatgtggtctcagtgttaacgggataattctgctaccggctcctccctgatgattctgaaatacactactgaacgagctctggctggtcctttctatcctggatgtggttcttctgtgtagcaattccttgatgtccagtttggaaagatgtactcttctcaacaagaaaaacttaaatccgtcgtgcccaaatatagttgtgcttttatttccattag

SEQ ID NO: 306441 - DNA, 2815 bp, Homo sapiens
agagctgggagacctgagagtccgcaaaaggttttgtaaggcttgttgagacacagtgcctggtttgagtgggctgatacctacctggcccaatcctggttgtggagccatgttcaaaggttgaccatgctgggccactgacatcatggctggccttggcatcccagactgtagttgctggggctgaggcaatcctccttggctccatgggtatgaacccacctcccatgaccagaggtcccagtgggcatttggagccagggatgggacctctgggctttcggccagaagttaattaacctcagagccaggagcctggggctggggcctccctcccaggccctgtttagctgtttagctggttgtgttttaagcaagttcttgcccaatcatgcatcctgctagaaaaggaaatgaagcaacgttcccagccaccgcaggcagttgtcggcgactttctgatgtaagcacctgggctccgacttgaggggggcccttcaagacccaatgtccatttcccaatccttgtcatcggcagggcccagggatgtgacaatttttgctaatggaggagtcacttcttttttttttttttttcttttggagatggtctggctctgtcacccaggctggagtgcagtggtgcaatcatagctcaccacagcctcaaactaggggtcacttctaagggatgctgggggttgggcggaaggggtgaggaggtaggattgagtaacttgctgtcactgcttgtactttgtagacagcctgagagtggcaggaccttatgtgaatgggggggatggactgtgatcagtgccggggagtctctgaagctggggtccccacctccaggggcttctgctcagaggttacgtgtgcagtttgaagatgtacatcttgacctccggtttagaggcactttctgcccatcagattccaaactctaggggcgcagcaccttttctttgctcccaaacaccaaccaacaccccttcacaggaccagcactgttaggatggctaagtggatgttttatgttcccacgtccctgactctgtttcagaggttgtgtctgctctcccagcccctgaagccaaaatgacttcctgcagctttcatgagctcagcctcttccctggggtatgtgtgagggggaaagcctggttcaagtttagatttatttctagggagccctggtttcttcataccagaggctacccttagaactttggagtggggtatctttttttcatttgtttttttgatacagagtctcgctctattgcccaggctggagtgcggtggcacaatctcagcttactgcaacctccacctccagggttcaagcgattctcctgcctcagcctcccgagtagctggcattacaggcacctgccaccacacccggctaaattttgtatttttagtagagaaggggtttcaccatgttggtgaggcttgtctcaaactgacttcaagtgatccacttgcttcggcctcccaaagtgctgggattacaggcgtgagccatcacgcccagccgagggtatcttttataccaacaaattagatgactgaggtgtaatggacaaatcctatgcacaaagtgagggtatctgaatatgtgggcgggagtcaaaaatttttagctactttaacactaaagtcaaactaaagtagcttcaaaaagacttctcaagatgcagtatggcctgctgaggtttttttgtttttttttttttaagacagagagtcgctcgtcgcccaggccgcagtgcagtagcatgatctcagctcactgcaacctccacctcccgggttcaagcgattctcctgtctcagcctcctaagtagctgggactacaggcacctgccaccacgcccatctaagtttggcatttttagtagcgacggtttcaccttgttggccaggctggttttgttggccaattgtctctaaactgctgtcaaaaaaaggaatggatcagattgtcttgaatagggcagagctaacctgtaatcacctgtgtgatgagaaacagctttgactgcattttactcctgacctggcctaagctttctgtttacataagatttttcaagaattcaacttcaagtagcagccgagagagctgcctcaggattctctcaaaaactgggaataatatgggaacatttgtttcttctaaaaataaggcaaatgttacattgaatgatttggggggtgaggtttaattggaaatggtctctggggactgaaaactgatgtttttgcagattacctcagggaaacggaggtttgttgagtttacagacacattaaaccaaaggccgtgggaaaacccctcttccagctccaggggattggtcaggaccacccactaaccagtgccttccttcttaacattcacttttagcagcttgtgtttattttacatgggcagttttgatgggaaattgccatgaccacaggggtttggagttctgctttttttttttcttcttctttttcgggggactgggggactcctcccaagatcacattttagcatctttctctcctactccatttagaaaaataagtaacaggtgaaatgtggtctcagtgttaacgggataattctgctaccggctcctccctgatgattctgaaatacactactgaacgagctctggctggtcctttctatcctggatgtggttcttctgtgtagcaattccttgatgtccagtttggaaagatgtactcttctcaacaagaaaaacttaaatccgtcgtgcccaaatatagttgtgcttttatttccattag

SEQ ID NO: 306442 - DNA, 2520 bp, Homo sapiens
ccacgaccctgccactgtttttgctgtgttcaccacatctctgatcctgaagtgaattctggaactatggaccacattagactgggcagagattcgcccaacccctagcactccggctctgggctttcggccagaagttaattaacctcagagccaggagcctggggctggggcctccctcccaggccctgtttagctgtttagctggttgtgttttaagcaagttcttgcccaatcatgcatcctgctagaaaaggaaatgaagcaacgttcccagccaccgcaggcagttgtcggcgactttctgatgtaagcacctgggctccgacttgaggggggcccttcaagacccaatgtccatttcccaatccttgtcatcggcagggcccagggatgtgacaatttttgctaatggaggagtcacttcttttttttttttttttcttttggagatggtctggctctgtcacccaggctggagtgcagtggtgcaatcatagctcaccacagcctcaaactaggggtcacttctaagggatgctgggggttgggcggaaggggtgaggaggtaggattgagtaacttgctgtcactgcttgtactttgtagacagcctgagagtggcaggaccttatgtgaatgggggggatggactgtgatcagtgccggggagtctctgaagctggggtccccacctccaggggcttctgctcagaggttacgtgtgcagtttgaagatgtacatcttgacctccggtttagaggcactttctgcccatcagattccaaactctaggggcgcagcaccttttctttgctcccaaacaccaaccaacaccccttcacaggaccagcactgttaggatggctaagtggatgttttatgttcccacgtccctgactctgtttcagaggttgtgtctgctctcccagcccctgaagccaaaatgacttcctgcagctttcatgagctcagcctcttccctggggtatgtgtgagggggaaagcctggttcaagtttagatttatttctagggagccctggtttcttcataccagaggctacccttagaactttggagtggggtatctttttttcatttgtttttttgatacagagtctcgctctattgcccaggctggagtgcggtggcacaatctcagcttactgcaacctccacctccagggttcaagcgattctcctgcctcagcctcccgagtagctggcattacaggcacctgccaccacacccggctaaattttgtatttttagtagagaaggggtttcaccatgttggtgaggcttgtctcaaactgacttcaagtgatccacttgcttcggcctcccaaagtgctgggattacaggcgtgagccatcacgcccagccgagggtatcttttataccaacaaattagatgactgaggtgtaatggacaaatcctatgcacaaagtgagggtatctgaatatgtgggcgggagtcaaaaatttttagctactttaacactaaagtcaaactaaagtagcttcaaaaagacttctcaagatgcagtatggcctgctgaggtttttttgtttttttttttttaagacagagagtcgctcgtcgcccaggccgcagtgcagtagcatgatctcagctcactgcaacctccacctcccgggttcaagcgattctcctgtctcagcctcctaagtagctgggactacaggcacctgccaccacgcccatctaagtttggcatttttagtagcgacggtttcaccttgttggccaggctggttttgttggccaattgtctctaaactgctgtcaaaaaaaggaatggatcagattgtcttgaatagggcagagctaacctgtaatcacctgtgtgatgagaaacagctttgactgcattttactcctgacctggcctaagctttctgtttacataagatttttcaagaattcaacttcaagtagcagccgagagagctgcctcaggattctctcaaaaactgggaataatatgggaacatttgtttcttctaaaaataaggcaaatgttacattgaatgatttggggggtgaggtttaattggaaatggtctctggggactgaaaactgatgtttttgcagattacctcagggaaacggaggtttgttgagtttacagacacattaaaccaaaggccgtgggaaaacccctcttccagctccaggggattggtcaggaccacccactaaccagtgccttccttcttaacattcacttttagcagcttgtgtttattttacatgggcagttttgatgggaaattgccatgaccacaggggtttggagttctgctttttttttttcttcttctttttcgggggactgggggactcctcccaagatcacattttagcatctttctctcctactccatttagaaaaataagtaacaggtgaaatgtggtctcagtgttaacgggataattctgctaccggctcctccctgatgattctgaaatacactactgaacgagc

SEQ ID NO: 306443 - DNA, 1107 bp, Homo sapiens
ctggctccatgatgaccaggcgggtcttgaactcctgagctcaggtgatccacccggctctgcctcccgaagtgctagaccactctcagctcactgcaacctccacctcccgggttcaagcgattctcctgtctcagcctcctaagtagctgggactacaggcacctgccaccacgcccatctaagtttggcatttttagtagcgacggtttcaccttgttggccaggctggttttgttggccaattgtctctaaactgctgtcaaaaaaaggaatggatcagattgtcttgaatagggcagagctaacctgtaatcacctgtgtgatgagaaacagctttgactgcattttactcctgacctggcctaagctttctgtttacataagatttttcaagaattcaacttcaagtagcagccgagagagctgcctcaggattctctcaaaaactgggaataatatgggaacatttgtttcttctaaaaataaggcaaatgttacattgaatgatttggggggtgaggtttaattggaaatggtctctggggactgaaaactgatgtttttgcagattacctcagggaaacggaggtttgttgagtttacagacacattaaaccaaaggccgtgggaaaacccctcttccagctccaggggattggtcaggaccacccactaaccagtgccttccttcttaacattcacttttagcagcttgtgtttattttacatgggcagttttgatgggaaattgccatgaccacaggggtttggagttctgctttttttttttcttcttctttttcgggggactgggggactcctcccaagatcacattttagcatctttctctcctactccatttagaaaaataagtaacaggtgaaatgtggtctcagtgttaacgggataattctgctaccggctcctccctgatgattctgaaatacactactgaacgagctctggctggtcctttctatcctggatgtggttcttctgtgtagcaattccttgatgtccagtttggaaagatgtactcttctcaacaagaaaaacttaaatccgtcgtgcccaaatatagttgtgcttttatttccattag

SEQ ID NO: 306444 - DNA, 1528 bp, Homo sapiens
ccacgaccctgccactgtttttgctgtgttcaccacatctctgatcctgaagtgaattctggaactatggaccacattagactgggcagagattcgcccaacccctagcactccggctctgggctttcggccagaagttaattaacctcagagccaggagcctggggctggggcctccctcccaggccctgtttagctgtttagctggttgtgttttaagcaagttcttgcccaatcatgcatcctgctagaaaaggaaatgaagcaacgttcccagccaccgcaggcagttgtcggcgactttctgatgtaagcacctgggctccgacttgaggggggcccttcaagacccaatgtccatttcccaatccttgtcatcggcagggcccagggatgtgacaatttttgctaatggaggagtcacttcttttttttttttttttcttttggagatggtctggctctgtcacccaggctggagtgcagtggtgcaatcatagctcaccacagcctcaaactaggggtcacttctaagggatgctgggggttgggcggaaggggtgaggaggtaggattgagtaacttgctgccaccacgcccatctaagtttggcatttttagtagcgacggtttcaccttgttggccaggctggttttgttggccaattgtctctaaactgctgtcaaaaaaaggaatggatcagattgtcttgaatagggcagagctaacctgtaatcacctgtgtgatgagaaacagctttgactgcattttactcctgacctggcctaagctttctgtttacataagatttttcaagaattcaacttcaagtagcagccgagagagctgcctcaggattctctcaaaaactgggaataatatgggaacatttgtttcttctaaaaataaggcaaatgttacattgaatgatttggggggtgaggtttaattggaaatggtctctggggactgaaaactgatgtttttgcagattacctcagggaaacggaggtttgttgagtttacagacacattaaaccaaaggccgtgggaaaacccctcttccagctccaggggattggtcaggaccacccactaaccagtgccttccttcttaacattcacttttagcagcttgtgtttattttacatgggcagttttgatgggaaattgccatgaccacaggggtttggagttctgctttttttttttcttcttctttttcgggggactgggggactcctcccaagatcacattttagcatctttctctcctactccatttagaaaaataagtaacaggtgaaatgtggtctcagtgttaacgggataattctgctaccggctcctccctgatgattctgaaatacactactgaacgagctctggctggtcctttctatcctggatgtggttcttctgtgtagcaattccttgatgtccagtttggaaagatgtactcttctcaacaagaaaaacttaaatccgtcgtgcccaaatatagttgtgcttttatttccattag

SEQ ID NO: 306445 - DNA, 489 bp, Homo sapiens
tcagcatttctttatcgtgaacaccagtttccaaagaaggaggatcgttctgcagtgtcagcattaaaaccttcattggcggatatttatgataaggagccgcccctgtagccaattcaattgctgtaattccaaaactcaggtctccccgagtgaaagaatcaatatcaaattctgagctctttccaacaactgatcctgtgggtactttgctccaagttccagaacagatctctgctcatctacctcagccagctgggcagattgctacacagccaactcaagtctctctcccacccaccgcagagccagcaaaaacagctcaggtaaagccggggatatggtttcatggtcactcctttggatagatgaaaagagcagatattaacgtggaatataacctaatgtaatcaggttaatgtcttggtagattttgaaacaagttagaaattctgtcttcacatttttaagcatgtacaggtaagagaa

SEQ ID NO: 306446 - DNA, 432 bp, Homo sapiens
actagtcacggttggctactaagtccacggtggctactagtccacggttggctactagtccacggttggcttgtgcagtgatactgagaaaatacatgaacagaaactgcccaggtggaacagcacgtaacctagtgagtgactgtactcctttctaggaatgctgattcagagtgcacctctttgactaggtcccaggatccccttgtccctggagtagggactaactatagcacaaagtaatatgtgccaatgctatttgtgaaatgtttggtctttctaaacgactaaaggatttgttgggtttttgcttaagttttgaaccaaatcctagagccaagcggggactagtgatagtccacggttgggtagtcgttattttctcttttctttttttttttttttttttttttttttttttttttttttttt

SEQ ID NO: 306447 - DNA, 4568 bp, Homo sapiens
agcggggaggaagaggggaaagtttggcccgtgcgtggggctggggtggagggcgggacagaggggctggggtggagggcgggacagaggggctgggcccaggcaaagcttctgtcgctgctgctgcggaggccgaggacaggacgtgggctgggccgggcagtgccggactcggaggagcaggaggcgaggtccgccggagctctgagcccccgctgctctgccgcgcggtgaccccgcgccccggcgccgtccgacccgtggctgttccgagacgattggtgggggcgcggcggcggcggcggcggctgttgggggtggggagacgcgcggcgaggagacgagcgaggtcagcgagtttgagggaggaccgcgagccgctgccgccgtcatgtccgaggactcgagcgccctgccctggtccatcaacagggacgattacgagctgcaggaggtgatcgggagtggagcaactgctgtagtccaagcagcttattgtgcccctaaaaaggagaaagtggcaatcaaacggataaaccttgagaaatgtcaaactagcatggatgaactcctgaaagaaattcaagccatgagtcaatgccatcatcctaatattgtatcttactacacatcttttgtggtaaaagatgagctgtggcttgtcatgaagctgctaagtggaggttctgttctggatattattaagcacattgtggcaaaaggggaacacaaaagtggagtcctagatgaatctaccattgctacgatactccgagaagtactggaagggctggaatatctgcataaaaatggacagatccacagagatgtgaaagctggaaacattcttcttggagaagatggctcagtacagattgcagactttggggttagtgcttttttagcaactggtggtgatattacccgaaataaagtgagaaagacctttgttggcaccccttgttggatggcacctgaagttatggaacaggtccgtggttatgatttcaaagctgatatttggagttttggaattacagcaattgaattggctacaggggcggctccttatcataaatatccaccaatgaaggttttaatgctgacactgcagaacgatcctccttctttggaaactggtgttcaagataaagaaatgctgaaaaaatatggaaaatcatttagaaaaatgatttcattgtgccttcaaaaagatccagaaaaaagaccaacagcagcagaactattaaggcacaaatttttccagaaagcaaagaataaagaatttcttcaagaaaaaacattgcagagagcaccaaccatttctgaaagagcaaaaaaggttcggagagtaccaggttccagtgggcgtcttcataagacagaggatggaggctgggagtggagtgatgatgaatttgatgaagaaagtgaggaagggaaagcagcaatttcacaactcaggtctccccgagtgaaagaatcaatatcaaattctgagctctttccaacaactgatcctgtgggtactttgctccaagttccagaacagatctctgctcatctacctcagccagctgggcagattgctacacagccaactcaagtctctctcccacccaccgcagagccagcaaaaacagctcaggctttgtcttcaggatcaggttcacaagaaaccaagatcccaatcagtctagtactaagattaaggaattccaaaaaagaactaaatgatattcgatttgaatttactcctgggagagatacagcagagggtgtctctcaggaactcatttctgctggcctggtcgacggaagggatttagtaatagtggcagctaatttgcagaaaattgtggaagaacctcagtcaaatcgatctgtcactttcaaactggcatctggtgtcgaaggctcagatattcctgatgatggtaaactgataggatttgcccagctcagcatcagctaaaccacaaccctggaagaggcggcctaaggagattccacacatgcgtatctctgttgcttctattggcctaaacccactactgccaaagaacccagcaacaaacctcccggctaggagctttagaagtctttatgttcttcctgccatcattcctccttttcccacagggaaagaaaagttggatcactagtggccagcatccccagagttccgttagtaaacttacttcatatgtcccctgtcttcctccatctgagaagtggcccatgtgcttcaaggcccaggagggagatctgtcagctcattcttgccttactccaatgatggcccaggtggaaaagtagcagctgtatcgggcttcctcatcctgcctgttcccccacacctgccaggatatggacatcttgggatatctctttaccactgaagtagaattgattgttcagctggagcccagagaatttaatttaatgttttttctttgtacctgatgtgaattctagcaacctttgttaggaaaaagcacagcctcagatggaggcagcctaaactgtgttcttgttttgttcatggtgtttctaagcgttttgctgaagctgctctcaggcacccccttcttcattgctctctccagaaagggttgctagccttaacttcagctggtgcaaaacatctgactgtagccgaacttcagccatcagatccttcaaagtggaactttggattgtttttacagacaacatcgagtaatggcttgtaaatgtgaattttgccagaggtggtttttgaacaggaaaatcataattcatatcattggagaagtatttattttcaaatatcaaattgaagaaaaactcaatcctcccatgaaaatcagttcgcctggcctccaagtcgtgaggaaatgggtatgcaaggctgagatttctacagcaataaaggagacacacactgggccagagaggcctgccttctgcctgctctcctgcactgaccctttggagggggtctctgtgtgctgaagctaactcaagatggaaagtgaaaccacatgtgccgtgacctttaggttttatgagtagacagtgttcatttgattttctacagaaataatataaattattctttaggtttaaaaaagagcactcataatgcaatatgtgaataatcagtgaggttgatttttcttttttcctaccgtttcatagtctttgtctaactgctagtaaccctaccgagttttatatatgagtgggatactcaatctggccttaaaaagatacacaaagatgggctgtgggtccctggaaagggggagagttgccctttacagaatcactcgagccctttccagcactgttggtctgatgaacaaggttgttttaccttattttctcttggaacatatctgaaaaccttccccacaaataacttgtcacaccttttgtttcattctgagtctttagttttagtcatgggctttcttcacctgctctaggtgcaaaggcatgttgggaaagagatggatgttggggaggaagagaggagatggatttcagttgggagttaggaggagagtaggtgagatgatcagacaccggagttcaacgtcccagcagtcttggtaaaaggagggagcctgctgagccaggagggagaaaagaagattgaccagcttgctagaaaaatacttagcttttctttttctttttttgtggaggggggacggagaggaacaaggatggggaggtaggaatgaggtatagaaaagagatagcatcttctttggcacaagactagtggcttaccgcttaccttagagttttgttttttttttttcaaacccatcaaaatctacttatttatgaatccaaggggtggcagcatcactctgttctagcattctttgtggagatggtctggtgcctagctgggagtgagcagcagcccatcccctgttcactttctctagcccatcattacctgtgaactgcagtggggcagtcatggcaaatagaattgggctggggtttctccttcttttcagttcattgtttgccctgctaggaattagaagacagacaccatgtcccaggacagtgttacttcttctgcatgatgtgtggtagactccctttgctggcttgtgcagtgatactgagaaaatacatgaacagaaactgcccaggtggaacagcacgtaacctagtgagtgactgtactcctttctaggaatgctgattcagagtgcacctctttgactaggtcccaggatccccttgtccctggagtagggactaactatagcacaaagtaatatgtgccaatgctatttgtgaaatgtttggtctttctaaacgactaaaggatttgttgggtttttgcttaagttttgaaccaaatcctagagccagctgataatatttaataatctggaggagagaataatgatgtaccaataagtggagattcctccttatgatgtatgctaggttatggaagatgtaaaatattcaactttttcctcctttttttggactttgtattttactgcatgttttcttcatttttaatcaataaagagtaaattgtc

SEQ ID NO: 306448 - DNA, 4551 bp, Homo sapiens
agaaaaacaatttttactattggggtcagtgtgcgctgtatattagtacatgctgggttggtcgtaactgagttgcttggcgtcgaatattcttctgtcgctgctgctgcggaggccgaggacaggacgtgggctgggccgggcagtgccggactcggaggagcaggaggcgaggtccgccggagctctgagcccccgctgctctgccgcgcggtgaccccgcgccccggcgccgtccgacccgtggctgttccgagacgattggtgggggcgcggcggcggcggcggcggctgttgggggtggggagacgcgcggcgaggagacgagcgaggtcagcgagtttgagggaggaccgcgagccgctgccgccgtcatgtccgaggactcgagcgccctgccctggtccatcaacagggacgattacgagctgcaggaggtgatcgggagtggagcaactgctgtagtccaagcagcttattgtgcccctaaaaaggagaaagtggcaatcaaacggataaaccttgagaaatgtcaaactagcatggatgaactcctgaaagaaattcaagccatgagtcaatgccatcatcctaatattgtatcttactacacatcttttgtggtaaaagatgagctgtggcttgtcatgaagctgctaagtggaggttctgttctggatattattaagcacattgtggcaaaaggggaacacaaaagtggagtcctagatgaatctaccattgctacgatactccgagaagtactggaagggctggaatatctgcataaaaatggacagatccacagagatgtgaaagctggaaacattcttcttggagaagatggctcagtacagattgcagactttggggttagtgcttttttagcaactggtggtgatattacccgaaataaagtgagaaagacctttgttggcaccccttgttggatggcacctgaagttatggaacaggtccgtggttatgatttcaaagctgatatttggagttttggaattacagcaattgaattggctacaggggcggctccttatcataaatatccaccaatgaaggttttaatgctgacactgcagaacgatcctccttctttggaaactggtgttcaagataaagaaatgctgaaaaaatatggaaaatcatttagaaaaatgatttcattgtgccttcaaaaagatccagaaaaaagaccaacagcagcagaactattaaggcacaaatttttccagaaagcaaagaataaagaatttcttcaagaaaaaacattgcagagagcaccaaccatttctgaaagagcaaaaaaggttcggagagtaccaggttccagtgggcgtcttcataagacagaggatggaggctgggagtggagtgatgatgaatttgatgaagaaagtgaggaagggaaagcagcaatttcacaactcaggtctccccgagtgaaagaatcaatatcaaattctgagctctttccaacaactgatcctgtgggtactttgctccaagttccagaacagatctctgctcatctacctcagccagctgggcagattgctacacagccaactcaagtctctctcccacccaccgcagagccagcaaaaacagctcaggctttgtcttcaggatcaggttcacaagaaaccaagatcccaatcagtctagtactaagattaaggaattccaaaaaagaactaaatgatattcgatttgaatttactcctgggagagatacagcagagggtgtctctcaggaactcatttctgctggcctggtcgacggaagggatttagtaatagtggcagctaatttgcagaaaattgtggaagaacctcagtcaaatcgatctgtcactttcaaactggcatctggtgtcgaaggctcagatattcctgatgatggtaaactgataggatttgcccagctcagcatcagctaaaccacaaccctggaagaggcggcctaaggagattccacacatgcgtatctctgttgcttctattggcctaaacccactactgccaaagaacccagcaacaaacctcccggctaggagctttagaagtctttatgttcttcctgccatcattcctccttttcccacagggaaagaaaagttggatcactagtggccagcatccccagagttccgttagtaaacttacttcatatgtcccctgtcttcctccatctgagaagtggcccatgtgcttcaaggcccaggagggagatctgtcagctcattcttgccttactccaatgatggcccaggtggaaaagtagcagctgtatcgggcttcctcatcctgcctgttcccccacacctgccaggatatggacatcttgggatatctctttaccactgaagtagaattgattgttcagctggagcccagagaatttaatttaatgttttttctttgtacctgatgtgaattctagcaacctttgttaggaaaaagcacagcctcagatggaggcagcctaaactgtgttcttgttttgttcatggtgtttctaagcgttttgctgaagctgctctcaggcacccccttcttcattgctctctccagaaagggttgctagccttaacttcagctggtgcaaaacatctgactgtagccgaacttcagccatcagatccttcaaagtggaactttggattgtttttacagacaacatcgagtaatggcttgtaaatgtgaattttgccagaggtggtttttgaacaggaaaatcataattcatatcattggagaagtatttattttcaaatatcaaattgaagaaaaactcaatcctcccatgaaaatcagttcgcctggcctccaagtcgtgaggaaatgggtatgcaaggctgagatttctacagcaataaaggagacacacactgggccagagaggcctgccttctgcctgctctcctgcactgaccctttggagggggtctctgtgtgctgaagctaactcaagatggaaagtgaaaccacatgtgccgtgacctttaggttttatgagtagacagtgttcatttgattttctacagaaataatataaattattctttaggtttaaaaaagagcactcataatgcaatatgtgaataatcagtgaggttgatttttcttttttcctaccgtttcatagtctttgtctaactgctagtaaccctaccgagttttatatatgagtgggatactcaatctggccttaaaaagatacacaaagatgggctgtgggtccctggaaagggggagagttgccctttacagaatcactcgagccctttccagcactgttggtctgatgaacaaggttgttttaccttattttctcttggaacatatctgaaaaccttccccacaaataacttgtcacaccttttgtttcattctgagtctttagttttagtcatgggctttcttcacctgctctaggtgcaaaggcatgttgggaaagagatggatgttggggaggaagagaggagatggatttcagttgggagttaggaggagagtaggtgagatgatcagacaccggagttcaacgtcccagcagtcttggtaaaaggagggagcctgctgagccaggagggagaaaagaagattgaccagcttgctagaaaaatacttagcttttctttttctttttttgtggaggggggacggagaggaacaaggatggggaggtaggaatgaggtatagaaaagagatagcatcttctttggcacaagactagtggcttaccgcttaccttagagttttgttttttttttttcaaacccatcaaaatctacttatttatgaatccaaggggtggcagcatcactctgttctagcattctttgtggagatggtctggtgcctagctgggagtgagcagcagcccatcccctgttcactttctctagcccatcattacctgtgaactgcagtggggcagtcatggcaaatagaattgggctggggtttctccttcttttcagttcattgtttgccctgctaggaattagaagacagacaccatgtcccaggacagtgttacttcttctgcatgatgtgtggtagactccctttgctggcttgtgcagtgatactgagaaaatacatgaacagaaactgcccaggtggaacagcacgtaacctagtgagtgactgtactcctttctaggaatgctgattcagagtgcacctctttgactaggtcccaggatccccttgtccctggagtagggactaactatagcacaaagtaatatgtgccaatgctatttgtgaaatgtttggtctttctaaacgactaaaggatttgttgggtttttgcttaagttttgaaccaaatcctagagccagctgataatatttaataatctggaggagagaataatgatgtaccaataagtggagattcctccttatgatgtatgctaggttatggaagatgtaaaatattcaactttttcctcctttttttggactttgtattttactgcatgttttcttcatttttaatcaataaagagtaaattgtc

SEQ ID NO: 306449 - DNA, 4603 bp, Homo sapiens
agcggggaggaagaggggaaagtttggcccgtgcgtggggctggggtggagggcgggacagaggggctggggtggagggcgggacagaggggctgggcccaggcaaagcttctgtcgctgctgctgcggaggccgaggacaggacgtgggctgggccgggcagtgccggactcggaggagcaggaggcgaggtccgccggagctctgagcccccgctgctctgccgcgcggtgaccccgcgccccggcgccgtccgacccgtggctgttccgagacgattggtgggggcgcggcggcggcggcggcggctgttgggggtggggagacgcgcggcgaggagacgagcgaggtcagcgagtttgagggaggaccgcgagccgctgccgccgtcatgtccgaggactcgagcgccctgccctggtccatcaacagggacgattacgagctgcaggaggtgatcgggagtggagcaactgctgtagtccaagcagcttattgtgcccctaaaaaggagaaagtggcaatcaaacggataaaccttgagaaatgtcaaactagcatggatgaactcctgaaagaaattcaagccatgagtcaatgccatcatcctaatattgtatcttactacacatcttttgtggtaaaagatgagctgtggcttgtcatgaagctgctaagtggaggttctgttctggatattattaagcacattgtggcaaaaggggaacacaaaagtggagtcctagatgaatctaccattgctacgatactccgagaagtactggaagggctggaatatctgcataaaaatggacagatccacagagatgtgaaagctggaaacattcttcttggagaagatggctcagtacagattgcagactttggggttagtgcttttttagcaactggtggtgatattacccgaaataaagtgagaaagacctttgttggcaccccttgttggatggcacctgaagttatggaacaggtccgtggttatgatttcaaagctgatatttggagttttggaattacagcaattgaattggctacaggggcggctccttatcataaatatccaccaatgaaggttttaatgctgacactgcagaacgatcctccttctttggaaactggtgttcaagataaagaaatgctgaaaaaatatggaaaatcatttagaaaaatgatttcattgtgccttcaaaaagatccagaaaaaagaccaacagcagcagaactattaaggcacaaatttttccagaaagcaaagaataaagaatttcttcaagaaaaaacattgcagagagcaccaaccatttctgaaagagcaaaaaaggttcggagagtaccaggttccagtgggcgtcttcataagacagaggatggaggctgggagtggagtgatgatgaatttgatgaagaaagtgaggaagggaaagcagcaatttcacaactcaggtctccccgagtgaaagaatcaatatcaaattctgagctctttccaacaactgatcctgtgggtactttgctccaagttccagaacagatctctgctcatctacctcagccagctgggcagattgctacacagccaactcaagtctctctcccacccaccgcagagccagcaaaaacagctcaggctttgtcttcaggatcaggttcacaagaaaccaagatcccaatcagtctagtactaagattaaggaattccaaaaaagaactaaatgatattcgatttgaatttactcctgggagagatacagcagagggtgtctctcaggaactcatttctgctggcctggtcgacggaagggatttagtaatagtggcagctaatttgcagaaaattgtggaagaacctcagtcaaatcgatctgtcactttcaaactggcatctggtgtcgaaggctcagatattcctgatgatggtaaactgataggatttgcccagctcagcatcagctaaaccacaaccctggaagaggcggcctaaggagattccacacatgcgtatctctgttgcttctattggcctaaacccactactgccaaagaacccagcaacaaacctcccggctaggagctttagaagtctttatgttcttcctgccatcattcctccttttcccacagggaaagaaaagttggatcactagtggccagcatccccagagttccgttagtaaacttacttcatatgtcccctgtcttcctccatctgagaagtggcccatgtgcttcaaggcccaggagggagatctgtcagctcattcttgccttactccaatgatggcccaggtggaaaagtagcagctgtatcgggcttcctcatcctgcctgttcccccacacctgccaggatatggacatcttgggatatctctttaccactgaagtagaattgattgttcagctggagcccagagaatttaatttaatgttttttctttgtacctgatgtgaattctagcaacctttgttaggaaaaagcacagcctcagatggaggcagcctaaactgtgttcttgttttgttcatggtgtttctaagcgttttgctgaagctgctctcaggcacccccttcttcattgctctctccagaaagggttgctagccttaacttcagctggtgcaaaacatctgactgtagccgaacttcagccatcagatccttcaaagtggaactttggattgtttttacagacaacatcgagtaatggcttgtaaatgtgaattttgccagaggtggtttttgaacaggaaaatcataattcatatcattggagaagtatttattttcaaatatcaaattgaagaaaaactcaatcctcccatgaaaatcagttcgcctggcctccaagtcgtgaggaaatgggtatgcaaggctgagatttctacagcaataaaggagacacacactgggccagagaggcctgccttctgcctgctctcctgcactgaccctttggagggggtctctgtgtgctgaagctaactcaagatggaaagtgaaaccacatgtgccgtgacctttaggttttatgagtagacagtgttcatttgattttctacagaaataatataaattattctttaggtttaaaaaagagcactcataatgcaatatgtgaataatcagtgaggttgatttttcttttttcctaccgtttcatagtctttgtctaactgctagtaaccctaccgagttttatatatgagtgggatactcaatctggccttaaaaagatacacaaagatgggctgtgggtccctggaaagggggagagttgccctttacagaatcactcgagccctttccagcactgttggtctgatgaacaaggttgttttaccttattttctcttggaacatatctgaaaaccttccccacaaataacttgtcacaccttttgtttcattctgagtctttagttttagtcatgggctttcttcacctgctctaggtgcaaaggcatgttgggaaagagatggatgttggggaggaagagaggagatggatttcagttgggagttaggaggagagtaggtgagatgatcagacaccggagttcaacgtcccagcagtcttggtaaaaggagggagcctgctgagccaggagggagaaaagaagattgaccagcttgctagaaaaatacttagcttttctttttctttttttgtggaggggggacggagaggaacaaggatggggaggtaggaatgaggtatagaaaagagatagcatcttctttggcacaagactagtggcttaccgcttaccttagagttttgttttttttttttcaaacccatcaaaatctacttatttatgaatccaaggggtggcagcatcactctgttctagcattctttgtggagatggtctggtgcctagctgggagtgagcagcagcccatcccctgttcactttctctagcccatcattacctgtgaactgcagtggggcagtcatggcaaatagaattgggctggggtttctccttcttttcagttcattgtttgccctgctaggaattagaagacagacaccatgtcccaggacagtgttacttcttctgcatgatgtgtggtagactccctttgctggcttgtgcagtgatactgagaaaatacatgaacagaaactgcccaggtggaacagcacgtaacctagtgagtgactgtactcctttctaggaatgctgattcagagtgcacctctttgactaggtcccaggatccccttgtccctggagtagggactaactatagcacaaagtaatatgtgccaatgctatttgtgaaatgtttggtctttctaaacgactaaaggatttgttgggtttttgcttaagttttgaaccaaatcctagagccagctgataatatttaataatctggaggagagaataatgatgtaccaataagtggagattcctccttatgatgtatgctaggttatggaagatgtaaaatattcaactttttcctcctttttttggactttgtattttactgcatgttttcttcatttttaatcaataaagagtaaattgtcaaaaaaaaaaacaaaccaaaacaaaaaaaaattgt

SEQ ID NO: 306450 - DNA, 3904 bp, Homo sapiens
ttcaatggtattaaatgcgttcatcacgttgtgcagttgtcaccaccatctgtatccaaactcttcattttaaaactggaactctatacccattaaatagtaattcttgattcccattcttagccccttggcaatcactttttgtctctatgattttgactactctcaatacctcatataagtagaatcacacagtgtttatctttgcatggctagcgtaatgtccccaagtttcatccatgttgtagcatgttgaagaattttcttgctttttaaggctgaataatatccattgcgtgtgtgtgttgagaagctaaccatctacagcagattatttacgtgaaatacacgtaataactctgggttttaaacaactgattcagatatgaacttacagaaaataaaatgtttgtatgttggtcggggggtgcctgtattgaaaaatcttgaccacaatagttaaactttactgagtcatcacaagtttatagtatattgaaaattcttgcaggttttaatgctgacactgcagaacgatcctccttctttggaaactggtgttcaagataaagaaatgaataaagaatttcttcaagaaaaaacattgcagagagcaccaaccatttctgaaagagcaaaaaaggttcggagagtaccaggttccagtgggcgtcttcataagacagaggatggaggctgggagtggagtgatgatgaatttgatgaagaaagtgaggaagggaaagcagcaatttcacaactcaggtctccccgagtgaaagaatcaatatcaaattctgagctctttccaacaactgatcctgtgggtactttgctccaagttccagaacagatctctgctcatctacctcagccagctgggcagattgctacacagccaactcaagtctctctcccacccaccgcagagccagcaaaaacagctcaggctttgtcttcaggatcaggttcacaagaaaccaagatcccaatcagtctagtactaagattaaggaattccaaaaaagaactaaatgatattcgatttgaatttactcctgggagagatacagcagagggtgtctctcaggaactcatttctgctggcctggtcgacggaagggatttagtaatagtggcagctaatttgcagaaaattgtggaagaacctcagtcaaatcgatctgtcactttcaaactggcatctggtgtcgaaggctcagatattcctgatgatggtaaactgataggatttgcccagctcagcatcagctaaaccacaaccctggaagaggcggcctaaggagattccacacatgcgtatctctgttgcttctattggcctaaacccactactgccaaagaacccagcaacaaacctcccggctaggagctttagaagtctttatgttcttcctgccatcattcctccttttcccacagggaaagaaaagttggatcactagtggccagcatccccagagttccgttagtaaacttacttcatatgtcccctgtcttcctccatctgagaagtggcccatgtgcttcaaggcccaggagggagatctgtcagctcattcttgccttactccaatgatggcccaggtggaaaagtagcagctgtatcgggcttcctcatcctgcctgttcccccacacctgccaggatatggacatcttgggatatctctttaccactgaagtagaattgattgttcagctggagcccagagaatttaatttaatgttttttctttgtacctgatgtgaattctagcaacctttgttaggaaaaagcacagcctcagatggaggcagcctaaactgtgttcttgttttgttcatggtgtttctaagcgttttgctgaagctgctctcaggcacccccttcttcattgctctctccagaaagggttgctagccttaacttcagctggtgcaaaacatctgactgtagccgaacttcagccatcagatccttcaaagtggaactttggattgtttttacagacaacatcgagtaatggcttgtaaatgtgaattttgccagaggtggtttttgaacaggaaaatcataattcatatcattggagaagtatttattttcaaatatcaaattgaagaaaaactcaatcctcccatgaaaatcagttcgcctggcctccaagtcgtgaggaaatgggtatgcaaggctgagatttctacagcaataaaggagacacacactgggccagagaggcctgccttctgcctgctctcctgcactgaccctttggagggggtctctgtgtgctgaagctaactcaagatggaaagtgaaaccacatgtgccgtgacctttaggttttatgagtagacagtgttcatttgattttctacagaaataatataaattattctttaggtttaaaaaagagcactcataatgcaatatgtgaataatcagtgaggttgatttttcttttttcctaccgtttcatagtctttgtctaactgctagtaaccctaccgagttttatatatgagtgggatactcaatctggccttaaaaagatacacaaagatgggctgtgggtccctggaaagggggagagttgccctttacagaatcactcgagccctttccagcactgttggtctgatgaacaaggttgttttaccttattttctcttggaacatatctgaaaaccttccccacaaataacttgtcacaccttttgtttcattctgagtctttagttttagtcatgggctttcttcacctgctctaggtgcaaaggcatgttgggaaagagatggatgttggggaggaagagaggagatggatttcagttgggagttaggaggagagtaggtgagatgatcagacaccggagttcaacgtcccagcagtcttggtaaaaggagggagcctgctgagccaggagggagaaaagaagattgaccagcttgctagaaaaatacttagcttttctttttctttttttgtggaggggggacggagaggaacaaggatggggaggtaggaatgaggtatagaaaagagatagcatcttctttggcacaagactagtggcttaccgcttaccttagagttttgttttttttttttcaaacccatcaaaatctacttatttatgaatccaaggggtggcagcatcactctgttctagcattctttgtggagatggtctggtgcctagctgggagtgagcagcagcccatcccctgttcactttctctagcccatcattacctgtgaactgcagtggggcagtcatggcaaatagaattgggctggggtttctccttcttttcagttcattgtttgccctgctaggaattagaagacagacaccatgtcccaggacagtgttacttcttctgcatgatgtgtggtagactccctttgctggcttgtgcagtgatactgagaaaatacatgaacagaaactgcccaggtggaacagcacgtaacctagtgagtgactgtactcctttctaggaatgctgattcagagtgcacctctttgactaggtcccaggatccccttgtccctggagtagggactaactatagcacaaagtaatatgtgccaatgctatttgtgaaatgtttggtctttctaaacgactaaaggatttgttgggtttttgcttaagttttgaaccaaatcctagagccagctgataatatttaataatctggaggagagaataatgatgtaccaataagtggagattcctccttatgatgtatgctaggttatggaagatgtaaaatattcaactttttcctcctttttttggactttgtattttactgcatgttttcttcatttttaatcaataaagagtaaattgtcaaaaaaaaaaacaaaccaaaacaaaaaaaaattgt

SEQ ID NO: 306451 - DNA, 3300 bp, Homo sapiens
ccttcttggtgccagggccacagatgtcgggaccaaacatgaaggttcatgtcatcttcaactacaagggcaagaacgtgctgatcaacaaggacatccgttgcaaggatgatgagtttacacacctgtacacactgattgtgcggccagacaacacctatgaggtgaagattgaaagaatcaatatcaaattctgagctctttccaacaactgatcctgtgggtactttgctccaagttccagaacagatctctgctcatctacctcagccagctgggcagattgctacacagccaactcaagtctctctcccacccaccgcagagccagcaaaaacagctcaggctttgtcttcaggatcaggttcacaagaaaccaagatcccaatcagtctagtactaagattaaggaattccaaaaaagaactaaatgatattcgatttgaatttactcctgggagagatacagcagagggtgtctctcaggaactcatttctgctggcctggtcgacggaagggatttagtaatagtggcagctaatttgcagaaaattgtggaagaacctcagtcaaatcgatctgtcactttcaaactggcatctggtgtcgaaggctcagatattcctgatgatggtaaactgataggatttgcccagctcagcatcagctaaaccacaaccctggaagaggcggcctaaggagattccacacatgcgtatctctgttgcttctattggcctaaacccactactgccaaagaacccagcaacaaacctcccggctaggagctttagaagtctttatgttcttcctgccatcattcctccttttcccacagggaaagaaaagttggatcactagtggccagcatccccagagttccgttagtaaacttacttcatatgtcccctgtcttcctccatctgagaagtggcccatgtgcttcaaggcccaggagggagatctgtcagctcattcttgccttactccaatgatggcccaggtggaaaagtagcagctgtatcgggcttcctcatcctgcctgttcccccacacctgccaggatatggacatcttgggatatctctttaccactgaagtagaattgattgttcagctggagcccagagaatttaatttaatgttttttctttgtacctgatgtgaattctagcaacctttgttaggaaaaagcacagcctcagatggaggcagcctaaactgtgttcttgttttgttcatggtgtttctaagcgttttgctgaagctgctctcaggcacccccttcttcattgctctctccagaaagggttgctagccttaacttcagctggtgcaaaacatctgactgtagccgaacttcagccatcagatccttcaaagtggaactttggattgtttttacagacaacatcgagtaatggcttgtaaatgtgaattttgccagaggtggtttttgaacaggaaaatcataattcatatcattggagaagtatttattttcaaatatcaaattgaagaaaaactcaatcctcccatgaaaatcagttcgcctggcctccaagtcgtgaggaaatgggtatgcaaggctgagatttctacagcaataaaggagacacacactgggccagagaggcctgccttctgcctgctctcctgcactgaccctttggagggggtctctgtgtgctgaagctaactcaagatggaaagtgaaaccacatgtgccgtgacctttaggttttatgagtagacagtgttcatttgattttctacagaaataatataaattattctttaggtttaaaaaagagcactcataatgcaatatgtgaataatcagtgaggttgatttttcttttttcctaccgtttcatagtctttgtctaactgctagtaaccctaccgagttttatatatgagtgggatactcaatctggccttaaaaagatacacaaagatgggctgtgggtccctggaaagggggagagttgccctttacagaatcactcgagccctttccagcactgttggtctgatgaacaaggttgttttaccttattttctcttggaacatatctgaaaaccttccccacaaataacttgtcacaccttttgtttcattctgagtctttagttttagtcatgggctttcttcacctgctctaggtgcaaaggcatgttgggaaagagatggatgttggggaggaagagaggagatggatttcagttgggagttaggaggagagtaggtgagatgatcagacaccggagttcaacgtcccagcagtcttggtaaaaggagggagcctgctgagccaggagggagaaaagaagattgaccagcttgctagaaaaatacttagcttttctttttctttttttgtggaggggggacggagaggaacaaggatggggaggtaggaatgaggtatagaaaagagatagcatcttctttggcacaagactagtggcttaccgcttaccttagagttttgttttttttttttcaaacccatcaaaatctacttatttatgaatccaaggggtggcagcatcactctgttctagcattctttgtggagatggtctggtgcctagctgggagtgagcagcagcccatcccctgttcactttctctagcccatcattacctgtgaactgcagtggggcagtcatggcaaatagaattgggctggggtttctccttcttttcagttcattgtttgccctgctaggaattagaagacagacaccatgtcccaggacagtgttacttcttctgcatgatgtgtggtagactccctttgctggcttgtgcagtgatactgagaaaatacatgaacagaaactgcccaggtggaacagcacgtaacctagtgagtgactgtactcctttctaggaatgctgattcagagtgcacctctttgactaggtcccaggatccccttgtccctggagtagggactaactatagcacaaagtaatatgtgccaatgctatttgtgaaatgtttggtctttctaaacgactaaaggatttgttgggtttttgcttaagttttgaaccaaatcctagagccagctgataatatttaataatctggaggagagaataatgatgtaccaataagtggagattcctccttatgatgtatgctaggttatggaagatgtaaaatattcaactttttcctcctttttttggactttgtattttactgcatgttttcttcatttttaatcaataaagagtaaattgtcaaaaaaaaaaacaaaccaaaacaaaaaaaaattgt

SEQ ID NO: 306452 - DNA, 3984 bp, Homo sapiens
agcggggaggaagaggggaaagtttggcccgtgcgtggggctggggtggagggcgggacagaggggctggggtggagggcgggacagaggggctgggcccaggcaaagcttctgtcgctgctgctgcggaggccgaggacaggacgtgggctgggccgggcagtgccggactcggaggagcaggaggcgaggtccgccggagctctgagcccccgctgctctgccgcgcggtgaccccgcgccccggcgccgtccgacccgtggctgttccgagacgattggtgggggcgcggcggcggcggcggcggctgttgggggtggggagacgcgcggcgaggagacgagcgaggtcagcgagtttgagggaggaccgcgagccgctgccgccgtcatgtccgaggactcgagcgccctgccctggtccatcaacagggacgattacgagctgcaggaggtgatcgggagtggagcaactgctgtagtccaagcagcttattgtgcccctaaaaaggagaaagtggcaatcaaacggataaaccttgagaaatgtcaaactagcatggatgaactcctgaaagaaattcaagccatgagtcaatgccatcatcctaatattgtatcttactacacatcttttgtggtaaaagatgagctgtggcttgtcatgaagctgctaagtggaggttctgttctggatattattaagcacattgtggcaaaaggggaacacaaaagtggagtcctagatgaatctaccattgctacgatactccgagaagtactggaagggctggaatatctgcataaaaatggacagatccacagagatgtgaaagctggaaacattcttcttggagaagatggctcagtacagattgcagactttggggttagtgcttttttagcaactggtggtgatattacccgaaataaagtgagaaagacctttgttggcaccccttgttggatggcacctgaagttatggaacaggtccgtggttatgatttcaaagctgatatttggagttttggaattacagcaattgaattggctacaggggcggctccttatcataaatatccaccaatgaaggttttaatgctgacactgcagaacgatcctccttctttggaaactggtgttcaagataaagaaatgctgaaaaaatatggaaaatcatttagaaaaatgatttcattgtgccttcaaaaagatccagaaaaaagaccaacagcagcagaactattaaggcacaaatttttccagaaagcaaagaataaagaatttcttcaagaaaaaacattgcagagagcaccaaccatttctgaaagagcaaaaaaggttcggagagtaccaggttccagtgggcgtcttcataagacagaggatggaggctgggagtggagtgatgatgaatttgatgaagaaagtgaggaagggaaagcagcaatttcacaactcaggtctccccgagtgaaagaatcaatatcaaattctgagctctttccaacaactgatcctgtgggtactttgctccaagttccagaacagatctctgctcatctacctcagccagctgggcagattgctacacagccaactcaagtctctctcccacccaccgcagagccagcaaaaacagctcaggctttgtcttcaggatcaggttcacaagaaaccaagatcccaatcagtctagtactaagattaaggaattccaaaaaagaactaaatgatattcgatttgaatttactcctgggagagatacagcagagggtgtctctcaggaactcatttctgctggcctggtcgacggaagggatttagtaatagtggcagctaatttgcagaaaattgtggaagaacctcagtcaaatcgatctgtcactttcaaactggcatctggtgtcgaaggctcagatattcctgatgatggtaaactgataggatttgcccagctcagcatcagctaaaccacaaccctggaagaggcggcctaaggagattccacacatgctgcaaaacatctgactgtagccgaacttcagccatcagatccttcaaagtggaactttggattgtttttacagacaacatcgagtaatggcttgtaaatgtgaattttgccagaggtggtttttgaacaggaaaatcataattcatatcattggagaagtatttattttcaaatatcaaattgaagaaaaactcaatcctcccatgaaaatcagttcgcctggcctccaagtcgtgaggaaatgggtatgcaaggctgagatttctacagcaataaaggagacacacactgggccagagaggcctgccttctgcctgctctcctgcactgaccctttggagggggtctctgtgtgctgaagctaactcaagatggaaagtgaaaccacatgtgccgtgacctttaggttttatgagtagacagtgttcatttgattttctacagaaataatataaattattctttaggtttaaaaaagagcactcataatgcaatatgtgaataatcagtgaggttgatttttcttttttcctaccgtttcatagtctttgtctaactgctagtaaccctaccgagttttatatatgagtgggatactcaatctggccttaaaaagatacacaaagatgggctgtgggtccctggaaagggggagagttgccctttacagaatcactcgagccctttccagcactgttggtctgatgaacaaggttgttttaccttattttctcttggaacatatctgaaaaccttccccacaaataacttgtcacaccttttgtttcattctgagtctttagttttagtcatgggctttcttcacctgctctaggtgcaaaggcatgttgggaaagagatggatgttggggaggaagagaggagatggatttcagttgggagttaggaggagagtaggtgagatgatcagacaccggagttcaacgtcccagcagtcttggtaaaaggagggagcctgctgagccaggagggagaaaagaagattgaccagcttgctagaaaaatacttagcttttctttttctttttttgtggaggggggacggagaggaacaaggatggggaggtaggaatgaggtatagaaaagagatagcatcttctttggcacaagactagtggcttaccgcttaccttagagttttgttttttttttttcaaacccatcaaaatctacttatttatgaatccaaggggtggcagcatcactctgttctagcattctttgtggagatggtctggtgcctagctgggagtgagcagcagcccatcccctgttcactttctctagcccatcattacctgtgaactgcagtggggcagtcatggcaaatagaattgggctggggtttctccttcttttcagttcattgtttgccctgctaggaattagaagacagacaccatgtcccaggacagtgttacttcttctgcatgatgtgtggtagactccctttgctggcttgtgcagtgatactgagaaaatacatgaacagaaactgcccaggtggaacagcacgtaacctagtgagtgactgtactcctttctaggaatgctgattcagagtgcacctctttgactaggtcccaggatccccttgtccctggagtagggactaactatagcacaaagtaatatgtgccaatgctatttgtgaaatgtttggtctttctaaacgactaaaggatttgttgggtttttgcttaagttttgaaccaaatcctagagccagctgataatatttaataatctggaggagagaataatgatgtaccaataagtggagattcctccttatgatgtatgctaggttatggaagatgtaaaatattcaactttttcctcctttttttggactttgtattttactgcatgttttcttcatttttaatcaataaagagtaaattgtcaaaaaaaaaaacaaaccaaaacaaaaaaaaattgt

SEQ ID NO: 306453 - DNA, 4375 bp, Homo sapiens
agcggggaggaagaggggaaagtttggcccgtgcgtggggctggggtggagggcgggacagaggggctggggtggagggcgggacagaggggctgggcccaggcaaagcttctgtcgctgctgctgcggaggccgaggacaggacgtgggctgggccgggcagtgccggactcggaggagcaggaggcgaggtccgccggagctctgagcccccgctgctctgccgcgcggtgaccccgcgccccggcgccgtccgacccgtggctgttccgagacgattggtgggggcgcggcggcggcggcggcggctgttgggggtggggagacgcgcggcgaggagacgagcgaggtcagcgagtttgagggaggaccgcgagccgctgccgccgtcatgtccgaggactcgagcgccctgccctggtccatcaacagggacgattacgagctgcaggaggtgatcgggagtggagcaactgctgtagtccaagcagcttattgtgcccctaaaaaggagaaagtggcaatcaaacggataaaccttgagaaatgtcaaactagcatggatgaactcctgaaagaaattcaagccatgagtcaatgccatcatcctaatattgtatcttactacacatcttttgtggtaaaagatgagctgtggcttgtcatgaagctgctaagtggaggttctgttctggatattattaagcacattgtggcaaaaggggaacacaaaagtggagtcctagatgaatctaccattgctacgatactccgagaagtactggaagggctggaatatctgcataaaaatggacagatccacagagatgtgaaagctggaaacattcttcttggagaagatggctcagtacagattgcagactttggggttagtgcttttttagcaactggtggtgatattacccgaaataaagtgagaaagacctttgttggcaccccttgttggatggcacctgaagttatggaacaggtccgtggttatgatttcaaagctgatatttggagttttggaattacagcaattgaattggctacaggggcggctccttatcataaatatccaccaatgaaggttttaatgctgacactgcagaacgatcctccttctttggaaactggtgttcaagataaagaaatgctgaaaaaatatggaaaatcatttagaaaaatgatttcattgtgccttcaaaaagatccagaaaaaagaccaacagcagcagaactattaaggcacaaatttttccagaaagcaaagaataaagaatttcttcaagaaaaaacattgcagagagcaccaaccatttctgaaagagcaaaaaaggttcggagagtaccaggttccagtgggcgtcttcataagacagaggatggaggctgggagtggagtgatgatgaatttgatgaagaaagtgaggaagggaaagcagcaatttcacaactcaggtctccccgagtgaaagaatcaatatcaaattctgagctctttccaacaactgatcctgtgggtactttgctccaagttccagaacagatctctgctcatctacctcagccagctgggcagattgctacacagccaactcaagtctctctcccacccaccgcagagccagcaaaaacagctcaggctttgtcttcaggatcaggttcacaagaaaccaagatcccaatcagtctagtactaagattaaggaattccaaaaaagaactaaatgatattcgatttgaatttactcctgggagagatacagcagagggtgtctctcaggaactcatttctgctggcctggtcgacggaagggatttagtaatagtggcagctaatttgcagaaaattgtggaagaacctcagtcaaatcgatctgtcactttcaaactggcatctggtgtcgaaggctcagatattcctgatgatggtaaactgataggatttgcccagctcagcatcagctaaaccacaaccctggaagaggcggcctaaggagattccacacatgcgtatctctgttgcttctattggcctaaacccactactgccaaagaacccagcaacaaacctcccggctaggagctttagaagtctttatgttcttcctgccatcattcctccttttcccacagggaaagaaaagttggatcactagtggccagcatccccagagttccgttagtaaacttacttcatatgtcccctgtcttcctccatctgagaagtggcccatgtgcttcaaggcccaggagggagatctgtcagctcattcttgccttactccaatgatggcccaggtggaaaagtagcagctgtatcgggcttcctcatcctgcctgttcccccacacctgccaggatatggacatcttgggatatctctttaccactgaagtagaattgattgttcagctggagcccagagaatttaatttaatgttttttctttgtacctgatgtgaattctagcaacctttgttaggaaaaagcacagcctcagatggaggcagcctaaactgtgttcttgttttgttcatggtgtttctaagcgttttgctgaagctgctctcaggcacccccttcttcattgctctctccagaaagggttgctagccttaacttcagctggtgcaaaacatctgactgtagccgaacttcagccatcagatccttcaaagtggaactttggattgtttttacagacaacatcgagtaatggcttgtaaatgtgaattttgccagaggtggtttttgaacaggaaaatcataattcatatcattggagaagtatttattttcaaatatcaaattgaagaaaaactcaatcctcccatgaaaatcagttcgcctggcctccaagtcgtgaggaaatgggtatgcaaggctgagatttctacagcaataaaggagacacacactgggccagagaggcctgccttctgcctgctctcctgcactgaccctttggagggggtctctgtgtgctgaagctaactcaagatggaaagtgaaaccacatgtgccgtgacctttaggttttatgagtagacagtgttcatttgattttctacagaaataatataaattattctttaggtttaaaaaagagcactcataatgcaatatgtgaataatcagtgaggttgatttttcttttttcctaccgtttcatagtctttgtctaactgctagtaaccctaccgagttttatatatgagtgggatactcaatctggccttaaaaagatacacaaagatgggctgtgggtccctggaaagggggagagttgccctttacagaatcactcgagccctttccagcactgttggtctgatgaacaaggttgttttaccttattttctcttggaacatatctgaaaaccttccccacaaataacttgtcacaccttttgtttcattctgagtctttagttttagtcatgggctttcttcacctgctctaggtgcaaaggcatgttgggaaagagatggatgttggggaggaagagaggagatggatttcagttgggagttaggaggagagtaggtgagatgatcagacaccggagttcaacgtcccagcagtcttggtaaaaggagggagcctgctgagccaggagggagaaaagaagattgaccagcttgctagaaaaatacttagcttttctttttctttttttgtggaggggggacggagaggaacaaggatggggaggtaggaatgaggtatagaaaagagatagcatcttctttggcacaagactagtggcttaccgcttaccttagagttttgttttttttttttcaaacccatcaaaatctacttatttatgaatccaaggggtggcagcatcactctgttctagcattctttgtggagatggtctggtgcctagtgagaaaatacatgaacagaaactgcccaggtggaacagcacgtaacctagtgagtgactgtactcctttctaggaatgctgattcagagtgcacctctttgactaggtcccaggatccccttgtccctggagtagggactaactatagcacaaagtaatatgtgccaatgctatttgtgaaatgtttggtctttctaaacgactaaaggatttgttgggtttttgcttaagttttgaaccaaatcctagagccagctgataatatttaataatctggaggagagaataatgatgtaccaataagtggagattcctccttatgatgtatgctaggttatggaagatgtaaaatattcaactttttcctcctttttttggactttgtattttactgcatgttttcttcatttttaatcaataaagagtaaattgtcaaaaaaaaaaacaaaccaaaacaaaaaaaaattgt

SEQ ID NO: 306454 - DNA, 412 bp, Homo sapiens
gttttaatgctgacactgcagaacgatcctccttctttggaaactggtgttcaagataaagaaatgctgaaaaaatatggaaaatcatttagaaaaatgatttcattgtgccttcaaaaagatccagaaaaaaggtaaaatatgagaaaaagtctacttttctctctaataaaacattgtgagaagtctaagaatcacatactcatatgtacagaaaattattttcaaaagaactaaatataaactttaaaaaagtatacagagaccattatactggattggaaatgaattgatttctgccttctttgtagtatacagtgtaccctaaatagttcagctttttccttgttaatttcttacaaagttgtacattgtgaattctgtattaataaatgccaagttagtggagaga

SEQ ID NO: 306455 - DNA, 2410 bp, Homo sapiens
  misc_feature (1318)..(1318): n is a, c, g, or t
  misc_feature (1819)..(1819): n is a, c, g, or t
  misc_feature (1887)..(1887): n is a, c, g, or t
  misc_feature (1992)..(1992): n is a, c, g, or t
  misc_feature (2283)..(2283): n is a, c, g, or t
  misc_feature (2340)..(2340): n is a, c, g, or t
acgcgtttccgggatttctctgtaggtgaggcgggaggctggagggagctgagcccccggggagggggcccgattccgcctcgccgcgcctctggctgctgggccgtgggtttttctcttctcctgcgagtaagaaggacgacggcccctaacccctgaattagccttctatttccattagtgacttagaagctacccggcgcctcatctgggctcacctgagctgaggatcaggaaggggagggggcacagtcattgcctcgcgggcgcggcgggaccccagcggacggctttgtgcggactttcggcaccgttatgcccccctagcccgacaccacctggggctggcgcgccacgttactgttcagggccagacgcaccgccctgcctgctccggggagccggacctccgatcccggggatgggggaccccgagacctcagacccaacggaggggactctgatacctcagaccccacgcggggaccccgaggcttcagacccccacagggtgaccccgagatctcagacccccgcaggagtacctccagacctcaaatccccagtaagggaatgaaagagacttcggatccctgaggcagcaaatcactgtaggggcatcccaggactcaggtcaccgcggggtgaacccagacctcacattcaggcaatccccaggacgccgatcggctggcactacccactgtcccggccaccccccctggagctcaaaggcttggccctccaactgctccaccctgccggctcccaggctcaaacctgcagcccgcggatcccctgccccggaagcaaccagattcgcgggaggttacctgactgatccaaggcaggttctcactccgttgcccaggctggaatgcagtggtgtaatcacagctcactgcagcctcaacctactggactcaaaggataagatctgcttttaattaatttttgtatacggtatgggatagggaccaaagttcatttttttgcatgtatacatatccaaatgttccagcatcatttattaaaaagttatttttgtctctactgcatttcctttgtgcttacatcaaaatctgtgttgcatatgtatgtgtttcattttaggcttcctattgtgttccattgagctatttgtctttttgctgccagcaccatgctgttttgattattgtagctatataaataagtgatgaaatcagatagtttatgtcctacaactttatttttcaaggttattttgtatcttctagattcttcagatttccttttaaatcttagagtcgacttctcattttgcacaaaaaaatantgctgggattttgattgagattgtgttgactctacagatgaatttggggagaattgacattttaaccatattgaatcttctgacccattaacatttaggtcttttaaaatttctctggccagacgcagtggctcacgcctgccactttgggaggccaaggcgggccgatcacaaggtcaggagattgagaccatcctggctaacacagtgaaaccccatctctactaaaaatacaaaaaattagccgggcgtggtggcatgcgcctgtagccccagctacttggaaggctgaggcaggagaatggcatgaacccgggagacagagcttgcagtgagcagagatcttgccactgcactccacctggggcaacagagcgagactccatctcaaaaaaaaaaaatataactgttgttagattttaacctaagtatttgtttttttattttgtttttctttttttcttcttttttttttttttttttttttgagacaggatctcnctctgtctcccaggctgaagtgcaatggtgtgatcatggctcatcttgaagcctcgaccctcctgggntcaagctatcctcccacctcaacctcctgagtagctgggactacaagtacacatgaccatgcccaattcattttttaaattctttgtagaggcggagtcccactntgttgcccaggctggtcttgaactcctgggctcaagcaatcctcccacctcagcttcccaaagtgtagggattacaggcatgagccactgtgcaaggtcttgtgttttttgataatatcgtaaatggtgattttttcatttgtttctgattgttgctaatatatggaaatatagttgatatctgcaattgatctcatgtcctgaaaacttgctaaatctgcttaataattttttgtacattcaaaatgatgttctacaggtagtcgtattgtctatgttggaaggaaagcntttcctcattcaatgtcggtcctgtgtttgaagacctgcaaattaactgataacaanaggttaacaggagaaaagacaaggtttagagtaactcactaaatagaaataaaggtttatagatccactt

SEQ ID NO: 306456 - DNA, 1329 bp, Homo sapiens
acgcgtttccgggatttctctgtaggtgaggcgggaggctggagggagctgagcccccggggagggggcccgattccgcctcgccgcgcctctggctgctgggccgtgggtttttctcttctcctgcgagtaagaaggacgacggcccctaacccctgaattagccttctatttccattagtgacttagaagctacccggcgcctcatctgggctcacctgagctgaggatcaggaaggggagggggcacagtcattgcctcgcgggcgcggcgggaccccagcggacggctttgtgcggactttcggcaccgttatgcccccctagcccgacaccacctggggctggcgcgccacgttactgttcagggccagacgcaccgccctgcctgctccggggagccggacctccgatcccggggatgggggaccccgagacctcagacccaacggaggggactctgatacctcagaccccacgcggggaccccgaggcttcagacccccacagggtgaccccgagatctcagacccccgcaggagtacctccagacctcaaatccccagtaagggaatgaaagagacttcggatccctgaggcagcaaatcactgtaggggcatcccaggactcaggtcaccgcggggtgaacccagacctcacattcaggcaatccccaggacgccgatcggctggcactacccactgtcccggccaccccccctggagctcaaaggcttggccctccaactgctccaccctgccggctcccaggctcaaacctgcagcccgcggatcccctgccccggaagcaaccagattcgcgggaggttacctgactgatccaaggtgatacagctggtaactgatggagatgttggtagtgaaattcatgtacttttagttctttctatggaatctagaggtagaatacatgtacaagaatatcgactaccgtctactcaggtctctgttttatctgtttattcattaactctcagcttttaataggatccaatgagccctctgtggttctgaagaattgccttgagtatatgcagcctcaaaaaacccacttcctaggctcagtctttgatcaatatttatcattatcaccagttattgttctaataaactctactctggaaaaaaacatcaaaaaacagaaaaaaaaaaacacaacaaaaaggaacaaacaaaacaaaacacggggggggccgcacggaaaaaaaattccccccggggggcgccccggacaagtagccgcacaccgcgagatagtgtgggcacacaagaaggggcgcccacatagggggggacaccgaaatacg

SEQ ID NO: 306457 - DNA, 2994 bp, Homo sapiens
  misc_feature (1902)..(1902): n is a, c, g, or t
  misc_feature (2403)..(2403): n is a, c, g, or t
  misc_feature (2471)..(2471): n is a, c, g, or t
  misc_feature (2576)..(2576): n is a, c, g, or t
  misc_feature (2867)..(2867): n is a, c, g, or t
  misc_feature (2924)..(2924): n is a, c, g, or t
acgcgtttccgggatttctctgtaggtgaggcgggaggctggagggagctgagcccccggggagggggcccgattccgcctcgccgcgcctctggctgctgggccgtgggtttttctcttctcctgcgagtaagaaggacgacggcccctaacccctgaattagccttctatttccattagtgacttagaagctacccggcgcctcatctgggctcacctgagctgaggatcaggaaggggagggggcacagtcattgcctcgcgggcgcggcgggaccccagcggacggctttgtgcggactttcggcaccgttatgcccccctagcccgacaccacctggggctggcgcgccacgttactgttcagggccagacgcaccgccctgcctgctccggggagccggacctccgatcccggggatgggggaccccgagacctcagacccaacggaggggactctgatacctcagaccccacgcggggaccccgaggcttcagacccccacagggtgaccccgagatctcagacccccgcaggagtacctccagacctcaaatccccagtaagggaatgaaagagacttcggatccctgaggcagcaaatcactgtaggggcatcccaggactcaggtcaccgcggggtgaacccagacctcacattcaggcaatccccaggacgccgatcggctggcactacccactgtcccggccaccccccctggagctcaaaggcttggccctccaactgctccaccctgccggctcccaggctcaaacctgcagcccgcggatcccctgccccggaagcaaccagattcgcgggaggttacctgactgatccaaggtgatacagctggtaactgatggagatgttggtagtgaaattcatgtacttttagttctttctatggaatctagaggtagaatacatgtacaagaatatcgactaccgtctactcaggtctctgttttatctgtttattcattaactctcagcttttaataggatccaatgagccctctgtggttctgaagaattgccttgagtatatgcagcctcaaaaaacccacttcctaggctcagtctttgatcaatatttatcattatcaccagttattgttctaataaactctactctggaaatatggtgttatggtttacttgggagtgtgagttcagggcatcattgaagactcacgtacttttactgagaaagtgacattgatctctgtagatttagaattaaatgatatgatgaagtatataaaccaattacttttggtcaaggtggtaaaaaaagtttagtatttgatagattcttcatctccacgatcacaaatattttctcctaggatttcttctagaaatattactgctttaggttgtatatcaggtctaggttctactttttttttttttttctccaggcaggttctcactccgttgcccaggctggaatgcagtggtgtaatcacagctcactgcagcctcaacctactggactcaaaggataagatctgcttttaattaatttttgtatacggtatgggatagggaccaaagttcatttttttgcatgtatacatatccaaatgttccagcatcatttattaaaaagttatttttgtctctactgcatttcctttgtgcttacatcaaaatctgtgttgcatatgtatgtgtttcattttaggcttcctattgtgttccattgagctatttgtctttttgctgccagcaccatgctgttttgattattgtagctatataaataagtgatgaaatcagatagtttatgtcctacaactttatttttcaaggttattttgtatcttctagattcttcagatttccttttaaatcttagagtcgacttctcattttgcacaaaaaaatantgctgggattttgattgagattgtgttgactctacagatgaatttggggagaattgacattttaaccatattgaatcttctgacccattaacatttaggtcttttaaaatttctctggccagacgcagtggctcacgcctgccactttgggaggccaaggcgggccgatcacaaggtcaggagattgagaccatcctggctaacacagtgaaaccccatctctactaaaaatacaaaaaattagccgggcgtggtggcatgcgcctgtagccccagctacttggaaggctgaggcaggagaatggcatgaacccgggagacagagcttgcagtgagcagagatcttgccactgcactccacctggggcaacagagcgagactccatctcaaaaaaaaaaaatataactgttgttagattttaacctaagtatttgtttttttattttgtttttctttttttcttcttttttttttttttttttttttgagacaggatctcnctctgtctcccaggctgaagtgcaatggtgtgatcatggctcatcttgaagcctcgaccctcctgggntcaagctatcctcccacctcaacctcctgagtagctgggactacaagtacacatgaccatgcccaattcattttttaaattctttgtagaggcggagtcccactntgttgcccaggctggtcttgaactcctgggctcaagcaatcctcccacctcagcttcccaaagtgtagggattacaggcatgagccactgtgcaaggtcttgtgttttttgataatatcgtaaatggtgattttttcatttgtttctgattgttgctaatatatggaaatatagttgatatctgcaattgatctcatgtcctgaaaacttgctaaatctgcttaataattttttgtacattcaaaatgatgttctacaggtagtcgtattgtctatgttggaaggaaagcntttcctcattcaatgtcggtcctgtgtttgaagacctgcaaattaactgataacaanaggttaacaggagaaaagacaaggtttagagtaactcactaaatagaaataaaggtttatagatccactt

SEQ ID NO: 306458 - DNA, 329 bp, Homo sapiens
gggcccccattgcagtccctcatacccctaactgggcatgataccttctggggggctgtggccagacctgggacttgtcttgtaggaatccctgcagcagcagcagcaggaacaagaggaagccctcaagcagtgtcgggagcagcacgctgccgagctgaagggcaaggaggaggagctacaggatgtacgggatcagctcgagcaggcccaggaggagcgggactgccacctgaagaccattagcagcctgaagcaggaggtgaaggacacaggtccagggcagaggaccaacgttgatccggccgcgaatttagtagtagtagtcg

SEQ ID NO: 306459 - DNA, 3043 bp, Homo sapiens
ggaggagtttcagcggatgcaggctcagctcctggaactccggacaaacaactaccagctttcagatgaactacgcaagaatggtgttgaactcaccagtcttcgacagaaggtcgcctacttggataaggagttcagcaaagctcagaaggcactgagcaagagcaagaaagctcaggaagtcgaggtattgctgagtgaaaatgagatgctgcaggcaaagctgcacagccaggaggaggacttccgtttgcagaacagcacactaatggccgagttcagcaagctctgcagccagatggaacagctggagcaagagaaccagcaactgaaggagggggctgcaggagcaggggttgcccaagctgggcccctcgtggatggggagctgctgaggctacaggctgaaaacacagccttgcagaagaacgtggcagccctgcaggaacgctatgggaaagaagccgggaagttctcagctgtcagtgagggccagggggatcccccagggggcccggcccccaccgtcctggcccccatgccgttggcagaggtggagctgaaatgggaaatggagaaagaggagaagagattgctctgggaacagctgcaaggcttagagagctcaaagcaggccgaaacatccaggctgcaggaggaacttgctaagctctccgagaaactgaaaaagaaacaagaaagtttttgccgtctgcagacagaaaaggagactctgtttaatgacagcaggaacaagattgaggaattacaacaacggaaggaagctgatcacaaagcccagttggctcgaacccagaagctgcagcaggaacttgaggctgccaatcagagcttggcagagctgagagatcagcggcagggggagcgcctggaacatgcagcagctttgcgggccctacaagatcaggtatccatccagagtgcagatgcacaggaacaagtggaagggcttttggctgagaacaatgccttgaggactagcctggctgccctggagcagatccaaacagcaaagacccaagaactgaatatgctccgggaacagaccactgggctggcagctgagttgcagcagcagcaggctgagtacgaggaccttatgggacagaaagatgacctcaactcccagctccaggagtcattacgggccaatagtcgactgctggaacaacttcaagaaatagggcaggagaaggagcagttgacccaggaattacaggaggctcggaagagtgcggagaagcggaaggccatgctggatgagctagcaatggaaacgctgcaagagaagtcccagcacaaggaagagctgggagcagttcgtctacggcatgagaaggaggtgctgggggtgcgtgcccgctatgagcgtgagctccgagagctgcatgaagacaagaagcgtcaggaggaggagctccgtgggcagatccgggaggagaaggcccggacacgggagctggagactctccagcagacagtggaagaacttcaagctcaggtacattccatggatggagccaagggctggtttgaacggcgcttgaaggaagccgaggaatccctgcagcagcagcagcaggaacaagaggaagccctcaagcagtgtcgggagcagcacgctgccgagctgaagggcaaggaggaggagctacaggatgtacgggatcagctcgagcaggcccaggaggagcgggactgccacctgaagaccattagcagcctgaagcaggaggtgaaggacacagtggatgggcagaggatcctggagaagaagggcagtgctgcgctcaaggacctcaagcggcagctgcatttggagcggaaacgggcagataagctgcaggagcgactgcaggacatcctcactaacagcaagagccgctcaggccttgaggagctggttctctcagagatgaactcaccaagccggacccagacaggggacagcagtagcatctcctccttcagctaccgggagatcttgcgggaaaaggagagctcggctgttccagccaggtccttatccagcagccctcaagcccagccccctcggccagcagagctgtcagatgaggaagtggctgagctctttcagcggctggcagagacacagcaggagaaatggatgctggaggagaaggtgaagcacctggaagtgagcagtgcttccatggcagaggacctctgccggaagagcgccatcattgagacctacgtcatggacagccggatcgatgtgtctgtggcagcaggccacacagaccgcagcgggctgggcagcgtcctgagagacctagtgaagccaggcgacgagaaccttcgggagatgaacaagaagctgcagaacatgctggaggagcagctcaccaagaatatgcacttgcacaaggatatggaagttctgtcccaggaaattgtgcggctcagcaaggagtgcgtggggcctcctgacccagacctagagccaggagaaaccagctaaagacctgcaggctgcacccacctcctccccttcctaccccctaggatgctattcccttgggctgtggtggaaaaatgagggctggagccaaaatcaaatagcttgggagactggacattaaaggggctagaggcctgatggttagtgttaatgatcctgtcttagggcagaggccaccagggagtggggatcctgagggaaggggcagggatttctccttcttcttggtcctggctcccaagggcttctgtcttcatctctgcatgagctctccttcccagagaccaactcttttttattttattttattttattttttaatttatgtctggagcctggctactctgcatttgggattggggatgctgggtgggtgtgtggtccatgttcagcgttctagcaacacgtgtgtgtgtgtgtgtgtaaaggctatgcagccaaaataccatctggccagacgggcccacccacaaaaaaaagcacaacacacaacacacaaacacacacacaaaacacaaacacaaaaggggcggcagc

SEQ ID NO: 306460 - DNA, 2318 bp, Homo sapiens
tttggatactctgagagccacaggtgctgagaacatgctgctgggtggtcaaacagagagtctgtacggttatatgcaccccaggagaggctgaggtgtaaaatgggctcccctggtctccacagagcttggcagagctgagagatcagcggcagggggagcgcctggaacatgcagcagctttgcgggccctacaagatcaggtatccatccagagtgcagatgcacaggaacaagtggaagggcttttggctgagaacaatgccttgaggactagcctggctgccctggagcagatccaaacagcaaagacccaagaactgaatatgctccgggaacagaccactgggctggcagctgagttgcagcagcagcaggctgagtacgaggaccttatgggacagaaagatgacctcaactcccagctccaggagtcattacgggccaatagtcgactgctggaacaacttcaagaaatagggcaggagaaggagcagttgacccaggaattacaggaggctcggaagagtgcggagaagcggaaggccatgctggatgagctagcaatggaaacgctgcaagagaagtcccagcacaaggaagagctgggagcagttcgtctacggcatgagaaggaggtgctgggggtgcgtgcccgctatgagcgtgagctccgagagctgcatgaagacaagaagcgtcaggaggaggagctccgtgggcagatccgggaggagaaggcccggacacgggagctggagactctccagcagacagtggaagaacttcaagctcaggtacattccatggatggagccaagggctggtttgaacggcgcttgaaggaagccgaggaatccctgcagcagcagcagcaggaacaagaggaagccctcaagcagtgtcgggagcagcacgctgccgagctgaagggcaaggaggaggagctacaggatgtacgggatcagctcgagcaggcccaggaggagcgggactgccacctgaagaccattagcagcctgaagcaggaggtgaaggacacagtggatgggcagaggatcctggagaagaagggcagtgctgcgctcaaggacctcaagcggcagctgcatttggagcggaaacgggcagataagctgcaggagcgactgcaggacatcctcactaacagcaagagccgctcaggccttgaggagctggttctctcagagatgaactcaccaagccggacccagacaggggacagcagtagcatctcctccttcagctaccgggagatcttgcgggaaaaggagagctcggctgttccagccaggtccttatccagcagccctcaagcccagccccctcggccagcagagctgtcagatgaggaagtggctgagctctttcagcggctggcagagacacagcaggagaaatggatgctggaggagaaggtgaagcacctggaagtgagcagtgcttccatggcagaggacctctgccggaagagcgccatcattgagacctacgtcatggacagccggatcgatgtgtctgtggcagcaggccacacagaccgcagcgggctgggcagcgtcctgagagacctagtgaagccaggcgacgagaaccttcgggagatgaacaagaagctgcagaacatgctggaggagcagctcaccaagaatatgcacttgcacaaggatatggaagttctgtcccaggaaattgtgcggctcagcaaggagtgcgtggggcctcctgacccagacctagagccaggagaaaccagctaaagacctgcaggctgcacccacctcctccccttcctaccccctaggatgctattcccttgggctgtggtggaaaaatgagggctggagccaaaatcaaatagcttgggagactggacattaaaggggctagaggcctgatggttagtgttaatgatcctgtcttagggcagaggccaccagggagtggggatcctgagggaaggggcagggatttctccttcttcttggtcctggctcccaagggcttctgtcttcatctctgcatgagctctccttcccagagaccaactcttttttattttattttattttattttttaatttatgtctggagcctggctactctgcatttgggattggggatgctgggtgggtgtgtggtccatgttcagcgttctagcaacacgtgtgtgtgtgtgtgtgtaaaggctatgcagccaaaataccatctggccagacgggcccacccacaaaaaaaagcacaacacacaacacacaaacacacacacaaaacacaaacacaaaaggggcggcagc

SEQ ID NO: 306461 - DNA, 3880 bp, Homo sapiens
ggaggagtttcagcggatgcaggctcagctcctggaactccggacaaacaactaccagctttcagatgaactacgcaagaatggtgttgaactcaccagtcttcgacagaaggtcgcctacttggataaggagttcagcaaagctcagaaggcactgagcaagagcaagaaagctcaggaagtcgaggtattgctgagtgaaaatgagatgctgcaggcaaagctgcacagccaggaggaggacttccgtttgcagaacagcacactaatggccgagttcagcaagctctgcagccagatggaacagctggagcaagagaaccagcaactgaaggagggggctgcaggagcaggggttgcccaagctgggcccctcgtggatggggagctgctgaggctacaggctgaaaacacagccttgcagaagaacgtggcagccctgcaggaacgctatgggaaagaagccgggaagttctcagctgtcagtgagggccagggggatcccccagggggcccggcccccaccgtcctggcccccatgccgttggcagaggtggagctgaaatgggaaatggagaaagaggagaagagattgctctgggaacagctgcaaggcttagagagctcaaagcaggccgaaacatccaggctgcaggaggaacttgctaagctctccgagaaactgaaaaagaaacaagaaagtttttgccgtctgcagacagaaaaggagactctgtttaatgacagcaggaacaagattgaggaattacaacaacggaaggaagctgatcacaaagcccagttggctcgaacccagaagctgcagcaggaacttgaggctgccaatcagagcttggcagagctgagagatcagcggcagggggagcgcctggaacatgcagcagctttgcgggccctacaagatcaggtatccatccagagtgcagatgcacaggaacaagtggaagggcttttggctgagaacaatgccttgaggactagcctggctgccctggagcagatccaaacagcaaagacccaagaactgaatatgctccgggaacagaccactgggctggcagctgagttgcagcagcagcaggctgagtacgaggaccttatgggacagaaagatgacctcaactcccagctccaggagtcattacgggccaatagtcgactgctggaacaacttcaagaaatagggcaggagaaggagcagttgacccaggaattacaggaggctcggaagagtgcggagaagcggaaggccatgctggatgagctagcaatggaaacgctgcaagagaagtcccagcacaaggaagagctgggagcagttcgtctacggcatgagaaggaggtgctgggggtgcgtgcccgctatgagcgtgagctccgagagctgcatgaagacaagaagcgtcaggaggaggagctccgtgggcagatccgggaggagaaggcccggacacgggagctggagactctccagcagacagtggaagaacttcaagctcaggtacattccatggatggagccaagggctggtttgaacggcgcttgaaggaagccgaggaatccctgcagcagcagcagcaggaacaagaggaagccctcaagcagtgtcgggagcagcacgctgccgagctgaagggcaaggaggaggagctacaggatgtacgggatcagctcgagcaggcccaggaggagcgggactgccacctgaagaccattagcagcctgaagcaggaggtgaaggacacagtggatgggcagaggatcctggagaagaagggcagtgctgcgctcaaggacctcaagcggcagctgcatttggagcggaaacgggcagataagctgcaggagcgactgcaggacatcctcactaacagcaagagccgctcaggccttgaggagctggttctctcagagatgaactcaccaagccggacccagacaggggacagcagtagcatctcctccttcagctaccgggagatcttgcgggaaaaggagagctcggctgttccagccaggtccttatccagcagccctcaagcccagccccctcggccagcagagctgtcagatgaggaagtggctgagctctttcagcggctggcagagacacagcaggagaaatggatgctggaggagaaggtgctgcctgcctgcctgcctgcccatccccacttgaagtgcccttgtgggtgtggggtctgcccgggcccgcctcatgtgtgaacatgtacagtagaggggtctcaggtgggctgggccatcttgcaggtgaagcacctggaagtgagcagtgcttccatggcagaggacctctgccggaagagcgccatcattgagacctacgtcatggacagccggatcggtcagtgtcccctccccggccctcagccctggtccagccttcacctggccctccctctccattctgtgctgcggcttctctcctctcctctcggaactcagcgaagctactgacaagaccatggcctgtggaggggagaacaggaaagcactgtctcttgatctcgcctcctccctcttctctctttctctgtcatctctccactctccattctccattgtgtctctctgtccactttctcctttcctctccctgtgcctcatcttcctctcctctctctctcccttctctcttctccgtttctctttttcaccccactccttcatcttgtctcgctgtctatattgttttccttctctgtatcttcattgcttttgctttctttcaaactttctccttcacagatttttctttattaatcagaatcatactgaccaacatgtgctgaggactttctgtgtgctctgtgcttcacatacagtcatgtgcatctttccagttccacaagttagttatcctcatttctcggggccatagagctagtgagtgacagagctaggttttgtatgtcaaagcctctgtcctacatgacatggcttttcctgctgccttctcccctggtattcgtctccctcttttctcctctggctctgcctggctctcctctggctctgccgagggggtggttttcagcctgggcccttgcagatgtgtctgtggcagcaggccacacagaccgcagcgggctgggcagcgtcctgagagacctagtgaagccaggcgacgagaaccttcgggagatgaacaagaagctgcagaacatgctggaggagcagctcaccaagaatatgcacttgcacaaggatatggaagttctgtcccaggaaattgtgcggctcagcaaggagtgcgtggggcctcctgacccagacctagagccaggagaaaccagctaaagacctgcaggctgcacccacctcctccccttcctaccccctaggatgctattcccttgggctgtggtggaaaaatgagggctggagccaaaatcaaatagcttgggagactggacattaaaggggctagaggcctgatggttagtgttaatgatcctgtcttagggcagaggccaccagggagtggggatcctgagggaaggggcagggatttctccttcttcttggtcctggctcccaagggcttctgtcttcatctctgcatgagctctccttcccagagaccaactcttttttattttattttattttattttttaatttatgtctggagcctggctactctgcatttgggattggggatgctgggtgggtgtgtggtccatgttcagcgttctagcaacacgtgtgtgtgtgtgtgtgtaaaggctatgcagccaaaataccatctggccagacgggcccacccacaaaaaaaagcacaacacacaacacacaaacacacacacaaaacacaaacacaaaaggggcggcagc

SEQ ID NO: 306462 - DNA, 3751 bp, Homo sapiens
ggaggagtttcagcggatgcaggctcagctcctggaactccggacaaacaactaccagctttcagatgaactacgcaagaatggtgttgaactcaccagtcttcgacagaaggtcgcctacttggataaggagttcagcaaagctcagaaggcactgagcaagagcaagaaagctcaggaagtcgaggtattgctgagtgaaaatgagatgctgcaggcaaagctgcacagccaggaggaggacttccgtttgcagaacagcacactaatggccgagttcagcaagctctgcagccagatggaacagctggagcaagagaaccagcaactgaaggagggggctgcaggagcaggggttgcccaagctgggcccctcgtggatggggagctgctgaggctacaggctgaaaacacagccttgcagaagaacgtggcagccctgcaggaacgctatgggaaagaagccgggaagttctcagctgtcagtgagggccagggggatcccccagggggcccggcccccaccgtcctggcccccatgccgttggcagaggtggagctgaaatgggaaatggagaaagaggagaagagattgctctgggaacagctgcaaggcttagagagctcaaagcaggccgaaacatccaggctgcaggaggaacttgctaagctctccgagaaactgaaaaagaaacaagaaagtttttgccgtctgcagacagaaaaggagactctgtttaatgacagcaggaacaagattgaggaattacaacaacggaaggaagctgatcacaaagcccagttggctcgaacccagaagctgcagcaggaacttgaggctgccaatcagagcttggcagagctgagagatcagcggcagggggagcgcctggaacatgcagcagctttgcgggccctacaagatcaggtatccatccagagtgcagatgcacaggaacaagtggaagggcttttggctgagaacaatgccttgaggactagcctggctgccctggagcagatccaaacagcaaagacccaagaactgaatatgctccgggaacagaccactgggctggcagctgagttgcagcagcagcaggctgagtacgaggaccttatgggacagaaagatgacctcaactcccagctccaggagtcattacgggccaatagtcgactgctggaacaacttcaagaaatagggcaggagaaggagcagttgacccaggaattacaggaggctcggaagagtgcggagaagcggaaggccatgctggatgagctagcaatggaaacgctgcaagagaagtcccagcacaaggaagagctgggagcagttcgtctacggcatgagaaggaggtgctgggggtgcgtgcccgctatgagcgtgagctccgagagctgcatgaagacaagaagcgtcaggaggaggagctccgtgggcagatccgggaggagaaggcccggacacgggagctggagactctccagcagacagtggaagaacttcaagctcaggtacattccatggatggagccaagggctggtttgaacggcgcttgaaggaagccgaggaatccctgcagcagcagcagcaggaacaagaggaagccctcaagcagtgtcgggagcagcacgctgccgagctgaagggcaaggaggaggagctacaggatgtacgggatcagctcgagcaggcccaggaggagcgggactgccacctgaagaccattagcagcctgaagcaggaggtgaaggacacagtggatgggcagaggatcctggagaagaagggcagtgctgcgctcaaggacctcaagcggcagctgcatttggagcggaaacgggcagataagctgcaggagcgactgcaggacatcctcactaacagcaagagccgctcaggccttgaggagctggttctctcagagatgaactcaccaagccggacccagacaggggacagcagtagcatctcctccttcagctaccgggagatcttgcgggaaaaggagagctcggctgttccagccaggtccttatccagcagccctcaagcccagccccctcggccagcagagctgtcagatgaggaagtggctgagctctttcagcggctggcagagacacagcaggagaaatggatgctggaggagaaggtgaagcacctggaagtgagcagtgcttccatggcagaggacctctgccggaagagcgccatcattgagacctacgtcatggacagccggatcggtcagtgtcccctccccggccctcagccctggtccagccttcacctggccctccctctccattctgtgctgcggcttctctcctctcctctcggaactcagcgaagctactgacaagaccatggcctgtggaggggagaacaggaaagcactgtctcttgatctcgcctcctccctcttctctctttctctgtcatctctccactctccattctccattgtgtctctctgtccactttctcctttcctctccctgtgcctcatcttcctctcctctctctctcccttctctcttctccgtttctctttttcaccccactccttcatcttgtctcgctgtctatattgttttccttctctgtatcttcattgcttttgctttctttcaaactttctccttcacagatttttctttattaatcagaatcatactgaccaacatgtgctgaggactttctgtgtgctctgtgcttcacatacagtcatgtgcatctttccagttccacaagttagttatcctcatttctcggggccatagagctagtgagtgacagagctaggttttgtatgtcaaagcctctgtcctacatgacatggcttttcctgctgccttctcccctggtattcgtctccctcttttctcctctggctctgcctggctctcctctggctctgccgagggggtggttttcagcctgggcccttgcagatgtgtctgtggcagcaggccacacagaccgcagcgggctgggcagcgtcctgagagacctagtgaagccaggcgacgagaaccttcgggagatgaacaagaagctgcagaacatgctggaggagcagctcaccaagaatatgcacttgcacaaggatatggaagttctgtcccaggaaattgtgcggctcagcaaggagtgcgtggggcctcctgacccagacctagagccaggagaaaccagctaaagacctgcaggctgcacccacctcctccccttcctaccccctaggatgctattcccttgggctgtggtggaaaaatgagggctggagccaaaatcaaatagcttgggagactggacattaaaggggctagaggcctgatggttagtgttaatgatcctgtcttagggcagaggccaccagggagtggggatcctgagggaaggggcagggatttctccttcttcttggtcctggctcccaagggcttctgtcttcatctctgcatgagctctccttcccagagaccaactcttttttattttattttattttattttttaatttatgtctggagcctggctactctgcatttgggattggggatgctgggtgggtgtgtggtccatgttcagcgttctagcaacacgtgtgtgtgtgtgtgtgtaaaggctatgcagccaaaataccatctggccagacgggcccacccacaaaaaaaagcacaacacacaacacacaaacacacacacaaaacacaaacacaaaaggggcggcagc

SEQ ID NO: 306463 - DNA, 1456 bp, Homo sapiens
actccctattttgcattttaccagattccactagttaattctccttacatttctacggggccatatagctacgtgagtaacagagctagtttttgtatttcataacttctgacccccttgacatggcttttcctgctgccttctctctttctctgtcatctctccactctccattctccattgtgtctctctgtccactttctcctttcctctccctgtgcctcatcttcctctcctctctctctcccttctctcttctccgtttctctttttcaccccactccttcatcttgtctcgctgtctatattgttttccttctctgtatcttcattgcttttgctttctttcaaactttctccttcacagatttttctttattaatcagaatcatactgaccaacatgtgctgaggactttctgtgtgctctgtgcttcacatacagtcatgtgcatctttccagttccacaagttagttatcctcatttctcggggccatagagctagtgagtgacagagctaggttttgtatgtcaaagcctctgtcctacatgacatggcttttcctgctgccttctcccctggtattcgtctccctcttttctcctctggctctgcctggctctcctctggctctgccgagggggtggttttcagcctgggcccttgcagatgtgtctgtggcagcaggccacacagaccgcagcgggctgggcagcgtcctgagagacctagtgaagccaggcgacgagaaccttcgggagatgaacaagaagctgcagaacatgctggaggagcagctcaccaagaatatgcacttgcacaaggatatggaagttctgtcccaggaaattgtgcggctcagcaaggagtgcgtggggcctcctgacccagacctagagccaggagaaaccagctaaagacctgcaggctgcacccacctcctccccttcctaccccctaggatgctattcccttgggctgtggtggaaaaatgagggctggagccaaaatcaaatagcttgggagactggacattaaaggggctagaggcctgatggttagtgttaatgatcctgtcttagggcagaggccaccagggagtggggatcctgagggaaggggcagggatttctccttcttcttggtcctggctcccaagggcttctgtcttcatctctgcatgagctctccttcccagagaccaactcttttttattttattttattttattttttaatttatgtctggagcctggctactctgcatttgggattggggatgctgggtgggtgtgtggtccatgttcagcgttctagcaacacgtgtgtgtgtgtgtgtgtaaaggctatgcagccaaaataccatctggccagacgggcccacccacaaaaaaaagcacaacacacaacacacaaacacacacacaaaacacaaacacaaaaggggcggcagc

SEQ ID NO: 306464 - DNA, 2586 bp, Homo sapiens
ggaggagtttcagcggatgcaggctcagctcctggaactccggacaaacaactaccagctttcagatgaactacgcaagaatggtgttgaactcaccagtcttcgacagaaggtcgcctacttggataaggagttcagcaaagctcagaaggcactgagcaagagcaagaaagctcaggaagtcgaggtattgctgagtgaaaatgagatgctgcaggcaaagctgcacagccaggaggaggacttccgtttgcagaacagcacactaatggccgagttcagcaagctctgcagccagatggaacagctggagcaagagaaccagcaactgaaggagggggctgcaggagcaggggttgcccaagctgggcccctcgtggatggggagctgctgaggctacaggctgaaaacacagccttgcagaagaacgtggcagccctgcaggaacgctatgggaaagaagccgggaagttctcagctgtcagtgagggccagggggatcccccagggggcccggcccccaccgtcctggcccccatgccgttggcagaggtggagctgaaatgggaaatggagaaagaggagaagagattgctctgggaacagctgcaaggcttagagagctcaaagcaggccgaaacatccaggctgcaggaggaacttgctaagctctccgagaaactgaaaaagaaacaagaaagtttttgccgtctgcagacagaaaaggagactctgtttaatgacagcaggaacaagattgaggaattacaacaacggaaggaagctgatcacaaagcccagttggctcgaacccagaagctgcagcaggaacttgaggctgccaatcagagcttggcagagctgagagatcagcggcagggggagcgcctggaacatgcagcagctttgcgggccctacaagatcaggtatccatccagagtgcagatgcacaggaacaagtggaagggcttttggctgagaacaatgccttgaggactagcctggctgccctggagcagatccaaacagcaaagacccaagaactgaatatgctccgggaacagaccactgggctggcagctgagttgcagcagcagcaggctgagtacgaggaccttatgggacagaaagatgacctcaactcccagctccaggagtcattacgggccaatagtcgactgctggaacaacttcaagaaatagggcaggagaaggagcagttgacccaggaattacaggaggctcggaagagtgcggagaagcggaaggccatgctggatgagctagcaatggaaacgctgcaagagaagtcccagcacaaggaagagctgggagcagttcgtctacggcatgagaaggaggtgctgggggtgcgtgcccgctatgagcgtgagctccgagagctgcatgaagacaagaagcgtcaggaggaggagctccgtgggcagatccgggaggagaaggcccggacacgggagctggagactctccagcagacagtggaagaacttcaagctcaggtacattccatggatggagccaagggctggtttgaacggcgcttgaaggaagccgaggaatccctgcagcagcagcagcaggaacaagaggaagccctcaagcagtgtcgggagcagcacgctgccgagctgaagggcaaggaggaggagctacaggatgtacgggatcagctcgagcaggcccaggaggagcgggactgccacctgaagaccattagcagcctgaagcaggaggtgaaggacacagtggatgggcagaggatcctggagaagaagggcagtgctgcgctcaaggacctcaagcggcagctgcatttggagcggaaacgggcagataagctgcaggagcgactgcaggacatcctcactaacagcaagagccgctcaggccttgaggagctggttctctcagagatgaactcaccaagccggacccagacaggggacagcagtagcatctcctccttcagctaccgggagatcttgcgggaaaaggagagctcggctgttccagccaggtccttatccagcagccctcaagcccagccccctcggccagcagagctgtcagatgaggaagtggctgagctctttcagcggctggcagagacacagcaggagaaatggatgctggaggagaaggtgaagcacctggaagtgagcagtgcttccatggcagaggacctctgccggaagagcgccatcattgagacctacgtcatggacagccggatcgatgtgtctgtggcagcaggccacacagaccgcagcgggctgggcagcgtcctgagagacctagtgaagccagagaccaactcttttttattttattttattttattttttaatttatgtctggagcctggctactctgcatttgggattggggatgctgggtgggtgtgtggtccatgttcagcgttctagcaacacgtgtgtgtgtgtgtgtgtaaaggctatgcagccaaaataccatctggccagacgggcccacccacaaaaaaaagcacaacacacaacacacaaacacacacacaaaacacaaacacaaaaggggcggcagc

SEQ ID NO: 306465 - DNA, 2121 bp, Homo sapiens
ggaggagtttcagcggatgcaggctcagctcctggaactccggacaaacaactaccagctttcagatgaactacgcaagaatggtgttgaactcaccagtcttcgacagaaggtcgcctacttggataaggagttcagcaaagctcagaaggcactgagcaagagcaagaaagctcaggaagtcgaggtattgctgagtgaaaatgagatgctgcaggcaaagctgcacagccaggaggaggacttccgtttgcagaacagcacactaatggccgagttcagcaagctctgcagccagatggaacagctggagcaagagaaccagcaactgaaggagggggctgcaggagcaggggttgcccaagctgggcccctcgtggatggggagctgctgaggctacaggctgaaaacacagccttgcagaagaacgtggcagccctgcaggaacgctatgggaaagaagccgggaagttctcagctgtcagtgagggccagggggatcccccagggggcccggcccccaccgtcctggcccccatgccgttggcagaggtggagctgaaatgggaaatggagaaagaggagaagagattgctctgggaacagctgcaaggcttagagagctcaaagcaggccgaaacatccaggctgcaggaggaacttgctaagctctccgagaaactgaaaaagaaacaagaaagtttttgccgtctgcagacagaaaaggagactctgtttaatgacagcaggaacaagattgaggaattacaacaacggaaggaagctgatcacaaagcccagttggctcgaacccagaagctgcagcaggaacttgaggctgccaatcagagcttggcagagctgagagatcagcggcagggggagcgcctggaacatgcagcagctttgcgggccctacaagatcaggtatccatccagagtgcagatgcacaggaacaagtggaagggcttttggctgagaacaatgccttgaggactagcctggctgccctggagcagatccaaacagcaaagacccaagaactgaatatgctccgggaacagaccactgggctggcagctgagttgcagcagcagcaggctgagtacgaggaccttatgggacagaaagatgacctcaactcccagctccaggagtcattacgggccaatagtcgactgctggaacaacttcaagaaatagggcaggagaaggagcagttgacccaggaattacaggaggctcggaagagtgcggagaagcggaaggccatgctggatgagctagcaatggaaacgctgcaagagaagtcccagcacaaggaagagctgggagcagttcgtctacggcatgagaaggaggtgctgggggtgcgtgcccgctatgagcgtgagctccgagagctgcatgaagacaagaagcgtcaggaggaggagctccgtgggcagatccgggaggagaagaccccattctataccaacacctattctgatccacggtcaccctgaagtctatatcttatcctaccaggcttcggactaatctcccatattgtaacttactactccggaaaaaaagaaccatctggatacataggtatggcctgagctcatgatatcaattggcttcccaaggagacatccgtgtgagcacaccatatatgcacagacaggcacatagaccgtagacaacacgagcatatttcagctccgctaccataatccattgtattcccaaccggcgtcaagcaattagctgacgtcgcaaatccacgggaaacgcacgcacggcaaagagacctgcggcactgaccacgaaaaccaaggacacagacaacataaccaccgacagggggccggaaggggaataggcgataccaaagcataacagagacaacgagccacaccagaacgacaaaacgaggaacgcacacacacaaaagagccgacacaagagcgcggctattccaacgagccaacggacgacaccacgaagacaccaacaccagcggagcaccactaaaacacacacgcacacccacagcatcacagatagcgcgaggccaaccacccaccacaccgcgcaaaaagcaagagacaaactgacggcacgacaaaaa

SEQ ID NO: 306466 - DNA, 1604 bp, Homo sapiens
tacagtatgtgaaatactctcaccagaacaaaggtcccagcgtcaataagtcaaaccgcagactctgacagctgagtgaatagcagaggccagagtccacttgaagtgttcacactctcagaggccaagtttagatcttatctgcctgagattccttttaacactgatttgtcatagcaggtagctgacagcatctactcctgaagaccggaaacatggcttgtaccatccaaaaggcagaagcacttgacggggctcatttgatgcagatcctctggtatgatgaggaagagtctctctacccagctgtatggttgagagacaactgtccgtgctctgattgctacctggattctgcaaaagcacggaaacttctagtggaagctcttgatgtgaacattggaattaaaggcttgatatttgacagaaaaaaggtgtacatcacatggcccgatgagcattacagtgaattccaggctgattggctgaagaaaagatgcttttccaagcaggccagagcaaagctccaaagagaattgttttttccagaatgccaatactggggctcagagctccagctacccactttggattttgaagatgttttaagatatgatgaacacgcatacaagtggctctccaccctcaagaaagtaggcatagtaagactcaccggagcatctgacaaaccaggagaagtttcaaaacttgggaaaaggatgggtttcctctatctcacattttatggacatacttggcaagtgcaagacaaaatcgatgcaaacaatgtggcttacacaactgggaagctaagctttcacactgattatccagccctccatcatccacctggggttcagcttcttcactgcataaagcaaacagtcacagggggtgattcagaaattgtagatgggtttaatgtgtgccaaaaactaaagaaaaataatcctcaggcattccagattttgtcctctacctttgtggactttacagacattggagtggattactgtgatttttctgtacaatcaaaacataaaattatagagttagatgataaaggccaagtggttcgcatcaacttcaataacgcaactagggacacaatatttgatgtgcctgttgaaagagttcagcctttttatgctgctctgaaggagtttgttgacctcatgaacagcaaagaatccaagtttaccttcaagatgaatccaggtgatgtgattacttttgataactggcgcttacttcatggccgacgtagctatgaagcaggaactgagatatcccgccatctagaaggagcttatgctgactgggatgtggtcatgtcaaggcttcgtatcttaaggcagagggtggagaatggaaactgaagtcacctgtagataattttaataagattccaatgaccatattttgtgagatatggcacattattcacagaccatgatctttgtgatttacatataatttccttaacaatgaacatgtaacttctctcacaagagtactctttactttgtaatcatatacaatgtcaactttttagatgtttcaccactcttttgcaaataaagcatcctttctgctctgttgca

SEQ ID NO: 306467 - DNA, 614 bp, Homo sapiens
cagccaaaattgcagagaaaggagggcatcaagcttaggggaccaatccctgtctttctaccagtccctgataactactcaagctccctttaaagaggctcatattggaatactctgttgacaagtagataccacttcacctctgctagggtgagcgctggtagctcctccctgttaaatgcccatctcaatgcctctgccctaagtgagttgtgcaataaatgagctgtcactctgaacaggtgggaaagaagtgaactgcttgttcacttgctgctgttgccactgctggtacagaaatagaagcacaaaaaaacaaagacaaaaaacctccaagctcccttcagtagttgctacaccttcagattgagacatccttcctcatttacaaacctcagctgtgtctggggcagggccacagtgaaactgccaggagcaaaaaggcttccaagaaaaagtaccacatcgagattggaaactggggacagatcattcctgggatgtgacgggcaccagaatgctccctctccaaaggatctaaggaccaaagctgacagtttctttacttgtgctgaagaatcaggagacaaacttgaatttgtaatattaagaaa

SEQ ID NO: 306468 - DNA, 2123 bp, Homo sapiens
cagccaaaattgcagagaaaggagggcatcaagcttaggggaccaatccctgtctttctaccagtccctgataactactcaagctccctttaaagaggctcatattggaatactctgttgacaagtagataccacttcacctctgctagggtgagcgctggtagctcctccctgttaaatgcccatctcaatgcctctgccctaagtgagttgtgcaataaatgagctgtcactctgaacaggtgggaaagaagtgaactgcttgttcacttgctgctgttgccactgctggtacagaaatagaagcacaaaaaaacaaagacaaaaaacctccaagctcccttcagtagttgctacaccttcagattgagacatccttcctcatttacaaacctcagctgtgtctggggcagggccacagtgaaactgccaggagcaaaaaggcttccaagaaaaagtaccacatcgagattggaaactggggacagatcattcctgggatgtgacgggcaccagaatgctccctctccaaaggatctaaggaccaaagctgacagtttctttacttggtagctgacagcatctactcctgaagaccggaaacatggcttgtaccatccaaaaggcagaagcacttgacggggctcatttgatgcagatcctctggtatgatgaggaagagtctctctacccagctgtatggttgagagacaactgtccgtgctctgattgctacctggattctgcaaaagcacggaaacttctagtggaagctcttgatgtgaacattggaattaaaggcttgatatttgacagaaaaaaggtgtacatcacatggcccgatgagcattacagtgaattccaggctgattggctgaagaaaagatgcttttccaagcaggccagagcaaagctccaaagagaattgttttttccagaatgccaatactggggctcagagctccagctacccactttggattttgaagatgttttaagatatgatgaacacgcatacaagtggctctccaccctcaagaaagtaggcatagtaagactcaccggagcatctgacaaaccaggagaagtttcaaaacttgggaaaaggatgggtttcctctatctcacattttatggacatacttggcaagtgcaagacaaaatcgatgcaaacaatgtggcttacacaactgggaagctaagctttcacactgattatccagccctccatcatccacctggggttcagcttcttcactgcataaagcaaacagtcacagggggtgattcagaaattgtagatgggtttaatgtgtgccaaaaactaaagaaaaataatcctcaggcattccagattttgtcctctacctttgtggactttacagacattggagtggattactgtgatttttctgtacaatcaaaacataaaattatagagttagatgataaaggccaagtggttcgcatcaacttcaataacgcaactagggacacaatatttgatgtgcctgttgaaagagttcagcctttttatgctgctctgaaggagtttgttgacctcatgaacagcaaagaatccaagtttaccttcaagatgaatccaggtgatgtgattacttttgataactggcgcttacttcatggccgacgtagctatgaagcaggaactgagatatcccgccatctagaaggagcttatgctgactgggatgtggtcatgtcaaggcttcgtatcttaaggcagagggtggagaatggaaactgaagtcacctgtagataattttaataagattccaatgaccatattttgtgagatatggcacattattcacagaccatgatctttgtgatttacatataatttccttaacaatgaacatgtaacttctctcacaagagtactctttactttgtaatcatatacaatgtcaactttttagatgtttcaccactcttttgcaaataaagcatcctttctgctctgttgcatgcctgctctaatttcttttgcccatatatgagtatctccagaatgtctacaaatagtttttgtagcaaatgaaaatttcttcaaataagccttttgtttcaaataaaacttgtctcaaaacatgcttct

SEQ ID NO: 306469 - DNA, 1794 bp, Homo sapiens
cagccaaaattgcagagaaaggagggcatcaagcttaggggaccaatccctgtctttctaccagtccctgataactactcaagctccctttaaagaggctcatattggaatactctgttgacaagtagataccacttcacctctgctagggtgagcgctggtagctcctccctgttaaatgcccatctcaatgcctctgccctaagtgagttgtgcaataaatgagctgtcactctgaacaggtgggaaagaagtgaactgcttgttcacttgctgctgttgccactgctggtacagaaatagaagcacaaaaaaacaaagacaaaaaacctccaagctcccttcagtagttgctacaccttcagattgagacatccttcctcatttacaaacctcagctgtgtctggggcagggccacagtgaaactgccaggagcaaaaaggcttccaagaaaaagtaccacatcgagattggaaactggggacagatcattcctgggatgtgacgggcaccagaatgctccctctccaaaggatctaaggaccaaagctgacagtttctttacttggtagctgacagcatctactcctgaagaccggaaacatggcttgtaccatccaaaaggcagaagcacttgacggggctcatttgatgcagatcctctggtatgatgaggaagagtctctctacccagctgtatggttgagagacaactgtccgtgctctgattgctacctggattctgcaaaagcacggaaacttctagtggaagctcttgatgtgaacattggaattaaaggcttgatatttgacagaaaaaaggtgtacatcacatggcccgatgagcattacagtgaattccaggctgattggctgaagaaaagatgcttttccaagcaggccagagcaaagctccaaagagaattgttttttccagacatacttggcaagtgcaagacaaaatcgatgcaaacaatgtggcttacacaactgggaagctaagctttcacactgattatccagccctccatcatccacctggggttcagcttcttcactgcataaagcaaacagtcacagggggtgattcagaaattgtagatgggtttaatgtgtgccaaaaactaaagaaaaataatcctcaggcattccagattttgtcctctacctttgtggactttacagacattggagtggattactgtgatttttctgtacaatcaaaacataaaattatagagttagatgataaaggccaagtggttcgcatcaacttcaataacgcaactagggacacaatatttgatgtgcctgttgaaagagttcagcctttttatgctgctctgaaggagtttgttgacctcatgaacagcaaagaatccaagtttaccttcaagatgaatccaggtgatgtgattacttttgataactggcgcttacttcatggccgacgtagctatgaagcaggaactgagatatcccgccatctagaaggagcttatgctgactgggatgtggtcatgtcaaggcttcgtatcttaaggcagagggtggagaatggaaactgaagtcacctgtagataattttaataagattccaatgaccatattttgtgagatatggcacattattcacagaccatgatctttgtgatttacatataatttccttaacaatgaacatgtaacttctctcacaagagtactctttactttgtaatcatatacaatgtcaactttttagatgtttcaccactcttttgcaaataaagcatcctttctgctctgttgca

SEQ ID NO: 306470 - DNA, 1937 bp, Homo sapiens
cagccaaaattgcagagaaaggagggcatcaagcttaggggaccaatccctgtctttctaccagtccctgataactactcaagctccctttaaagaggctcatattggaatactctgttgacaagtagataccacttcacctctgctagggtgagcgctggtagctcctccctgttaaatgcccatctcaatgcctctgccctaagtgagttgtgcaataaatgagctgtcactctgaacaggtgggaaagaagtgaactgcttgttcacttgctgctgttgccactgctggtacagaaatagaagcacaaaaaaacaaagacaaaaaacctccaagctcccttcagtagttgctacaccttcagattgagacatccttcctcatttacaaacctcagctgtgtctggggcagggccacagtgaaactgccaggagcaaaaaggcttccaagaaaaagtaccacatcgagattggaaactggggacagatcattcctgggatgtgacgggcaccagaatgctccctctccaaaggatctaaggaccaaagctgacagtttctttacttggtagctgacagcatctactcctgaagaccggaaacatggcttgtaccatccaaaaggcagaagcacttgacggggctcatttgatgcagatcctctggtatgatgaggaagagtctctctacccagctgtatggttgagagacaactgtccgtgctctgattgctacctggattctgcaaaagcacggaaacttctagtggaagctcttgatgtgaacattggaattaaaggcttgatatttgacagaaaaaaggtgtacatcacatggcccgatgagcattacagtgaattccaggctgattggctgaagaaaatgccaatactggggctcagagctccagctacccactttggattttgaagatgttttaagatatgatgaacacgcatacaagtggctctccaccctcaagaaagtaggcatagtaagactcaccggagcatctgacaaaccaggagaagtttcaaaacttgggaaaaggatgggtttcctctatctcacattttatggacatacttggcaagtgcaagacaaaatcgatgcaaacaatgtggcttacacaactgggaagctaagctttcacactgattatccagccctccatcatccacctggggttcagcttcttcactgcataaagcaaacagtcacagggggtgattcagaaattgtagatgggtttaatgtgtgccaaaaactaaagaaaaataatcctcaggcattccagattttgtcctctacctttgtggactttacagacattggagtggattactgtgatttttctgtacaatcaaaacataaaattatagagttagatgataaaggccaagtggttcgcatcaacttcaataacgcaactagggacacaatatttgatgtgcctgttgaaagagttcagcctttttatgctgctctgaaggagtttgttgacctcatgaacagcaaagaatccaagtttaccttcaagatgaatccaggtgatgtgattacttttgataactggcgcttacttcatggccgacgtagctatgaagcaggaactgagatatcccgccatctagaaggagcttatgctgactgggatgtggtcatgtcaaggcttcgtatcttaaggcagagggtggagaatggaaactgaagtcacctgtagataattttaataagattccaatgaccatattttgtgagatatggcacattattcacagaccatgatctttgtgatttacatataatttccttaacaatgaacatgtaacttctctcacaagagtactctttactttgtaatcatatacaatgtcaactttttagatgtttcaccactcttttgcaaataaagcatcctttctgctctgttgca

SEQ ID NO: 306471 - DNA, 1969 bp, Homo sapiens
cagccaaaattgcagagaaaggagggcatcaagcttaggggaccaatccctgtctttctaccagtccctgataactactcaagctccctttaaagaggctcatattggaatactctgttgacaagtagataccacttcacctctgctagggtgagcgctggtagctcctccctgttaaatgcccatctcaatgcctctgccctaagtgagttgtgcaataaatgagctgtcactctgaacaggtgggaaagaagtgaactgcttgttcacttgctgctgttgccactgctggtacagaaatagaagcacaaaaaaacaaagacaaaaaacctccaagctcccttcagtagttgctacaccttcagattgagacatccttcctcatttacaaacctcagctgtgtctggggcagggccacagtgaaactgccaggagcaaaaaggcttccaagaaaaagtaccacatcgagattggaaactggggacagatcattcctgggatgtgacgggcaccagaatgctccctctccaaaggatctaaggaccaaagctgacagtttctttacttggtagctgacagcatctactcctgaagaccggaaacatggcttgtaccatccaaaaggcagaagcacttgacggggctcatttgatgcagatcctctggtatgatgaggaagagtctctctacccagctgtatggttgagagacaactgtccgtgctctgattgctacctggattctgcaaaagcacggaaacttctagtggaagctcttgatgtgaacattggaattaaaggcttgatatttgacagaaaaaaggtgtacatcacatggcccgatgagcattacagtgaattccaggctgattggctgaagaaaagatgcttttccaagcaggccagagcaaagctccaaagagaattgttttttccagaatgccaatactggggctcagagctccagctacccactttggattttgaagatgttttaagatatgatgaacacgcatacaagtggctctccaccctcaagaaagtaggcatagtaagactcaccggagcatctgacaaaccaggagaagtttcaaaacttgggaaaaggatgggtttcctctatctcacattttatggacatacttggcaagtgcaagacaaaatcgatgcaaacaatgtggcttacacaactgggaagctaagctttcacactgattatccagccctccatcatccacctggggttcagcttcttcactgcataaagcaaacagtcacagggggtgattcagaaattgtagatgggtttaatgtgtgccaaaaactaaagaaaaataatcctcaggcattccagattttgtcctctacctttgtggactttacagacattggagtggattactgtgatttttctgtacaatcaaaacataaaattatagagtaagtactatttataaatttcccatagcaataaaagaattgacaacaaaagatccactaatctaaagtttaaacagcacaaaacttcaacgaacttcagagctttatttttattaacatttcacccaattttagagtgatagtattttcaccataaaagtttttattaaattacataaaatttatccctaatcagtattagaggaaaagtaactaagatttcacgtatacttcatttttagaatataagttctacatagctataatcaatgtgattatactagttagaaggcttttggccagaagtgaaagaatataactcaaaataggttgatcccaagagttaaacaatgtcatgtgatattggtctcttttttcttcttagctttgccatcttctatgttagctttatttttcaaagatgatcagcagaagctccaagatttcattttccttacagctagtaatcacaccacaaacaatgcttttacttcccaataaagctagatgactcaatccctaaaaaaaa

SEQ ID NO: 306472 - DNA, 1056 bp, Homo sapiens
cagccaaaattgcagagaaaggagggcatcaagcttaggggaccaatccctgtctttctaccagtccctgataactactcaagctccctttaaagaggctcatattggaatactctgttgacaagtagataccacttcacctctgctagggtgagcgctggtagctcctccctgttaaatgcccatctcaatgcctctgccctaagtgagttgtgcaataaatgagctgtcactctgaacaggtgggaaagaagtgaactgcttgttcacttgctgctgttgccactgctggtacagaaatagaagcacaaaaaaacaaagacaaaaaacctccaagctcccttcagtagttgctacaccttcagattgagacatccttcctcatttacaaacctcagctgtgtctggggcagggccacagtgaaactgccaggagcaaaaaggcttccaagaaaaagtaccacatcgagattggaaactggggacagatcattcctgggatgtgacgggcaccagaatgctccctctccaaaggatctaaggaccaaagctgacagtttctttacttggtagctgacagcatctactcctgaagaccggaaacatggcttgtaccatccaaaaggcagaagcacttgacggggctcatttgatgcagatcctctggtatgatgaggaagagtctctctacccagctgtatggttgagagacaactgtccgtgctctgattgctacctggattctgcaaaagcacggaaacttctagtggaagctcttgatgtgaacattggaattaaaggcttgatatttgacagaaaaaaggtgtacatcacatggcccgatgagcattacagtgaattccaggctgattggctgaagaaaagatgcttttccaagcaggccagagcaaagctccaaagagaattgttttttccaggtaactttgccaaagtcttcaatgtctttttaaacccttacagtaaaggatttttattaagaaatttgctcacagaaaattcaaacctctgtgctttgattaaaatatgtgacatgta

SEQ ID NO: 306473 - DNA, 362 bp, Homo sapiens
ggacgcgtgggtcgacccacgctgtcgctcgccatggatcccaactgctcctgcgccgccggtgactcctgcacctgcgccggctcctgcaaatgcaaagagtgcaaatgcacctcctgcaagaaaagctgctgctcctgctgccctgtgggctgtgccaagtgtgcccagggctgcatctgcaaaggggcgtcggacaagtgcagctgctgcgcctgatgctgggacagccccgctcccagatgtaaagaacgcgacttccacaaacctggattttttatgtacaaccctgaccgtgaccgtttgctatattcctttttctatgaaataatgtgaatgataataaaacagctttgacttga

SEQ ID NO: 306474 - DNA, 391 bp, Homo sapiens
gcggccgcctactactactactactactgctcgaattcaagcttctaacgatgtacggggacatggatcccaactgctcctgcgccgccggtgactcctgcacctgcgccggctcctgcaaatgcaaagagtgcaaatgcacctcctgcaagaaaagctgctgctcctgctgccctgtgggctgtgccaagtgtgcccagggctgcatctgcaaaggggcgtcggacaagtgcagctgctgcgcctgatgctgggacagccccgctcccagatgtaaagaacgcgacttccacaaacctggattttttatgtacaaccctgaccgtgaccgtttgctatattcctttttctatgaaataatgtgaatgataataaaacagctttgacttga

SEQ ID NO: 306475 - DNA, 525 bp, Homo sapiens
  misc_feature (432)..(432): n is a, c, g, or t
  misc_feature (434)..(435): n is a, c, g, or t
  misc_feature (441)..(441): n is a, c, g, or t
ggacgcgtgggtcgacccacgctgtcgctcgccatggatcccaactgctcctgcgccgccggtgactcctgcacctgcgccggctcctgcaaatgcaaagagtgcaaatgcacctcctgcaagaaaagctgctgctcctgctgccctgtgggctgtgccaagtgtgcccagggctgcatctgcaaaggggcgtcggacaagtgcagctgctgcgcctgatgctgggacagccccgctcccagatgtaaagaacgcgacttccacaaacctggattttttatgtacaaccctgaccgtgaccgtttgctatattcctttttctatgaaataatgtgaatgataataaaacagctttgacttgaaaaaaaaaacaaaaaaaaaaaaaaaacattttggggcggcctgggcccagaaaaagtttttaaaaccttntnnttgggngcggggcccttgggttcggtgcacctgggccacgggggccccaaggagaccggggcggcacggggcggggttccccaaaaaaaa

SEQ ID NO: 306476 - DNA, 389 bp, Homo sapiens
caagtcccagcgaacccgcgtgcaaactgtcccggactctagccgcctcttcagctcgccatggatcccaactgctcctgcgccgccggtgactcctgcacctgcgccggctcctgcaaatgcaaagagtgcaaatgcacctcctgcaagaaaagctgctgctcctgctgccctgtgggctgtgccaagtgtgcccagggctgcatctgcaaaggggcgtcggacaagtgcagctgctgcgcctgatgctgggacagccccgctcccagatgtaaagaacgcgacttccacaaacctggattttttatgtacaaccctgaccgtgaccgtttgctatattcctttttctatgaaataatgtgaatgataataaaacagctttgacttga

SEQ ID NO: 306477 - DNA, 697 bp, Homo sapiens
caagtcccagcgaacccgcgtgcaaactgtcccggactctagccgcctcttcagctcgccatggatcccaactgctcctgcgccgccggtaagaggctggggatgcccagtgtagactgtagcgctagagaagcaatttctgacccctctttctttctctggtcactcaatttcaggacaggagttgctccttcccaaagagttttggggtatctttctctccattctaggttattcggagccccctttttaccgttaaggagatctgagttaatggcttgctcaagttcccaggaatcggttgtggactgaggaactcggccccgggctcttagtacgccgtcccttgttcaggtatccagggacggttctcacctctgtcttttctccttgcaggtgactcctgcacctgcgccggctcctgcaaatgcaaagagtgcaaatgcacctcctgcaagaaaagctgctgctcctgctgccctgtgggctgtgccaagtgtgcccagggctgcatctgcaaaggggcgtcggacaagtgcagctgctgcgcctgatgctgggacagccccgctcccagatgtaaagaacgcgacttccacaaacctggattttttatgtacaaccctgaccgtgaccgtttgctatattcctttttctatgaaataatgtgaatgataataaaacagctttgacttga

SEQ ID NO: 306478 - DNA, 903 bp, Homo sapiens
caagtcccagcgaacccgcgtgcaaactgtcccggactctagccgcctcttcagctcgccatggatcccaactgctcctgcgccgccggtaagaggctggggatgcccagtgtagactgtagcgctagagaagcaatttctgacccctctttctttctctggtcactcaatttcaggacaggagttgctccttcccaaagagttttggggtatctttctctccattctaggttattcggagccccctttttaccgttaaggagatctgagttaatggcttgctcaagttcccaggaatcggttgtggactgaggaactcggccccgggctcttagtacgccgtcccttgttcaggtatccagggacggttctcacctctgtcttttctccttgcaggtgactcctgcacctgcgccggctcctgcaaatgcaaagagtgcaaatgcacctcctgcaagaaaaagtaagtgggatcctctctttcctctaccccttccctgtcctccagcctgtcccctctccaccatcctcaggggaattaaagcagtctggggatgccccattgcgcggaaattgttgcctcctcagtgatccttatcagggagagcaggaatccttattcccggtgtcgctagtactcatctctgccgcctcctgtctgcccccaggctgctgctcctgctgccctgtgggctgtgccaagtgtgcccagggctgcatctgcaaaggggcgtcggacaagtgcagctgctgcgcctgatgctgggacagccccgctcccagatgtaaagaacgcgacttccacaaacctggattttttatgtacaaccctgaccgtgaccgtttgctatattcctttttctatgaaataatgtgaatgataataaaacagctttgacttga

SEQ ID NO: 306479 - DNA, 494 bp, Homo sapiens
gcctcagctctcagcaacatggtggctgccctgagagaagggggctttctgctcctgcacacactgctccgggggcaccccctcggggacatcgtggccttcctcacctccactgagccgcagtatggccagggcatcctgagccaggacgcgtgggagagcctcttctccagggtgtcgctgcgcctggtgggcctgaagaagtccttctacggctcctgcaaatgcaaagagtgcaaatgcacctcctgcaagaaaagctgctgctcctgctgccctgtgggctgtgccaagtgtgcccagggctgcatctgcaaaggggcgtcggacaagtgcagctgctgcgcctgatgctgggacagccccgctcccagatgtaaagaacgcgacttccacaaacctggattttttatgtacaaccctgaccgtgaccgtttgctatattcctttttctatgaaataatgtgaatgataataaaacagctttgacttga

SEQ ID NO: 306480 - DNA, 441 bp, Homo sapiens
caagtcccagcgaacccgcgtgcaaactgtcccggactctagccgcctcttcagctcgccatggatcccaactgctcctgcgccgccggtgactcctgcacctgcgccggctcctgcaaatgcaaagagtgcaaatgcacctcctgcaagaaaagctgctgctcctgctgccctgtgggctgtgccaagtgtgcccagggctgcatctgcaaaggggcgtcggacaagtgcagctgctgcgcctgatgctgggacagccccgctcccagatgtaaagaacgcgacttccacaaacctggattttttatgtacaaccctgaccgtgaccgtttgctatattcctttttctatgaaataatgtgaatgataataaaacagctttgacttgaaaaaaaaatgaaattcatgcaaatatatgtcaagtgccagaactaaaaaaaa

SEQ ID NO: 306481 - DNA, 267 bp, Homo sapiens
acccccgccccccgggaaaaaaaataacttaggctgctgctcctgctgccctgtgggctgtgccaagtgtgcccagggctgcatctgcaaaggggcgtcggacaagtgcagctgctgcgcctgatgctgggacagccccgctcccagatgtaaagaacgcgacttccacaaacctggattttttatgtacaaccctgaccgtgaccgtttgctatattcctttttctatgaaataatgtgaatgataataaaacagctttgacttga

SEQ ID NO: 306482 - DNA, 334 bp, Homo sapiens
caagtcccagcgaacccgcgtgcaaactgtcccggactctagccgcctcttcagctcgccatggatcccaactgctcctgcgccgccggtgactcctgcacctgcgccggctcctgcaaatgcaaagagtgcaaatgcacctcctgcaagaaaacaaaggggcgtcggacaagtgcagctgctgcgcctgatgctgggacagccccgctcccagatgtaaagaacgcgacttccacaaacctggattttttatgtacaaccctgaccgtgaccgtttgctatattcctttttctatgaaataatgtgaatgataataaaacagctttgacttga

SEQ ID NO: 306483 - DNA, 308 bp, Homo sapiens
caagtcccagcgaacccgcgtgcaaactgtcccggactctagccgcctcttcagctcgccatggatcccaactgctcctgcgccgccggtgactcctgcacctgcgccggctcctgcaaatgcaaagacaaaggggcgtcggacaagtgcagctgctgcgcctgatgctgggacagccccgctcccagatgtaaagaacgcgacttccacaaacctggattttttatgtacaaccctgaccgtgaccgtttgctatattcctttttctatgaaataatgtgaatgataataaaacagctttgacttga

SEQ ID NO: 306484 - DNA, 164 bp, Homo sapiens
ctgccttccaacgccatggggagcaatctcagccccgctcccagatgtaaagaacgcgacttccacaaacctggattttttatgtacaaccctgaccgtgaccgtttgctatattcctttttctatgaaataatgtgaatgataataaaacagctttgacttga

SEQ ID NO: 306485 - DNA, 604 bp, Homo sapiens
  misc_feature (439)..(439): n is a, c, g, or t
ggacgcgtgggtcgacccacgctgtcgctcgccatggatcccaactgctcctgcgccgccggtgactcctgcacctgcgccggctcctgcaaatgcaaagagtgcaaatgcacctcctgcaagaaaagctgctgctcctgctgccctgtgggctgtgccaagtgtgcccagggctgcatctgcaaaggggcgtcggacaagtgcagctgctgcgcctgatgctgggacagccccgctcccagatgtaaagaacgcgacttccacaaacctggattttttatgtacaaccctgaccgtgaccgtttgctatattcctttttctatgaaataatgtgaatgataataaaacagctttgacttgaaaaaaaaaaaaaaaaaaaaaaaaaaaaaaaaaaaaaaaaaaaaaaaaaaaaaaaaaaaaacaaaaaaaaaacaaaanaaaaccgaacagacagagaaaattagggagaagggggggaaaacgacgagaagagcaagacagacgacacggagacacagcggtcccccacagcgcagctgatgcagacaaaggggggagacaaccggcgcggcaccaaggaggggccggatacaacacaagacg

SEQ ID NO: 306486 - DNA, 633 bp, Homo sapiens
  misc_feature (468)..(468): n is a, c, g, or t
gcggccgcctactactactactactactgctcgaattcaagcttctaacgatgtacggggacatggatcccaactgctcctgcgccgccggtgactcctgcacctgcgccggctcctgcaaatgcaaagagtgcaaatgcacctcctgcaagaaaagctgctgctcctgctgccctgtgggctgtgccaagtgtgcccagggctgcatctgcaaaggggcgtcggacaagtgcagctgctgcgcctgatgctgggacagccccgctcccagatgtaaagaacgcgacttccacaaacctggattttttatgtacaaccctgaccgtgaccgtttgctatattcctttttctatgaaataatgtgaatgataataaaacagctttgacttgaaaaaaaaaaaaaaaaaaaaaaaaaaaaaaaaaaaaaaaaaaaaaaaaaaaaaaaaaaaaacaaaaaaaaaacaaaanaaaaccgaacagacagagaaaattagggagaagggggggaaaacgacgagaagagcaagacagacgacacggagacacagcggtcccccacagcgcagctgatgcagacaaaggggggagacaaccggcgcggcaccaaggaggggccggatacaacacaagacg

SEQ ID NO: 306487 - DNA, 1231 bp, Homo sapiens
ggacgcgtgggtcgacccacgctgtcgctcgccatggatcccaactgctcctgcgccgccggtgactcctgcacctgcgccggctcctgcaaatgcaaagagtgcaaatgcacctcctgcaagaaaagctgctgctcctgctgccctgtgggctgtgccaagtgtgcccagggctgcatctgcaaaggggcgtcggacaagtgcagctgctgcgcctgatgctgggacagccccgctcccagatgtaaagaacgcgacttccacaaacctggattttttatgtacaaccctgaccgtgaccgtttgctatattcctttttctatgaaataatgtgaatgataataaaacagctttgacttgaaaaaaaaaaaaaaaaaaaaaaaaaaaaaaacaaacaaacaaaaaaactaaaaacacacacacacaaaacaacaaaacaaacacacaacaacacacacacaacacaaacaaaaacaaaacacacagaacgggggggcgcgcacgccacgaataatattctctcacaagagggagagcacgacaccaagcagaaacccacaccacctatacttgttataaaaagaagaaggggcagcccaaaataataaaataagagtactatatatattaagaaagacaaacaacactagcaccagccgatatataaacaaacaaaaaaagacaggaaaacagatgagacgcaaaacgacaatagacgatacgaacagagcaatcgacgactactgtagtcgataaatcacaaggacagcagacaacaaatcacatcatatctactcctcgacgggagagacgcgcacgaacatcaataaaagccgcgactgcagccacccacaaaacaatacaacccatctatcagaaactataattagtatatctaaactaacggaacccagaacaggcggggaggataagatactgatctaacaaacaaaacgaaactactacctgacaagaacagaacagaaaagtacagcagcgcagtgtgagggctgaagaaatgtaagatacgagtaaaaaaaggaacaaatgcgccccgaaggacagacgagacgcaggaacggacagtatataagaagcgcagcaagacccgacccgttggactcagctgcgagacacgaataagacagaggagacaatagagcgagcaaacgtgatccatgctatgattaaaacatcaacaccacttcataatactaaattccaatcccc

SEQ ID NO: 306488 - DNA, 1126 bp, Homo sapiens
ggacgcgtgggtcgacccacgctgtcgctcgccatggatcccaactgctcctgcgccgccggtgactcctgcacctgcgccggctcctgcaaatgcaaagagtgcaaatgcacctcctgcaagaaaagctgctgctcctgctgccctgtgggctgtgccaagtgtgcccagggctgcatctgcaaaggggcgtcggacaagtgcagctgctgcgcctgatgctgggacagccccgctcccagatgtaaagaacgcgacttccacaaacctggattttttatgtacaaccctgaccgtgaccgtttgctatattcctttttctatgaaataatgtgaatgataataaaacagctttgacttgaaaaaaaaaaaaaaaaaaaaaaaaaaaaaaaaaaaaaaaaaaaaaaaaaaaaaaaaaaaaaaaaaaaaaaaaaaaaaaaaaaaaaaaaaaaaaaaaaaagaggagcggggcgcggccgccacaataataattctctctcctcgagtgaggcgcgcccctcactacgccagccgcaccccgtttgtttattctatcaacaagaggaggcggccgccccacatatatagagaggggtggtggtttatatattagaaaagcaggaagagcgtagcggcgggtataatataaaaaacagtacgcggcgaggtgagagaacagaactcgtgtagcctgcgtgtgcgagtaatctctctgtgtgagtgagagaaccaactctctccttatcttcttcttacgtgggggagggagcgagaccaaccatagtgtgggggagcgacaacactatctctctatctcactcagtagctatatatatatagtcgctctcgctcccataagcgagcgctaagttatatataataaataatattatagagagagagtgatgttagttgacagagcggcgtgtgatgaatacaccaaacatcaactgcacgatcagtatgtaatagtgtagtcggggggatcgagatgaatgagaaaagagatatgtatttgtgctgtgtcagctcgagcgcgagctgatgttaatttatgtttagtttacgtaagaaaattaatatttttatattacacagcgacgggagggagtatgtgttatgatta

SEQ ID NO: 306489 - DNA, 1010 bp, Homo sapiens
ggacgcgtgggtcgacccacgctgtcgctcgccatggatcccaactgctcctgcgccgccggtgactcctgcacctgcgccggctcctgcaaatgcaaagagtgcaaatgcacctcctgcaagaaaagctgctgctcctgctgccctgtgggctgtgccaagtgtgcccagggctgcatctgcaaaggggcgtcggacaagtgcagctgctgcgcctgatgctgggacagccccgctcccagatgtaaagaacgcgacttccacaaacctggattttttatgtacaaccctgaccgtgaccgtttgctatattcctttttctatgaaataatgtgaatgataataaaacagctttgacttgaaaaaaaaaaaaaaaaaaaaaaaaaaaaaacttttgtgggccggctgggggccctgggaaaaggttctttaagcccaatgtgcgttgtggtgcaccgcgcgggtcccaccagaattgagcgatcaagtgtgacacaccggtggggcaatagcgcgatgatcaccactagaggaacaactcgggggcaaaggagacacaaaaggtgacttggggaatcttccacaccacaataaaaaaaagcgcgcccgggggggaaaaccacggagagggttgtgtcgaaacaaaattcccaaaatggggaactactgggaggagacaacaaacggggaggttctatacaaccacaagggggagtccgcaaaaggaagggagacagcggaatatatacaaaatatttagccccccagagcagtggtgtgaagaaaacaaacagaactgaccaaaacgcacagagacaaacgaagcagagacgagaaggcaggaaaaagcaaaacacagaaaaagaagcaaaggaaagaaaaacaaggcaacgagacgacgacataagaagagagaacaaacgaacagagagaacaacaaagcacaagctcgaacacaaaaaaaaaaccaacacagaacaagcaaaagaaaacaggacaaacgaagcagg

SEQ ID NO: 306490 - DNA, 1255 bp, Homo sapiens
caagtcccagcgaacccgcgtgcaaactgtcccggactctagccgcctcttcagctcgccatggatcccaactgctcctgcgccgccggtaagaggctggggatgcccagtgtagactgtagcgctagagaagcaatttctgacccctctttctttctctggtcactcaatttcaggacaggagttgctccttcccaaagagttttggggtatctttctctccattctaggttattcggagccccctttttaccgttaaggagatctgagttaatggcttgctcaagttcccaggaatcggttgtggactgaggaactcggccccgggctcttagtacgccgtcccttgttcaggtatccagggacggttctcacctctgtcttttctccttgcaggtgactcctgcacctgcgccggctcctgcaaatgcaaagagtgcaaatgcacctcctgcaagaaaaagtaagtgggatcctctctttcctctaccccttccctgtcctccagcctgtcccctctccaccatcctcaggggaattaaagcagtctggggatgccccattgcgcggaaattgttgcctcctcagtgatccttatcagggagagcaggaatccttattcccggtgtcgctagtactcatctctgccgcctcctgtctgcccccaggctgctgctcctgctgccctgtgggctgtgccaagtgtgcccagggctgcatctgcaaaggggcgtcggacaagtgcagctgctgcgcctgatgctgggacagccccgctcccagatgtaaagaacgcgacttccacaaacctggattttttatgtacaaccctgaccgtgaccgtttgctatattcctttttctatgaaataatgtgaatgataataaaacagctttgacttgaaaaaaaaaaaaaaaaaaaaaaaaaaaaaaaaaaaaaaaaaaaaaaaaaaaactaaaggggagacccgagaaccaaatcgagcctataaggagtcctataacaatccattggccatttatttacaccttcttaactgggaaaaccattgctaacccatgtaaatcgccatgcaacccatccccctttcgctcagttggaataatagttgaagaggcctgaaccgaacgcccttacaaacagtttctccaccttaatgccgattggaaaattttaggcgtaattttgcggtaaaattcgcgtaaaatttccgttaaatcagctgattttttacacaatttggccacaattggca

SEQ ID NO: 306491 - DNA, 747 bp, Homo sapiens
gagtgaggaaaagggaggggtggaggttttggaaagttgtcaaggctctagcaacggagcccaggaccaagaggcttctgagcagttcggcagcccagtggctgaaagggggaaacgtctcccaggagtggccggacagtacctgtttaagtgtttgataaacgttaagaaggaggtggacgatgccttagtggagatgcactgggttgagggccagaacagggatctgatgaaccagctttgcacctacatacgtaaccaaattttcaggcttgttgcagttaactagaaacctcctgcacagttggaaacgtgttgatagtaacttgctttggagtggcctgtggggtggcaagaggaatcctaccagcggcccattagtagcacgatgtggaattatcttcgaaaacaaaaacctatgaatctgtcccccacctccccccgcctccttcccgctttttgagttacagggagtcgtagtgtggtcatttacaaggaggaattgtggtcatcagtaacaacagaaagccctcagtaaactcccgcggcatttccctccgtggccacacgagggcacccttggcccttttatcaaagcgccttcacttccccgtgggaatggagacaagtctgtccacggtgttttcttgaaatacccagttgctacccagatttgtatttttatgtaaacaaatacattttcacagaaataaaatttgaaaaataaaagtagaaagagaaaaaaaa

SEQ ID NO: 306492 - DNA, 4211 bp, Homo sapiens
gagtgaggaaaagggaggggtggaggttttggaaagttgtcaaggctctagcaacggagcccaggaccaagaggcttctgagcagttcggcagcccagtggctgaaagggggaaacgtctcccaggagtggccggacagtacctgtttaagtgtttgataaacgttaagaaggaggtggacgatgccttagtggagatgcactgggttgagggccagaacagggatctgatgaaccagctttgcacctacatacgtaaccaaattttcaggcttgttgcagttaactagaaacctcctgcacagttggaaacgtgttgatagtaacttgctttggagtggcctgtggggtggcaagaggaatcctaccagcggcccattagtagcacgatgtggaattatcttcgaaaacaaaaacctatgaatctgtcccccacctccccccgcctccttcccgctttttgagttacagggagtcgtagtgtggtcatttacaaggaggaattgtggtcatcagtaacaacagaaagccctcagtaaactcccgagggattgcaagctggctcaagctggcccctcagctctggactgcctctgcaaggtcagaagggttgtttgtggagtctgggctgggcagcactgcctagaatatcatgctgtctctgtcacccaagggtgtttcttgaggaggggtggctctctctgcctccagctggaggccctggtaccctgttctaggtcactcttcaagatggggcctaccttgcatcaatcccacaaagggagctgtatggtgggtggtggggaatctgggagagaaaccttagtaatgctgggaaggagcagcagagtctggggaccacccggtaaatggcacattcctgacacctggctgttttgatgttgcttatttcagaagcagaattaggtaagcaaaactccccggtgtgactgagacacacagaaggcacccatacccccacctccagcctgttgacagtaccattttgtagcagttttactactgtgtgatttttgtttggacatctgaagtagagcttgttttgtttttaaataagaatattcacaaattaaaaaccagcggtcctatttgaatcctggggttagctgagtgagcggctgatgatagaaatgagaaatagaacaaaatagtatgtgccgtaggtagcttaagaaagtctcagatattttgttgctgatcaaatactgtttttttgtggcttcacttgtaatcccccctgtacttacctactcacattggagagttctgaggccggagtaactgtgtccttgaaacacgtttctaattggaatgccagggttcagtagccgtccccccggaaaggggtgaccttttgctgtgcttgatgttgcatcagcagcctagggttctgtttagactaaaatcttggccagagctccttgccatctgctaagaagactggggctgagtagttaagccagccttctgagaggtggctgttggtcaggacgggaagctggtgaccttggcatgtcttggcagcagctagatcaggccctcggcagagacacaggaagcggaactgctgtgccttaacttggctgtggagctggagctggagaaggcagcatactgaccagtggctttttgattgattgtttgttatgaggtggagttttactcttgttgtctaggctggagtgccgtggtgcgatcttagctcactgcaacccccgcctcccgggttcaagcgattctcctgcctcagcctcccaagtagctgggattacaggcacgcgccaccacgcctggctaattttgtgtttttggtagagatgggatttcaccatgttggccaggctaatctcgaactcatgatctcgggtgatccgcccaccttggcctcccaaagtgctgggattacagccgtgagccactactcccagcctctgaccagtgttcttaacctggtccgtggacctccagagagtccatgtacctcctagagttacttctaaaagctctgtgagcatgtgtgtgtgtgtgtgtgtgtgtgtatttttttcctggagagagggttcccagaaccaccctcagacacagacaaaggggtcaataacccactaaggattaagaatcattattctagtccaagcattcatgtgtcaggctgcaaaaaacaatacccagggtcacacagagccaagactcaattcaggaccgtggattcccctggtctagaaattttctgctgtgccagcccacaccaccccactgtccttacctcgagtgaatattacatttgagtcatttgctgggcccaaacctagtttccttggtataattttaggataattgtttaagtggcaactattcattcagtaagtagtaagtacttattgtttgcttgtttcattatgaaagagtggcacatgctcattaaagatttggaaaaatgaaagtcaaaacaacaaaatcaccccgagtcccaaccttctgtaacataaccactcttggcattggcgtgttcctttctagtctctctgtagacggggtgtgtgagtgtgtgggtttaactttggttgtcctcatgctgcgtattcagttttgtattctggtcctttgttcatttaacatcttacaagtatttgtccatgttgtaacagtagtgtattagcttacactccttgcctgttcaaaatgtctttcaggcacagcactggcctttaagcctgtgtcgtagggatttccagagaatgctctgtgtattgaagcacagaaggtgtttctgtgtctcagtgtgtttctgtccctaggtttaaggcttcatgtcatggaggagattttatagatgtcaagctaatgaccttagagttttaaaaaatccgtgaccgtggccaggcgcagtggctcacgcctgtaatcccagcactgtgaggctgagatgggcgcatcgcatgaggtcgggagtttgagaccagcctggccaacatggcgaaaccccgtctctactcaaaatacaaaaattagccgggcatgatggcacgtgcctgtaatcccagctactcgggaggctgaggcaggagactcgcttgaacctgggaggtggaggttgcagtgagccgagaatgccactgcactacagcctgggcgacaaagtgggactgtctcaaaaaaaaaaaaaaaaaaaaaaaaaaaggaacccatgagcaggccagctttcagtctggagccgagtgccttctgtgcatttggatgtttccatttccttccctgagaagattttcttaggctacctagtgagagaacattgaaaatatttttaaaggacatctaagcattgttttggtcatgcatatgctttataattgtgtgttgtttcatagcatatacctctggtacaggtgggcaagtttttctttgaagaaatgggttattgactcatatgtcataaccttgagtgttactctcccggtgtccggaggtcacattcatgttgcggggttggtatgaaattaaatcttggtgatgtgaccctacattctcttctggtccctagaatcggcttctggtctcctgataactgaagtggagacagaagttgagcctgttgcccaggcaaactaaagctgcttttgttcttcggaatctgctttgcctccgtcagcctgcttccttccccacacatgctggccgcactgtccccactccagacctctgctgtgtgtcctgggcagggccgcgttttggcagtaccctttcaactcatcctaagcttcgtgtagattactttagtatatattttttataaaacataaagcctttcctctcgatggaaatcaaagcttaccatgtgagcactcgaacttctaagttgtgacaggaataacaaaactgcaaggagtggaaaagatggaaaagcctgtgggaaatccgaggccttttgaaagaagggagctgatgacttcacgaccagctcctggagcccctcctttctgctgaagccgcggcatttccctccgtggccacacgagggcacccttggcccttttatcaaagcgccttcacttccccgtgggaatggagacaagtctgtccacggtgttttcttgaaatacccagttgctacccagatttgtatttttatgtaaacaaatacattttcacagaaataaaatttgaaaaataaaagtagaaagagaaaaaaaa

SEQ ID NO: 306493 - DNA, 4176 bp, Homo sapiens
gagtgaggaaaagggaggggtggaggttttggaaagttgtcaaggctctagcaacggagcccaggaccaagaggcttctgagcagttcggcagcccagtggctgaaagggggaaacgtctcccaggagtggccggacagtacctgtttaagtgtttgataaacgttaagaaggaggtggacgatgccttagtggagatgcactgggttgagggccagaacagggatctgatgaaccagctttgcacctacatacgtaaccaaattttcaggcttgttgcagttaactagaaacctcctgcacagttggaaacgtgttgatagtaacttgctttggagtggcctgtggggtggcaagaggaatcctaccagcggcccattagtagcacgatgtggaattatcttcgaaaacaaaaacctatgaatctgtcccccacctccccccgcctccttcccgctttttgagttacagggagtcgtagtgtggtcatttacaaggaggaattgtggtcatcagtaacaacagaaagccctcagtaaactcccgagggattgcaagctggctcaagctggcccctcagctctggactgcctctgcaaggtcagaagggttgtttgtggagtctgggctgggcagcactgcctagaatatcatgctgtctctgtcacccaagggtgtttcttgaggaggggtggctctctctgcctccagctggaggccctggtaccctgttctaggtcactcttcaagatggggcctaccttgcatcaatcccacaaagggagctgtatggtgggtggtggggaatctgggagagaaaccttagtaatgctgggaaggagcagcagagtctggggaccacccggtaaatggcacattcctgacacctggctgttttgatgttgcttatttcagaagcagaattaggtaagcaaaactccccggtgtgactgagacacacagaaggcacccatacccccacctccagcctgttgacagtaccattttgtagcagttttactactgtgtgatttttgtttggacatctgaagtagagcttgttttgtttttaaataagaatattcacaaattaaaaaccagcggtcctatttgaatcctggggttagctgagtgagcggctgatgatagaaatgagaaatagaacaaaatagtatgtgccgtaggtagcttaagaaagtctcagatattttgttgctgatcaaatactgtttttttgtggcttcacttgtaatcccccctgtacttacctactcacattggagagttctgaggccggagtaactgtgtccttgaaacacgtttctaattggaatgccagggttcagtagccgtccccccggaaaggggtgaccttttgctgtgcttgatgttgcatcagcagcctagggttctgtttagactaaaatcttggccagagctccttgccatctgctaagaagactggggctgagtagttaagccagccttctgagaggtggctgttggtcaggacgggaagctggtgaccttggcatgtcttggcagcagctagatcaggccctcggcagagacacaggaagcggaactgctgtgccttaacttggctgtggagctggagctggagaaggcagcatactgaccagtggctttttgattgattgtttgttatgaggtggagttttactcttgttgtctaggctggagtgccgtggtgcgatcttagctcactgcaacccccgcctcccgggttcaagcgattctcctgcctcagcctcccaagtagctgggattacaggcacgcgccaccacgcctggctaattttgtgtttttggtagagatgggatttcaccatgttggccaggctaatctcgaactcatgatctcgggtgatccgcccaccttggcctcccaaagtgctgggattacagccgtgagccactactcccagcctctgaccagtgttcttaacctggtccgtggacctccagagagtccatgtacctcctagagttacttctaaaagctctgtgagcatgtgtgtgtgtgtgtgtgtgtgtgtatttttttcctggagagagggttcccagaaccaccctcagacacagacaaaggggtcaataacccactaaggattaagaatcattattctagtccaagcattcatgtgtcaggctgcaaaaaacaatacccagggtcacacagagccaagactcaattcaggaccgtggattcccctggtctagaaattttctgctgtgccagcccacaccaccccactgtccttacctcgagtgaatattacatttgagtcatttgctgggcccaaacctagtttccttggtataattttaggataattgtttaagtggcaactattcattcagtaagtagtaagtacttattgtttgcttgtttcattatgaaagagtggcacatgctcattaaagatttggaaaaatgaaagtcaaaacaacaaaatcaccccgagtcccaaccttctgtaacataaccactcttggcattggcgtgttcctttctagtctctctgtagacggggtgtgtgagtgtgtgggtttaactttggttgtcctcatgctgcgtattcagttttgtattctggtcctttgttcatttaacatcttacaagtatttgtccatgttgtaacagtagtgtattagcttacactccttgcctgttcaaaatgtctttcaggcacagcactggcctttaagcctgtgtcgtagggatttccagagaatgctctgtgtattgaagcacagaaggtgtttctgtgtctcagtgtgtttctgtccctaggtttaaggcttcatgtcatggaggagattttatagatgtcaagctaatgaccttagagttttaaaaaatccgtgaccgtggccaggcgcagtggctcacgcctgtaatcccagcactgtgaggctgagatgggcgcatcgcatgaggtcgggagtttgagaccagcctggccaacatggcgaaaccccgtctctactcaaaatacaaaaattagccgggcatgatggcacgtgcctgtaatcccagctactcgggaggctgaggcaggagactcgcttgaacctgggaggtggaggttgcagtgagccgagaatgccactgcactacagcctgggcgacaaagtgggactgtctcaaaaaaaaaaaaaaaaaaaaaaaaaaaggaacccatgagcaggccagctttcagtctggagccgagtgccttctgtgcatttggatgtttccatttccttccctgagaagattttcttaggctacctagtgagagaacattgaaaatatttttaaaggacatctaagcattgtttcatagcatatacctctggtacaggtgggcaagtttttctttgaagaaatgggttattgactcatatgtcataaccttgagtgttactctcccggtgtccggaggtcacattcatgttgcggggttggtatgaaattaaatcttggtgatgtgaccctacattctcttctggtccctagaatcggcttctggtctcctgataactgaagtggagacagaagttgagcctgttgcccaggcaaactaaagctgcttttgttcttcggaatctgctttgcctccgtcagcctgcttccttccccacacatgctggccgcactgtccccactccagacctctgctgtgtgtcctgggcagggccgcgttttggcagtaccctttcaactcatcctaagcttcgtgtagattactttagtatatattttttataaaacataaagcctttcctctcgatggaaatcaaagcttaccatgtgagcactcgaacttctaagttgtgacaggaataacaaaactgcaaggagtggaaaagatggaaaagcctgtgggaaatccgaggccttttgaaagaagggagctgatgacttcacgaccagctcctggagcccctcctttctgctgaagccgcggcatttccctccgtggccacacgagggcacccttggcccttttatcaaagcgccttcacttccccgtgggaatggagacaagtctgtccacggtgttttcttgaaatacccagttgctacccagatttgtatttttatgtaaacaaatacattttcacagaaataaaatttgaaaaataaaagtagaaagagaaaaaaaa

SEQ ID NO: 306494 - DNA, 2774 bp, Homo sapiens
gagtgaggaaaagggaggggtggaggttttggaaagttgtcaaggctctagcaacggagcccaggaccaagaggcttctgagcagttcggcagcccagtggctgaaagggggaaacgtctcccaggagtggccggacagtacctgtttaagtgtttgataaacgttaagaaggaggtggacgatgccttagtggagatgcactgggttgagggccagaacagggatctgatgaaccagctttgcacctacatacgtaaccaaattttcaggcttgttgcagttaactagaaacctcctgcacagttggaaacgtgttgatagtaacttgctttggagtggcctgtggggtggcaagaggaatcctaccagcggcccattagtagcacgatgtggaattatcttcgaaaacaaaaacctatgaatctgtcccccacctccccccgcctccttcccgctttttgagttacagggagtcgtagtgtggtcatttacaaggaggaattgtggtcatcagtaacaacagaaagccctcagtaaactcccgagggattgcaagctggctcaagctggcccctcagctctggactgcctctgcaaggtcagaagggttgtttgtggagtctgggctgggcagcactgcctagaatatcatgctgtctctgtcacccaagggtgtttcttgaggaggggtggctctctctgcctccagctggaggccctggtaccctgttctaggtcactcttcaagatggggcctaccttgcatcaatcccacaaagggagctgtatggtgggtggtggggaatctgggagagaaaccttagtaatgctgggaaggagcagcagagtctggggaccacccggtaaatggcacattcctgacacctggctgttttgatgttgcttatttcagaagcagaattaggtaagcaaaactccccggtgtgactgagacacacagaaggcacccatacccccacctccagcctgttgacagtaccattttgtagcagttttactactgtgtgatttttgtttggacatctgaagtagagcttgttttgtttttaaataagaatattcacaaattaaaaaccagcggtcctatttgaatcctggggttagctgagtgagcggctgatgatagaaatgagaaatagaacaaaatagtatgtgccgtaggtagcttaagaaagtctcagatattttgttgctgatcaaatactgtttttttgtggcttcacttgtaatcccccctgtacttacctactcacattggagagttctgaggccggagtaactgtgtccttgaaacacgtttctaattggaatgccagggttcagtagccgtccccccggaaaggggtgaccttttgctgtgcttgatgttgcatcagcagcctagggttctgtttagactaaaatcttggccagagctccttgccatctgctaagaagactggggctgagtagttaagccagccttctgagaggtggctgttggtcaggacgggaagctggtgaccttggcatgtcttggcagcagctagatcaggccctcggcagagacacaggaagcggaactgctgtgccttaacttggctgtggagctggagctggagaaggcagcatactgaccagtggctttttgattgattgtttgttatgaggtgaggttgcagtgagccgagaatgccactgcactacagcctgggcgacaaagtgggactgtctcaaaaaaaaaaaaaaaaaaaaaaaaaaaggaacccatgagcaggccagctttcagtctggagccgagtgccttctgtgcatttggatgtttccatttccttccctgagaagattttcttaggctacctagtgagagaacattgaaaatatttttaaaggacatctaagcattgttttggtcatgcatatgctttataattgtgtgttgtttcatagcatatacctctggtacaggtgggcaagtttttctttgaagaaatgggttattgactcatatgtcataaccttgagtgttactctcccggtgtccggaggtcacattcatgttgcggggttggtatgaaattaaatcttggtgatgtgaccctacattctcttctggtccctagaatcggcttctggtctcctgataactgaagtggagacagaagttgagcctgttgcccaggcaaactaaagctgcttttgttcttcggaatctgctttgcctccgtcagcctgcttccttccccacacatgctggccgcactgtccccactccagacctctgctgtgtgtcctgggcagggccgcgttttggcagtaccctttcaactcatcctaagcttcgtgtagattactttagtatatattttttataaaacataaagcctttcctctcgatggaaatcaaagcttaccatgtgagcactcgaacttctaagttgtgacaggaataacaaaactgcaaggagtggaaaagatggaaaagcctgtgggaaatccgaggccttttgaaagaagggagctgatgacttcacgaccagctcctggagcccctcctttctgctgaagccgcggcatttccctccgtggccacacgagggcacccttggcccttttatcaaagcgccttcacttccccgtgggaatggagacaagtctgtccacggtgttttcttgaaatacccagttgctacccagatttgtatttttatgtaaacaaatacattttcacagaaataaaatttgaaaaataaaagtagaaagagaaaaaaaa

SEQ ID NO: 306495 - DNA, 2800 bp, Homo sapiens
gagtgaggaaaagggaggggtggaggttttggaaagttgtcaaggctctagcaacggagcccaggaccaagaggcttctgagcagttcggcagcccagtggctgaaagggggaaacgtctcccaggagtggccggacagtacctgtttaagtgtttgataaacgttaagaaggaggtggacgatgccttagtggagatgcactgggttgagggccagaacagggatctgatgaaccagctttgcacctacatacgtaaccaaattttcaggcttgttgcagttaactagaaacctcctgcacagttggaaacgtgttgatagtaacttgctttggagtggcctgtggggtggcaagaggaatcctaccagcggcccattagtagcacgatgtggaattatcttcgaaaacaaaaacctatgaatctgtcccccacctccccccgcctccttcccgctttttgagttacagggagtcgtagtgtggtcatttacaaggaggaattgtggtcatcagtaacaacagaaagccctcagtaaactcccgagggattgcaagctggctcaagctggcccctcagctctggactgcctctgcaaggtcagaagggttgtttgtggagtctgggctgggcagcactgcctagaatatcatgctgtctctgtcacccaagggtgtttcttgaggaggggtggctctctctgcctccagctggaggccctggtaccctgttctaggtcactcttcaagatggggcctaccttgcatcaatcccacaaagggagctgtatggtgggtggtggggaatctgggagagaaaccttagtaatgctgggaaggagcagcagagtctggggaccacccggtaaatggcacattcctgacacctggctgttttgatgttgcttatttcagaagcagaattaggtaagcaaaactccccggtgtgactgagacacacagaaggcacccatacccccacctccagcctgttgacagtaccattttgtagcagttttactactgtgtgatttttgtttggacatctgaagtagagcttgttttgtttttaaataagaatattcacaaattaaaaaccagcggtcctatttgaatcctggggttagctgagtgagcggctgatgatagaaatgagaaatagaacaaaatagtatgtgccgtaggtagcttaagaaagtctcagatattttgttgctgatcaaatactgtttttttgtggcttcacttgtaatcccccctgtacttacctactcacattggagagttctgaggccggagtaactgtgtccttgaaacacgtttctaattggaatgccagggttcagtagccgtccccccggaaaggggtgaccttttgctgtgcttgatgttgcatcagcagcctagggttctgtttagactaaaatcttggccagagctccttgccatctgctaagaagactggggctgagtagttaagccagccttctgagaggtggctgttggtcaggacgggaagctggtgaccttggcatgtcttggcagcagctagatcaggccctcggcagagacacaggaagcggaactgctgtgccttaacttggctgtggagctggagctggagaaggcagcatactgaccagtggctttttgattgattgtttgttatgaggtggagttttactcttgttgtctaggctgaggttgcagtgagccgagaatgccactgcactacagcctgggcgacaaagtgggactgtctcaaaaaaaaaaaaaaaaaaaaaaaaaaaggaacccatgagcaggccagctttcagtctggagccgagtgccttctgtgcatttggatgtttccatttccttccctgagaagattttcttaggctacctagtgagagaacattgaaaatatttttaaaggacatctaagcattgttttggtcatgcatatgctttataattgtgtgttgtttcatagcatatacctctggtacaggtgggcaagtttttctttgaagaaatgggttattgactcatatgtcataaccttgagtgttactctcccggtgtccggaggtcacattcatgttgcggggttggtatgaaattaaatcttggtgatgtgaccctacattctcttctggtccctagaatcggcttctggtctcctgataactgaagtggagacagaagttgagcctgttgcccaggcaaactaaagctgcttttgttcttcggaatctgctttgcctccgtcagcctgcttccttccccacacatgctggccgcactgtccccactccagacctctgctgtgtgtcctgggcagggccgcgttttggcagtaccctttcaactcatcctaagcttcgtgtagattactttagtatatattttttataaaacataaagcctttcctctcgatggaaatcaaagcttaccatgtgagcactcgaacttctaagttgtgacaggaataacaaaactgcaaggagtggaaaagatggaaaagcctgtgggaaatccgaggccttttgaaagaagggagctgatgacttcacgaccagctcctggagcccctcctttctgctgaagccgcggcatttccctccgtggccacacgagggcacccttggcccttttatcaaagcgccttcacttccccgtgggaatggagacaagtctgtccacggtgttttcttgaaatacccagttgctacccagatttgtatttttatgtaaacaaatacattttcacagaaataaaatttgaaaaataaaagtagaaagagaaaaaaaa

SEQ ID NO: 306496 - DNA, 2829 bp, Homo sapiens
gagtgaggaaaagggaggggtggaggttttggaaagttgtcaaggctctagcaacggagcccaggaccaagaggcttctgagcagttcggcagcccagtggctgaaagggggaaacgtctcccaggagtggccggacagtacctgtttaagtgtttgataaacgttaagaaggaggtggacgatgccttagtggagatgcactgggttgagggccagaacagggatctgatgaaccagctttgcacctacatacgtaaccaaattttcaggcttgttgcagttaactagaaacctcctgcacagttggaaacgtgttgatagtaacttgctttggagtggcctgtggggtggcaagaggaatcctaccagcggcccattagtagcacgatgtggaattatcttcgaaaacaaaaacctatgaatctgtcccccacctccccccgcctccttcccgctttttgagttacagggagtcgtagtgtggtcatttacaaggaggaattgtggtcatcagtaacaacagaaagccctcagtaaactcccgagggattgcaagctggctcaagctggcccctcagctctggactgcctctgcaaggtcagaagggttgtttgtggagtctgggctgggcagcactgcctagaatatcatgctgtctctgtcacccaagggtgtttcttgaggaggggtggctctctctgcctccagctggaggccctggtaccctgttctaggtcactcttcaagatggggcctaccttgcatcaatcccacaaagggagctgtatggtgggtggtggggaatctgggagagaaaccttagtaatgctgggaaggagcagcagagtctggggaccacccggtaaatggcacattcctgacacctggctgttttgatgttgcttatttcagaagcagaattaggtaagcaaaactccccggtgtgactgagacacacagaaggcacccatacccccacctccagcctgttgacagtaccattttgtagcagttttactactgtgtgatttttgtttggacatctgaagtagagcttgttttgtttttaaataagaatattcacaaattaaaaaccagcggtcctatttgaatcctggggttagctgagtgagcggctgatgatagaaatgagaaatagaacaaaatagtatgtgccgtaggtagcttaagaaagtctcagatattttgttgctgatcaaatactgtttttttgtggcttcacttgtaatcccccctgtacttacctactcacattggagagttctgaggccggagtaactgtgtccttgaaacacgtttctaattggaatgccagggttcagtagccgtccccccggaaaggggtgaccttttgctgtgcttgatgttgcatcagcagcctagggttctgtttagactaaaatcttggccagagctccttgccatctgctaagaagactggggctgagtagttaagccagccttctgagaggtggctgttggtcaggacgggaagctggtgaccttggcatgtcttggcagcagctagatcaggccctcggcagagacacaggaagcggaactgctgtgccttaacttggctgtggagctggagctggagaaggcagcatactgaccagtggctttttgattgattgtttgttatgaggtggagttttactcttgttgtctaggctgcaggagactcgcttgaacctgggaggtggaggttgcagtgagccgagaatgccactgcactacagcctgggcgacaaagtgggactgtctcaaaaaaaaaaaaaaaaaaaaaaaaaaaggaacccatgagcaggccagctttcagtctggagccgagtgccttctgtgcatttggatgtttccatttccttccctgagaagattttcttaggctacctagtgagagaacattgaaaatatttttaaaggacatctaagcattgttttggtcatgcatatgctttataattgtgtgttgtttcatagcatatacctctggtacaggtgggcaagtttttctttgaagaaatgggttattgactcatatgtcataaccttgagtgttactctcccggtgtccggaggtcacattcatgttgcggggttggtatgaaattaaatcttggtgatgtgaccctacattctcttctggtccctagaatcggcttctggtctcctgataactgaagtggagacagaagttgagcctgttgcccaggcaaactaaagctgcttttgttcttcggaatctgctttgcctccgtcagcctgcttccttccccacacatgctggccgcactgtccccactccagacctctgctgtgtgtcctgggcagggccgcgttttggcagtaccctttcaactcatcctaagcttcgtgtagattactttagtatatattttttataaaacataaagcctttcctctcgatggaaatcaaagcttaccatgtgagcactcgaacttctaagttgtgacaggaataacaaaactgcaaggagtggaaaagatggaaaagcctgtgggaaatccgaggccttttgaaagaagggagctgatgacttcacgaccagctcctggagcccctcctttctgctgaagccgcggcatttccctccgtggccacacgagggcacccttggcccttttatcaaagcgccttcacttccccgtgggaatggagacaagtctgtccacggtgttttcttgaaatacccagttgctacccagatttgtatttttatgtaaacaaatacattttcacagaaataaaatttgaaaaataaaagtagaaagagaaaaaaaa

SEQ ID NO: 306497 - DNA, 2421 bp, Homo sapiens
gagtgaggaaaagggaggggtggaggttttggaaagttgtcaaggctctagcaacggagcccaggaccaagaggcttctgagcagttcggcagcccagtggctgaaagggggaaacgtctcccaggagtggccggacagtacctgtttaagtgtttgataaacgttaagaaggaggtggacgatgccttagtggagatgcactgggttgagggccagaacagggatctgatgaaccagctttgcacctacatacgtaaccaaattttcaggcttgttgcagttaactagaaacctcctgcacagttggaaacgtgttgatagtaacttgctttggagtggcctgtggggtggcaagaggaatcctaccagcggcccattagtagcacgatgtggaattatcttcgaaaacaaaaacctatgaatctgtcccccacctccccccgcctccttcccgctttttgagttacagggagtcgtagtgtggtcatttacaaggaggaattgtggtcatcagtaacaacagaaagccctcagtaaactcccgagggattgcaagctggctcaagctggcccctcagctctggactgcctctgcaaggtcagaagggttgtttgtggagtctgggctgggcagcactgcctagaatatcatgctgtctctgtcacccaagggtgtttcttgaggaggggtggctctctctgcctccagctggaggccctggtaccctgttctaggtcactcttcaagatggggcctaccttgcatcaatcccacaaagggagctgtatggtgggtggtggggaatctgggagagaaaccttagtaatgctgggaaggagcagcagagtctggggaccacccggtaaatggcacattcctgacacctggctgttttgatgttgcttatttcagaagcagaattaggtaagcaaaactccccggtgtgactgagacacacagaaggcacccatacccccacctccagcctgttgacagtaccattttgtagcagttttactactgtgtgatttttgtttggacatctgaagtagagcttgttttgtttttaaataagaatattcacaaattaaaaaccagcggtcctatttgaatcctggggttagctgagtgagcggctgatgatagaaatgagaaatagaacaaaatagtatgtgccgtaggtagcttaagaaagtctcagatattttgttgctgatcaaatactgtttttttgtggcttcacttgtaatcccccctgtacttacctactcacattggagagttctgaggcaggagactcgcttgaacctgggaggtggaggttgcagtgagccgagaatgccactgcactacagcctgggcgacaaagtgggactgtctcaaaaaaaaaaaaaaaaaaaaaaaaaaaggaacccatgagcaggccagctttcagtctggagccgagtgccttctgtgcatttggatgtttccatttccttccctgagaagattttcttaggctacctagtgagagaacattgaaaatatttttaaaggacatctaagcattgttttggtcatgcatatgctttataattgtgtgttgtttcatagcatatacctctggtacaggtgggcaagtttttctttgaagaaatgggttattgactcatatgtcataaccttgagtgttactctcccggtgtccggaggtcacattcatgttgcggggttggtatgaaattaaatcttggtgatgtgaccctacattctcttctggtccctagaatcggcttctggtctcctgataactgaagtggagacagaagttgagcctgttgcccaggcaaactaaagctgcttttgttcttcggaatctgctttgcctccgtcagcctgcttccttccccacacatgctggccgcactgtccccactccagacctctgctgtgtgtcctgggcagggccgcgttttggcagtaccctttcaactcatcctaagcttcgtgtagattactttagtatatattttttataaaacataaagcctttcctctcgatggaaatcaaagcttaccatgtgagcactcgaacttctaagttgtgacaggaataacaaaactgcaaggagtggaaaagatggaaaagcctgtgggaaatccgaggccttttgaaagaagggagctgatgacttcacgaccagctcctggagcccctcctttctgctgaagccgcggcatttccctccgtggccacacgagggcacccttggcccttttatcaaagcgccttcacttccccgtgggaatggagacaagtctgtccacggtgttttcttgaaatacccagttgctacccagatttgtatttttatgtaaacaaatacattttcacagaaataaaatttgaaaaataaaagtagaaagagaaaaaaaa

SEQ ID NO: 306498 - DNA, 4145 bp, Homo sapiens
gagtgaggaaaagggaggggtggaggttttggaaagttgtcaaggctctagcaacggagcccaggaccaagaggcttctgagcagttcggcagcccagtggctgaaagggggaaacgtctcccaggagtggccggacagtacctgtttaagtgtttgataaacgttaagaaggaggtggacgatgccttagtggagatgcactgggttgagggccagaacagggatctgatgaaccagctttgcacctacatacgtaaccaaattttcaggcttgttgcagttaactagaaacctcctgcacagttggaaacgtgttgatagtaacttgctttggagtggcctgtggggtggcaagaggaatcctaccagcggcccattagtagcacgatgtggaattatcttcgaaaacaaaaacctatgaatctgtcccccacctccccccgcctccttcccgctttttgagttacagggagtcgtagtgtggtcatttacaaggaggaattgtggtcatcagtaacaacagaaagccctcagtaaactcccgagggattgcaagctggctcaagctggcccctcagctctggactgcctctgcaaggtcagaagggttgtttgtggagtctgggctgggcagcactgcctagaatatcatgctgtctctgtcacccaagggtgtttcttgaggaggggtggctctctctgcctccagctggaggccctggtaccctgttctaggtcactcttcaagatggggcctaccttgcatcaatcccacaaagggagctgtatggtgggtggtggggaatctgggagagaaaccttagtaatgctgggaaggagcagcagagtctggggaccacccggtaaatggcacattcctgacacctggctgttttgatgttgcttatttcagaagcagaattaggtaagcaaaactccccggtgtgactgagacacacagaaggcacccatacccccacctccagcctgttgacagtaccattttgtagcagttttactactgtgtgatttttgtttggacatctgaagtagagcttgttttgtttttaaataagaatattcacaaattaaaaaccagcggtcctatttgaatcctggggttagctgagtgagcggctgatgatagaaatgagaaatagaacaaaatagtatgtgccgtaggtagcttaagaaagtctcagatattttgttgctgatcaaatactgtttttttgtggcttcacttgtaatcccccctgtacttacctactcacattggagagttctgaggccggagtaactgtgtccttgaaacacgtttctaattggaatgccagggttcagtagccgtccccccggaaaggggtgaccttttgctgtgcttgatgttgcatcagcagcctagggttctgtttagactaaaatcttggccagagctccttgccatctgctaagaagactggggctgagtagttaagccagccttctgagaggtggctgttggtcaggacgggaagctggtgaccttggcatgtcttggcagcagctagatcaggccctcggcagagacacaggaagcggaactgctgtgccttaacttggctgtggagctggagctggagaaggcagcatactgaccagtggctttttgattgattgtttgttatgaggtggagttttactcttgttgtctaggctggagtgccgtggtgcgatcttagctcactgcaacccccgcctcccgggttcaagcgattctcctgcctcagcctcccaagtagctgggattacaggcacgcgccaccacgcctggctaattttgtgtttttggtagagatgggatttcaccatgttggccaggctaatctcgaactcatgatctcgggtgatccgcccaccttggcctcccaaagtgctgggattacagccgtgagccactactcccagcctctgaccagtgttcttaacctggtccgtggacctccagagagtccatgtacctcctagagttacttctaaaagctctgtgagcatgtgtgtgtgtgtgtgtgtgtgtgtatttttttcctggagagagggttcccagaaccaccctcagacacagacaaaggggtcaataacccactaaggattaagaatcattattctagtccaagcattcatgtgtcaggctgcaaaaaacaatacccagggtcacacagagccaagactcaattcaggaccgtggattcccctggtctagaaattttctgctgtgccagcccacaccaccccactgtccttacctcgagtgaatattacatttgagtcatttgctgggcccaaacctagtttccttggtataattttaggataattgtttaagtggcaactattcattcagtaagtagtaagtacttattgtttgcttgtttcattatgaaagagtggcacatgctcattaaagatttggaaaaatgaaagtcaaaacaacaaaatcaccccgagtcccaaccttctgtaacataaccactcttggcattggcgtgttcctttctagtctctctgtagacggggtgtgtgagtgtgtgggtttaactttggttgtcctcatgctgcgtattcagttttgtattctggtcctttgttcatttaacatcttacaagtatttgtccatgttgtaacagtagtgtattagcttacactccttgcctgttcaaaatgtctttcaggcacagcactggcctttaagcctgtgtcgtagggatttccagagaatgctctgtgtattgaagcacagaaggtgtttctgtgtctcagtgtgtttctgtccctaggtttaaggcttcatgtcatggaggagattttatagatgtcaagctaatgaccttagagttttaaaaaatccgtgaccgtggccaggcgcagtggctcacgcctgtaatcccagcactgtgaggctgagatgggcgcatcgcatgaggtcgggagtttgagaccagcctggccaacatggcgaaaccccgtctctactcaaaatacaaaaattagccgggcatgatggcacgtgcctgtaatcccagctactcgggaggctgaggcaggagactcgcttgaacctgggaggtggaggttgcagtgagccgagaatgccactgcactacagcctgggcgacaaagtgggactgtctcaaaaaaaaaaaaaaaaaaaaaaaaaaaggaacccatgagcaggccagctttcagtctggagccgagtgccttctgtgcatttggatgtttccatttccttccctgagaagattttcttaggctacctagtgagagaacattgaaaatatttttaaaggacatctaagcattgttttggtcatgcatatgctttataattgtgtgttgtttcatagcatatacctctggtacaggtgggcaagtttttctttgaagaaatgggttattgactcatatgtcataaccttgagtgttactctcccggtgtccggaggtcacattcatgttgcggggttggtatgaaattaaatcttggtgatgtgaccctacattctcttctggtccctagaatcggcttctggtctcctgataactgaagtggagacagaagttgagcctgttgcccaggcaaactaaagctgcttttgttcttcggaatctgctttgcctccgtcagcctgcttccttccccacacatgctggccgcactgtccccactccagacctctgctgtgtgtcctgggcagggccgcgttttggcagtaccctttcaactcatcctaagcttcgtgtagattactttagtatatattttttataaaacataaagcctttcctctcgatggaaatcaaagcttaccatgtgagcactcgaacttctaagttgtgacaggaataacaaaactgcaaggagtggaaaagatggaaaagcctgtgggaaatccgaggccttttgaaagaagggagctgatgacttcacgaccagctcctggagcccctcctttctgctgaagccgcggcatttccctccgtggccacacgagggcacccttggcccttttatcaaagcgccttcacttccccgtgggaatggagacaagtctgtccacggtgttttcttgaaatggtcgccaatccggtaactctaggtca

SEQ ID NO: 306499 - DNA, 2229 bp, Homo sapiens
tgaggccgctggttagttcttattagaagacgtcccccagtaatcagaacctgtggtgtctgcatgtgtgtgtgtgtatttttttcctggagagagggttcccagaaccaccctcagacacagacaaaggggtcaataacccactaaggattaagaatcattattctagtccaagcattcatgtgtcaggctgcaaaaaacaatacccagggtcacacagagccaagactcaattcaggaccgtggattcccctggtctagaaattttctgctgtgccagcccacaccaccccactgtccttacctcgagtgaatattacatttgagtcatttgctgggcccaaacctagtttccttggtataattttaggataattgtttaagtggcaactattcattcagtaagtagtaagtacttattgtttgcttgtttcattatgaaagagtggcacatgctcattaaagatttggaaaaatgaaagtcaaaacaacaaaatcaccccgagtcccaaccttctgtaacataaccactcttggcattggcgtgttcctttctagtctctctgtagacggggtgtgtgagtgtgtgggtttaactttggttgtcctcatgctgcgtattcagttttgtattctggtcctttgttcatttaacatcttacaagtatttgtccatgttgtaacagtagtgtattagcttacactccttgcctgttcaaaatgtctttcaggcacagcactggcctttaagcctgtgtcgtagggatttccagagaatgctctgtgtattgaagcacagaaggtgtttctgtgtctcagtgtgtttctgtccctaggtttaaggcttcatgtcatggaggagattttatagatgtcaagctaatgaccttagagttttaaaaaatccgtgaccgtggccaggcgcagtggctcacgcctgtaatcccagcactgtgaggctgagatgggcgcatcgcatgaggtcgggagtttgagaccagcctggccaacatggcgaaaccccgtctctactcaaaatacaaaaattagccgggcatgatggcacgtgcctgtaatcccagctactcgggaggctgaggcaggagactcgcttgaacctgggaggtggaggttgcagtgagccgagaatgccactgcactacagcctgggcgacaaagtgggactgtctcaaaaaaaaaaaaaaaaaaaaaaaaaaaggaacccatgagcaggccagctttcagtctggagccgagtgccttctgtgcatttggatgtttccatttccttccctgagaagattttcttaggctacctagtgagagaacattgaaaatatttttaaaggacatctaagcattgttttggtcatgcatatgctttataattgtgtgttgtttcatagcatatacctctggtacaggtgggcaagtttttctttgaagaaatgggttattgactcatatgtcataaccttgagtgttactctcccggtgtccggaggtcacattcatgttgcggggttggtatgaaattaaatcttggtgatgtgaccctacattctcttctggtccctagaatcggcttctggtctcctgataactgaagtggagacagaagttgagcctgttgcccaggcaaactaaagctgcttttgttcttcggaatctgctttgcctccgtcagcctgcttccttccccacacatgctggccgcactgtccccactccagacctctgctgtgtgtcctgggcagggccgcgttttggcagtaccctttcaactcatcctaagcttcgtgtagattactttagtatatattttttataaaacataaagcctttcctctcgatggaaatcaaagcttaccatgtgagcactcgaacttctaagttgtgacaggaataacaaaactgcaaggagtggaaaagatggaaaagcctgtgggaaatccgaggccttttgaaagaagggagctgatgacttcacgaccagctcctggagcccctcctttctgctgaagccgcggcatttccctccgtggccacacgagggcacccttggcccttttatcaaagcgccttcacttccccgtgggaatggagacaagtctgtccacggtgttttcttgaaatacccagttgctacccagatttgtatttttatgtaaacaaatacattttcacagaaataaaatttgaaaaataaaagtagaaagagaaaaaaaa

SEQ ID NO: 306500 - DNA, 1884 bp, Homo sapiens
cgaggggagaacaactacgtctaggacgaaggctggggttaatcggccgagattcagtaagtagtaagtacttattgtttgcttgtttcattatgaaagagtggcacatgctcattaaagatttggaaaaatgaaagtcaaaacaacaaaatcaccccgagtcccaaccttctgtaacataaccactcttggcattggcgtgttcctttctagtctctctgtagacggggtgtgtgagtgtgtgggtttaactttggttgtcctcatgctgcgtattcagttttgtattctggtcctttgttcatttaacatcttacaagtatttgtccatgttgtaacagtagtgtattagcttacactccttgcctgttcaaaatgtctttcaggcacagcactggcctttaagcctgtgtcgtagggatttccagagaatgctctgtgtattgaagcacagaaggtgtttctgtgtctcagtgtgtttctgtccctaggtttaaggcttcatgtcatggaggagattttatagatgtcaagctaatgaccttagagttttaaaaaatccgtgaccgtggccaggcgcagtggctcacgcctgtaatcccagcactgtgaggctgagatgggcgcatcgcatgaggtcgggagtttgagaccagcctggccaacatggcgaaaccccgtctctactcaaaatacaaaaattagccgggcatgatggcacgtgcctgtaatcccagctactcgggaggctgaggcaggagactcgcttgaacctgggaggtggaggttgcagtgagccgagaatgccactgcactacagcctgggcgacaaagtgggactgtctcaaaaaaaaaaaaaaaaaaaaaaaaaaaggaacccatgagcaggccagctttcagtctggagccgagtgccttctgtgcatttggatgtttccatttccttccctgagaagattttcttaggctacctagtgagagaacattgaaaatatttttaaaggacatctaagcattgttttggtcatgcatatgctttataattgtgtgttgtttcatagcatatacctctggtacaggtgggcaagtttttctttgaagaaatgggttattgactcatatgtcataaccttgagtgttactctcccggtgtccggaggtcacattcatgttgcggggttggtatgaaattaaatcttggtgatgtgaccctacattctcttctggtccctagaatcggcttctggtctcctgataactgaagtggagacagaagttgagcctgttgcccaggcaaactaaagctgcttttgttcttcggaatctgctttgcctccgtcagcctgcttccttccccacacatgctggccgcactgtccccactccagacctctgctgtgtgtcctgggcagggccgcgttttggcagtaccctttcaactcatcctaagcttcgtgtagattactttagtatatattttttataaaacataaagcctttcctctcgatggaaatcaaagcttaccatgtgagcactcgaacttctaagttgtgacaggaataacaaaactgcaaggagtggaaaagatggaaaagcctgtgggaaatccgaggccttttgaaagaagggagctgatgacttcacgaccagctcctggagcccctcctttctgctgaagccgcggcatttccctccgtggccacacgagggcacccttggcccttttatcaaagcgccttcacttccccgtgggaatggagacaagtctgtccacggtgttttcttgaaatacccagttgctacccagatttgtatttttatgtaaacaaatacattttcacagaaataaaatttgaaaaataaaagtagaaagagaaaaaaaa

SEQ ID NO: 306501 - DNA, 1909 bp, Homo sapiens
ggcacatgctcattaagtacttactacttactgaatgaataggttgccactctttcataatgaaacaagcaaacaaattcagtaagtagtaagtacttattgtttgcttgtttcattatgaaagagtggcacatgctcattaaagatttggaaaaatgaaagtcaaaacaacaaaatcaccccgagtcccaaccttctgtaacataaccactcttggcattggcgtgttcctttctagtctctctgtagacggggtgtgtgagtgtgtgggtttaactttggttgtcctcatgctgcgtattcagttttgtattctggtcctttgttcatttaacatcttacaagtatttgtccatgttgtaacagtagtgtattagcttacactccttgcctgttcaaaatgtctttcaggcacagcactggcctttaagcctgtgtcgtagggatttccagagaatgctctgtgtattgaagcacagaaggtgtttctgtgtctcagtgtgtttctgtccctaggtttaaggcttcatgtcatggaggagattttatagatgtcaagctaatgaccttagagttttaaaaaatccgtgaccgtggccaggcgcagtggctcacgcctgtaatcccagcactgtgaggctgagatgggcgcatcgcatgaggtcgggagtttgagaccagcctggccaacatggcgaaaccccgtctctactcaaaatacaaaaattagccgggcatgatggcacgtgcctgtaatcccagctactcgggaggctgaggcaggagactcgcttgaacctgggaggtggaggttgcagtgagccgagaatgccactgcactacagcctgggcgacaaagtgggactgtctcaaaaaaaaaaaaaaaaaaaaaaaaaaaggaacccatgagcaggccagctttcagtctggagccgagtgccttctgtgcatttggatgtttccatttccttccctgagaagattttcttaggctacctagtgagagaacattgaaaatatttttaaaggacatctaagcattgttttggtcatgcatatgctttataattgtgtgttgtttcatagcatatacctctggtacaggtgggcaagtttttctttgaagaaatgggttattgactcatatgtcataaccttgagtgttactctcccggtgtccggaggtcacattcatgttgcggggttggtatgaaattaaatcttggtgatgtgaccctacattctcttctggtccctagaatcggcttctggtctcctgataactgaagtggagacagaagttgagcctgttgcccaggcaaactaaagctgcttttgttcttcggaatctgctttgcctccgtcagcctgcttccttccccacacatgctggccgcactgtccccactccagacctctgctgtgtgtcctgggcagggccgcgttttggcagtaccctttcaactcatcctaagcttcgtgtagattactttagtatatattttttataaaacataaagcctttcctctcgatggaaatcaaagcttaccatgtgagcactcgaacttctaagttgtgacaggaataacaaaactgcaaggagtggaaaagatggaaaagcctgtgggaaatccgaggccttttgaaagaagggagctgatgacttcacgaccagctcctggagcccctcctttctgctgaagccgcggcatttccctccgtggccacacgagggcacccttggcccttttatcaaagcgccttcacttccccgtgggaatggagacaagtctgtccacggtgttttcttgaaatacccagttgctacccagatttgtatttttatgtaaacaaatacattttcacagaaataaaatttgaaaaataaaagtagaaagagaaaaaaaa

SEQ ID NO: 306502 - DNA, 918 bp, Homo sapiens
  misc_feature (5)..(5): n is a, c, g, or t
ttgtntttgatcgactaagtggtctgtcgaacatatccctcgtagctctgcatagcatgatggcgctacctcatgctttctggagtacaatggtgttactcgactacatgatgtcgtatatttgactagtgactgtcccggctgttcgcaggttcgttactgtgagcggtgttggcttgaggatctagctaggggatctgacctcttatgattgctgctggactgtaatctccgtagcaaatcgtacctatggatcactctagaatgactcgtaaggtggagtactagaaagtttggagccgtggtgtcctgtgttaactataagctgcattatgctttcgctcggaagacgaggtttggctcacgtgagtactgacttcactgacccctattatgctggggcagcttggttaccactccagacctctgctgtgtgtcctgggcagggccgcgttttggcagtaccctttcaactcatcctaagcttcgtgtagattactttagtatatattttttataaaacataaagcctttcctctcgatggaaatcaaagcttaccatgtgagcactcgaacttctaagttgtgacaggaataacaaaactgcaaggagtggaaaagatggaaaagcctgtgggaaatccgaggccttttgaaagaagggagctgatgacttcacgaccagctcctggagcccctcctttctgctgaagccgcggcatttccctccgtggccacacgagggcacccttggcccttttatcaaagcgccttcacttccccgtgggaatggagacaagtctgtccacggtgttttcttgaaatacccagttgctacccagatttgtatttttatgtaaacaaatacattttcacagaaataaaatttgaaaaataaaagtagaaagagaaaaaaaa

SEQ ID NO: 306503 - DNA, 2070 bp, Homo sapiens
gagtgaggaaaagggaggggtggaggttttggaaagttgtcaaggctctagcaacggagcccaggaccaagaggcttctgagcagttcggcagcccagtggctgaaagggggaaacgtctcccaggagtggccggacagtacctgtttaagtgtttgataaacgttaagaaggaggtggacgatgccttagtggagatgcactgggttgagggccagaacagggatctgatgaaccagctttgcacctacatacgtaaccaaattttcaggcttgttgcagttaactagaaacctcctgcacagttggaaacgtgttgatagtaacttgctttggagtggcctgtggggtggcaagaggaatcctaccagcggcccattagtagcacgatgtggaattatcttcgaaaacaaaaacctatgaatctgtcccccacctccccccgcctccttcccgctttttgagttacagggagtcgtagtgtggtcatttacaaggaggaattgtggtcatcagtaacaacagaaagccctcagtaaactcccgagggattgcaagctggctcaagctggcccctcagctctggactgcctctgcaaggtcagaagggttgtttgtggagtctgggctgggcagcactgcctagaatatcatgctgtctctgtcacccaagggtgtttcttgaggaggggtggctctctctgcctccagctggaggccctggtaccctgttctaggtcactcttcaagatggggcctaccttgcatcaatcccacaaagggagctgtatggtgggtggtggggaatctgggagagaaaccttagtaatgctgggaaggagcagcagagtctggggaccacccggtaaatggcacattcctgacacctggctgttttgatgttgcttatttcagaagcagaattaggtaagcaaaactccccggtgtgactgagacacacagaaggcacccatacccccacctccagcctgttgacagtaccattttgtagcagttttactactgtgtgatttttgtttggacatctgaagtagagcttgttttgtttttaaataagaatattcacaaattaaaaaccagcggtcctatttgaatcctggggttagctgagtgagcggctgatgatagaaatgagaaatagaacaaaatagtatgtgccgtaggtagcttaagaaagtctcagatattttgttgctgatcaaatactgtttttttgtggcttcacttgtaatcccccctgtacttacctactcacattggagagttctgaggccggagtaactgtgtccttgaaacacgtttctaattggaatgccagggttcagtagccgtccccccggaaaggggtgaccttttgctgtgcttgatgttgcatcagcagcctagggttctgtttagactaaaatcttggccagagctccttgccatctgctaagaagactggggctgagtagttaagccagccttctgagaggtggctgttggtcaggacgggaagctggtgaccttggcatgtcttggcagcagctagatcaggccctcggcagagacacaggaagcggaactgctgtgccttaacttggctgtggagctggagctggagaaggcagcatactgaccagtggctttttgattgattgtttgttatgaggtggagttttactcttgttgtctaggctggagtgccgtggtgcgatcttagctcactgcaacccccgcctcccgggttcaagcgattctcctgcctcagcctcccaagtagctgggattacaggcacgcgccaccacgcctggctaattttgtgtttttggtagagatgggatttcaccatgttggccaggctaatctcgaactcatgatctcgggtgatccgcccaccttggcctcccaaagtgctgggattacagccgtgagccactactcccagcctctgaccagtgttcttaacctggtccgtggacctccagagagtccatgtacctcctagagctgtttaataataagatgtgggtaatgactgggtgcagtggctcaagcctgtaatcccag

SEQ ID NO: 306504 - DNA, 1709 bp, Homo sapiens
gagtgaggaaaagggaggggtggaggttttggaaagttgtcaaggctctagcaacggagcccaggaccaagaggcttctgagcagttcggcagcccagtggctgaaagggggaaacgtctcccaggagtggccggacagtacctgtttaagtgtttgataaacgttaagaaggaggtggacgatgccttagtggagatgcactgggttgagggccagaacagggatctgatgaaccagctttgcacctacatacgtaaccaaattttcaggcttgttgcagttaactagaaacctcctgcacagttggaaacgtgttgatagtaacttgctttggagtggcctgtggggtggcaagaggaatcctaccagcggcccattagtagcacgatgtggaattatcttcgaaaacaaaaacctatgaatctgtcccccacctccccccgcctccttcccgctttttgagttacagggagtcgtagtgtggtcatttacaaggaggaattgtggtcatcagtaacaacagaaagccctcagtaaactcccgagggattgcaagctggctcaagctggcccctcagctctggactgcctctgcaaggtcagaagggttgtttgtggagtctgggctgggcagcactgcctagaatatcatgctgtctctgtcacccaagggtgtttcttgaggaggggtggctctctctgcctccagctggaggccctggtaccctgttctaggtcactcttcaagatggggcctaccttgcatcaatcccacaaagggagctgtatggtgggtggtggggaatctgggagagaaaccttagtaatgctgggaaggagcagcagagtctggggaccacccggtaaatggcacattcctgacacctggctgttttgatgttgcttatttcagaagcagaattaggtaagcaaaactccccggtgtgactgagacacacagaaggcacccatacccccacctccagcctgttgacagtaccattttgtagcagttttactactgtgtgatttttgtttggacatctgaagtagagcttgttttgtttttaaataagaatattcacaaattaaaaaccagcggtcctatttgaatcctggggttagctgagtgagcggctgatgatagaaatgagaaatagaacaaaatagtatgtgccgtaggtagcttaagaaagtctcagatattttgttgctgatcaaatactgtttttttgtggcttcacttgtaatcccccctgtacttacctactcacattggagagttctgaggccggagtaactgtgtccttgaaacacgtttctaattggaatgccagggttcagtagccgtccccccggaaaggggtgaccttttgctgtgcttgatgttgcatcagcagcctagggttctgtttagactaaaatcttggccagagctccttgccatctgctaagaagactggggctgagtagttaagccagccttctgagaggtggctgttggtcaggacgggaagctggtgaccttggcatgtcttggcagcagctagatcaggccctcggcagagacacaggaagcggaactgctgtgccttaacttggctgtggagctggagctggagaaggcagcatactgaccagtggctttttgattgattgtttgttatgaggtgaggagaggaagtttatactctggagcgagctatga

SEQ ID NO: 306505 - DNA, 783 bp, Homo sapiens
acccagaacagtacctggcacatagtaatcactacgtatgtgtttgttaaacaaatgaattagagatcatttatggaagagtagtatgagagactagagtacaggaacccaatccagcttggagttggggaagaccccctaaaagaggtggcatctgagttcatcctttaaagaaagaaggagtggtcaaggaggcagctgagtacaggtgctcctggccaaatgtgcaaaggcagagtgagagagagcaggcccaggtgagtcacctgtaggtagttgtgaagttggaacaaagtctgggacctacctcctatcactacactattcctgaggctgtgaggagccactgaagcgaggaagacaccatcagatttgtgtcttggaaagactacagtccagcacagtgttttccaaagcaccttcatcagaataacctgggaagcttgtcaaaatgcatgttccaaaaccaaaaaaaaaaaaaaagcacattttgtgcccttccttacagaatcagaatcttggtggtagtggaacccagaaatctgcatctttaacaaactccctgggtgagtctaatgcacacaaaatctaagaactgccaatccagaggcttgtgaaagggtgatgctgggaggcacctcagaggctgttttgctcatctagtagcaagctgagggtggccccaatgaaggtattgaccctgaaaggaagaagcaaagccaagagacgtcatggtggttctgtggaactctagctaattgggtggtgtcgtggggctaggat

SEQ ID NO: 306506 - DNA, 6563 bp, Homo sapiens
tgctgctgttaatcatttcagagaagaacactgaactttgaaaaaaatgttggaagccattgacaaaaatcgggccctgcatgcagcagagcgcttgcaaaccaagctgcgagaacgtggggatgtagcaaatgaagacaaactgagccttctgaagtcagtcctgcagagccctctcttcagtcagattctgagccttcagacttctgtacagcagctgaaagaccaggtaaatattgcaacttcagcaacttcaaatattgaatatgcccacgttcctcatctcagcccagctgtgattcctactctgcaaaatgaatcgtttttattatccccaaacaatgggaatctggaagcacttacaggacctggtattccacacattaatgggaaacctgcttgtgatgaatttgatcagcttatcaaaaatatggcccagggtcgccatgtagaagtttttgagctcctcaaacctccatctggaggccttgggtttagtgttgtgggactaagaagtgaaaacagaggagagctgggaatatttgttcaagagatacaagagggcagtgtggcccatagagatggaagattgaaagaaactgatcaaattcttgctatcaatggacaggctcttgatcagacaattacacatcagcaggctatcagcatcctgcagaaagccaaagatactgtccagctagttattgccagaggctcattgcctcagcttgtcagccccatagtttcccgttctccatctgcagccagcacaatttcagctcactctaatccggttcactggcaacacatggaaacgattgaattggtgaatgatggatctggtttgggatttggcatcataggaggaaaagcaactggtgtgatagtaaaaaccattctgcctggaggagtagctgatcagcatgggcgtttatgcagtggagaccacattctaaagattggtgacacagatctagcaggaatgagcagtgagcaagtagcacaagtccttaggcaatgtggaaatagagttaagttgatgattgcaagaggtgccatagaagaacgtacagcacccactgctttgggcatcaccctctcctcatccccaacttcaacaccagagttgcgggttgatgcttctactcagaaaggtgaagaaagtgagacatttgatgtagaactcactaaaaatgtccaaggattaggaattaccattgctggctacattggagataaaaaattggaaccttcaggaatctttgtaaagagcattacaaaaagcagtgccgttgagcatgatggaagaatccaaattggagaccaaattatagcagtagatggcacaaaccttcagggttttactaatcagcaagcagtagaggtattgcgacatacaggacaaactgtgctcctgacactaatgaggagaggaatgaagcaggaagccgagctcatgtcaagggaagacgtcacaaaagatgcagatttgtctcctgttaatgccagcataatcaaagaaaattatgaaaaagatgaagattttttatcttcgacgagaaacaccaacatattaccaactgaagaagaagggtatccattactgtcagctgagatagaagaaatagaagatgcacaaaaacaagaagctgctctgctgacaaaatggcaaaggattatgggaattaactatgaaatagtggtggcccatgtgagcaagtttagtgagaacagtggattggggataagcctggaagcgacagtgggacatcattttatccgatctgttctaccagagggtcctgttggacacagcgggaagctcttcagtggagacgagctattggaagtaaatggcataactttacttggggaaaatcaccaagatgtggtgaatatcttaaaagaactgcctatagaagtgacaatggtgtgctgtcgtcgaactgtgccacccaccacccaatcagaattggatagcctggacttatgtgatattgagctaacagaaaagcctcacgtagatctaggtgagttcatcgggtcatcagagacagaggatccagtgctggcgatgactgatgcgggtcagagtacagaagaggttcaagcacctttggccatgtgggaggctggcattcagcacatagagctggagaaagggagcaaaggacttggttttagcattttagattatcaggatccaattgatccagcaagcactgtgattataattcgttctttggtgcctggcggcattgctgaaaaggatggacgacttcttcctggtgaccgactcatgtttgtaaacgatgttaacttggaaaacagcagtcttgaggaagctgtagaagcactgaagggagcaccgtcagggactgtgagaataggagttgctaagcctttacccctttcaccagaagaaggttatgtttctgctaaggaggattcctttctctacccaccacactcctgtgaggaagcagggctggctgacaaacccctcttcagggctgacttggctctggtgggcacaaatgatgctgacttagtagatgaatccacatttgagtctccatactctcctgaaaatgacagcatctactctactcaagcctctattttatctcttcatggcagttcttgtggtgatggcctgaactatggttcttcccttccatcatctcctcctaaggatgttattgaaaattcttgtgatccagtacttgatctgcatatgtctctggaggaactatatacccagaatctcctgcaaagacaggatgagaatacaccttcggtggacataagtatggggcctgcttctggctttactataaatgactacacacctgcaaatgctattgaacaacaatatgaatgtgaaaacacaatagtgtggactgaatctcatttaccaagtgaagttatatcaagtgcagaacttccttctgtgctacccgattcagctggaaagggctctgagtacctgcttgaacagagctccctggcctgtaatgctgagtgtgtcatgcttcaaaatgtatctaaagaatcttttgaaaggactattaatatagcaaaaggcaattctagcctaggaatgacagttagtgctaataaagatggcttggggatgatcgttcgaagcattattcatggaggtgccattagtcgagatggccggattgccattggggactgcatcttgtccattaatgaagagtctaccatcagtgtaaccaatgcccaggcacgagctatgttgagaagacattctctcattggccctgacataaaaattacttatgtgcctgcagaacatttggaagagttcaaaataagcttgggacaacaatctggaagagtaatggcactggatattttttcttcatacactggcagagacattccagaattaccagagcgagaagagggagagggtgaagaaagcgaacttcaaaacacagcatatagcaattggaatcagcccaggcgggtggaactctggagagaaccaagcaaatccttaggcatcagcattgttggtggacgagggatggggagtcggctaagcaatggagaagtgatgaggggcattttcatcaaacatgttctggaagatagtccagctggcaaaaatggaaccttgaaacctggagatagaatcgtagaggtggatggaatggacctcagagatgcaagccatgaacaagctgtggaagccattcggaaagcaggcaaccctgtagtctttatggtacagagcattataaacagaccaaggaaatcccctttgccttccttgctgcacaacctttaccctaagtacaacttcagcagcactaacccatttgctgactctctacaaatcaacgccgacaaggcacccagtcagtcagagtcagagccagagaaggctccattgtgcagtgtgcccccaccccctccttcagcctttgccgaaatgggtagtgatcacacacagtcatctgcaagcaaaatctcacaagatgtggacaaagaggatgagtttggttacagctggaaaaatatcagagagcgttatggaaccctaacaggcgagctgcatatgattgaactggagaaaggtcatagtggtttgggcctaagtcttgctgggaacaaagaccgatccaggatgagtgtcttcatagtggggattgatccaaatggagctgcaggaaaagatggtcgattgcaaattgcagatgagcttctagagatcaatggtcagattttatatggaagaagtcatcagaatgcctcatcaatcattaaatgtgccccttctaaagtgaaaataatttttatcagaaataaagatgcagtgaatcagatggccgtatgtcctggaaatgcagtagaacctttgccttctaactcagaaaatcttcaaaataaggagacagagccaactgttactacttctgatgcagctgtggacctcagttcatttaaaaatgtgcaacatctggagcttcccaaggatcaggggggtttgggtattgctatcagcgaagaagatacactcagtggagtcatcataaagagcttaacagagcatggggtagcagccacggatggacgactcaaagtcggagatcagatactggctgtagatgatgaaattgttgttggttaccctattgaaaagtttattagccttctgaagacagcaaagatgacagtaaaacttaccatccatgctgagaatccagattcccaggctgttccttcagcagctggtgcagccagtggagaaaaaaagaacagctcccagtctctgatggtcccacagtctggctccccagaaccggagtccatccgaaatacaagcagatcatcaacaccagcaatttttgcttctgatcctgcaacctgccccattatccctggctgcgaaacaaccatcgagatttccaaagggcgaacagggctgggcctgagcatcgttgggggttcagacacgctgctgggtgccattattatccatgaagtttatgaagaaggagcagcatgtaaagatggaagactctgggctggagatcagatcttagaggtgaatggaattgacttgagaaaggccacacatgatgaagcaatcaatgtcctgagacagacgccacagagagtgcgcctgacactctacagagatgaggccccatacaaagaggaggaagtgtgtgacaccctcactattgagctgcagaagaagccgggaaaaggcctaggattaagtattgttggtaaaagaaacgatactggagtatttgtgtcagacattgtcaaaggaggaattgcagatgccgatggaagactgatgcagggagaccagatattaatggtgaatggggaagacgttcgtaatgccacccaagaagcggttgccgctttgctaaagtgttccctaggcacagtaaccttggaagttggaagaatcaaagctggatccagtacatctgagtcactggaaagtagctcaaagaagaatgcattggcatctgaaatacagggattaagaacagtcgaaatgaaaaagggccctactgactcactgggaatcagcatcgctggaggagtaggcagcccacttggtgatgtgcctatatttattgcaatgatgcacccaactggagttgcagcacagacccaaaaactcagagttggggataggattgtcaccatctgtggcacatccactgagggcatgactcacacccaagcagttaacctactgaaaaatgcatctggctccattgaaatgcaggtggttgctggaggagacgtgagtgtggtcacaggtcatcagcaggagcctgcaagttccagtctttctttcactgggctgacgtcaagcagtatatttcaggatgatttaggacctcctcaatgtaagtctattacactagagcgaggaccagatggcttaggcttcagtatagttggaggatatggcagccctcatggagacttacccatttatgttaaaacagtgtttgcaaagggagcagcctctgaagacggacgtctgaaaaggggcgatcagatcattgctgtcaatgggcagagtctagaaggagtcacccatgaagaagctgttgccatccttaaacggacaaaaggcactgtcactttgatggttctctcttgaattggctgccagaattgaaccaacccaacccctagctcacctcctactgtaaagagaatgcactggtcctgacaatttttatgctgtgttcagccgggtcttcaaaactgtaggggggaaataacacttaagtttctttttctcatctagaaatgctttccttactgacaacctaacatcatttttcttttcttcttgcattttgtgaacttaaagagaaggaatatttgtgtaggtgaatctcgtttttatttgtggagatatctaatgttttgtagtcacatgggcaagaattattacatgctaagctggttagtataaagaaagataattctaaagctaaccaaagaaaatggcttcagtaaattaggatgaaaaatgaaaatat

SEQ ID NO: 306507 - DNA, 717 bp, Homo sapiens
tagaccgtgctaagatgggattgctacaatatgtagtagttggaattacatgatgctagtgtgcctaaatatttattaagaatataatatatacattgcacagtttcagattatgcattgcgtgtggatgtgtttggagagcgtattgtgtataagtataatcagttgtgcgcttataagtaaatgatgatgccaccccatgttgactatggtttttctagaaagcaactatgctgctaaccatagaggaacatagaagggttccagaatctttagtgctggttttaacaaccgatgcaacattaaaaatgtgttagtgtgctgtgcaattggttttcaattcatattaatcttaatgacagagaacaatgtgttactaattattttggttgtatgccattagtaaattgatagaaaaattaaggggattaacataacttcatttcattgccttatattaacatcttataatacaatagtttaagactaagggaaacagatggagctgtttattgagacaactggtgaggaattatcatgtgttcattcccattttagagcgtgaaactcctacattagaatatataaagtcactttaaatatctatatttgtaacagaagtagtgtacagatattttattacagcatttttgtgtaaatgcagaattaaagtgaataaataagaattttcagtggtgcacaaataaaaagaaagca

SEQ ID NO: 306508 - DNA, 7480 bp, Homo sapiens
tgctgctgttaatcatttcagagaagaacactgaactttgaaaaaaatgttggaagccattgacaaaaatcgggccctgcatgcagcagagcgcttgcaaaccaagctgcgagaacgtggggatgtagcaaatgaagacaaactgagccttctgaagtcagtcctgcagagccctctcttcagtcagattctgagccttcagacttctgtacagcagctgaaagaccaggtaaatattgcaacttcagcaacttcaaatattgaatatgcccacgttcctcatctcagcccagctgtgattcctactctgcaaaatgaatcgtttttattatccccaaacaatgggaatctggaagcacttacaggacctggtattccacacattaatgggaaacctgcttgtgatgaatttgatcagcttatcaaaaatatggcccagggtcgccatgtagaagtttttgagctcctcaaacctccatctggaggccttgggtttagtgttgtgggactaagaagtgaaaacagaggagagctgggaatatttgttcaagagatacaagagggcagtgtggcccatagagatggaagattgaaagaaactgatcaaattcttgctatcaatggacaggctcttgatcagacaattacacatcagcaggctatcagcatcctgcagaaagccaaagatactgtccagctagttattgccagaggctcattgcctcagcttgtcagccccatagtttcccgttctccatctgcagccagcacaatttcagctcactctaatccggttcactggcaacacatggaaacgattgaattggtgaatgatggatctggtttgggatttggcatcataggaggaaaagcaactggtgtgatagtaaaaaccattctgcctggaggagtagctgatcagcatgggcgtttatgcagtggagaccacattctaaagattggtgacacagatctagcaggaatgagcagtgagcaagtagcacaagtccttaggcaatgtggaaatagagttaagttgatgattgcaagaggtgccatagaagaacgtacagcacccactgctttgggcatcaccctctcctcatccccaacttcaacaccagagttgcgggttgatgcttctactcagaaaggtgaagaaagtgagacatttgatgtagaactcactaaaaatgtccaaggattaggaattaccattgctggctacattggagataaaaaattggaaccttcaggaatctttgtaaagagcattacaaaaagcagtgccgttgagcatgatggaagaatccaaattggagaccaaattatagcagtagatggcacaaaccttcagggttttactaatcagcaagcagtagaggtattgcgacatacaggacaaactgtgctcctgacactaatgaggagaggaatgaagcaggaagccgagctcatgtcaagggaagacgtcacaaaagatgcagatttgtctcctgttaatgccagcataatcaaagaaaattatgaaaaagatgaagattttttatcttcgacgagaaacaccaacatattaccaactgaagaagaagggtatccattactgtcagctgagatagaagaaatagaagatgcacaaaaacaagaagctgctctgctgacaaaatggcaaaggattatgggaattaactatgaaatagtggtggcccatgtgagcaagtttagtgagaacagtggattggggataagcctggaagcgacagtgggacatcattttatccgatctgttctaccagagggtcctgttggacacagcgggaagctcttcagtggagacgagctattggaagtaaatggcataactttacttggggaaaatcaccaagatgtggtgaatatcttaaaagaactgcctatagaagtgacaatggtgtgctgtcgtcgaactgtgccacccaccacccaatcagaattggatagcctggacttatgtgatattgagctaacagaaaagcctcacgtagatctaggtgagttcatcgggtcatcagagacagaggatccagtgctggcgatgactgatgcgggtcagagtacagaagaggttcaagcacctttggccatgtgggaggctggcattcagcacatagagctggagaaagggagcaaaggacttggttttagcattttagattatcaggatccaattgatccagcaagcactgtgattataattcgttctttggtgcctggcggcattgctgaaaaggatggacgacttcttcctggtgaccgactcatgtttgtaaacgatgttaacttggaaaacagcagtcttgaggaagctgtagaagcactgaagggagcaccgtcagggactgtgagaataggagttgctaagcctttacccctttcaccagaagaaggttatgtttctgctaaggaggattcctttctctacccaccacactcctgtgaggaagcagggctggctgacaaacccctcttcagggctgacttggctctggtgggcacaaatgatgctgacttagtagatgaatccacatttgagtctccatactctcctgaaaatgacagcatctactctactcaagcctctattttatctcttcatggcagttcttgtggtgatggcctgaactatggttcttcccttccatcatctcctcctaaggatgttattgaaaattcttgtgatccagtacttgatctgcatatgtctctggaggaactatatacccagaatctcctgcaaagacaggatgagaatacaccttcggtggacataagtatggggcctgcttctggctttactataaatgactacacacctgcaaatgctattgaacaacaatatgaatgtgaaaacacaatagtgtggactgaatctcatttaccaagtgaagttatatcaagtgcagaacttccttctgtgctacccgattcagctggaaagggctctgagtacctgcttgaacagagctccctggcctgtaatgctgagtgtgtcatgcttcaaaatgtatctaaagaatcttttgaaaggactattaatatagcaaaaggcaattctagcctaggaatgacagttagtgctaataaagatggcttggggatgatcgttcgaagcattattcatggaggtgccattagtcgagatggccggattgccattggggactgcatcttgtccattaatgaagagtctaccatcagtgtaaccaatgcccaggcacgagctatgttgagaagacattctctcattggccctgacataaaaattacttatgtgcctgcagaacatttggaagagttcaaaataagcttgggacaacaatctggaagagtaatggcactggatattttttcttcatacactggcagagacattccagaattaccagagcgagaagagggagagggtgaagaaagcgaacttcaaaacacagcatatagcaattggaatcagcccaggcgggtggaactctggagagaaccaagcaaatccttaggcatcagcattgttggtggacgagggatggggagtcggctaagcaatggagaagtgatgaggggcattttcatcaaacatgttctggaagatagtccagctggcaaaaatggaaccttgaaacctggagatagaatcgtagaggtggatggaatggacctcagagatgcaagccatgaacaagctgtggaagccattcggaaagcaggcaaccctgtagtctttatggtacagagcattataaacagaccaaggaaatcccctttgccttccttgctgcacaacctttaccctaagtacaacttcagcagcactaacccatttgctgactctctacaaatcaacgccgacaaggcacccagtcagtcagagtcagagccagagaaggctccattgtgcagtgtgcccccaccccctccttcagcctttgccgaaatgggtagtgatcacacacagtcatctgcaagcaaaatctcacaagatgtggacaaagaggatgagtttggttacagctggaaaaatatcagagagcgttatggaaccctaacaggcgagctgcatatgattgaactggagaaaggtcatagtggtttgggcctaagtcttgctgggaacaaagaccgatccaggatgagtgtcttcatagtggggattgatccaaatggagctgcaggaaaagatggtcgattgcaaattgcagatgagcttctagagatcaatggtcagattttatatggaagaagtcatcagaatgcctcatcaatcattaaatgtgccccttctaaagtgaaaataatttttatcagaaataaagatgcagtgaatcagatggccgtatgtcctggaaatgcagtagaacctttgccttctaactcagaaaatcttcaaaataaggagacagagccaactgttactacttctgatgcagctgtggacctcagttcatttaaaaatgtgcaacatctggagcttcccaaggatcaggggggtttgggtattgctatcagcgaagaagatacactcagtggagtcatcataaagagcttaacagagcatggggtagcagccacggatggacgactcaaagtcggagatcagatactggctgtagatgatgaaattgttgttggttaccctattgaaaagtttattagccttctgaagacagcaaagatgacagtaaaacttaccatccatgctgagaatccagattcccaggctgttccttcagcagctggtgcagccagtggagaaaaaaagaacagctcccaatacaagcagatcatcaacaccagcaatttttgcttctgatcctgcaacctgccccattatccctggctgcgaaacaaccatcgagatttccaaagggcgaacagggctgggcctgagcatcgttgggggttcagacacgctgctgggtgccattattatccatgaagtttatgaagaaggagcagcatgtaaagatggaagactctgggctggagatcagatcttagaggtgaatggaattgacttgagaaaggccacacatgatgaagcaatcaatgtcctgagacagacgccacagagagtgcgcctgacactctacagagatgaggccccatacaaagaggaggaagtgtgtgacaccctcactattgagctgcagaagaagccgggaaaaggcctaggattaagtattgttggtaaaagaaacgatactggagtatttgtgtcagacattgtcaaaggaggaattgcagatgccgatggaagactgatgcagggagaccagatattaatggtgaatggggaagacgttcgtaatgccacccaagaagcggttgccgctttgctaaagtgttccctaggcacagtaaccttggaagttggaagaatcaaagctggtccattccattcagagaggaggccatctcaaagcagccaggtgagtgaaggcagcctgtcatctttcacttttccactctctggatccagtacatctgagtcactggaaagtagctcaaagaagaatgcattggcatctgaaatacagggattaagaacagtcgaaatgaaaaagggccctactgactcactgggaatcagcatcgctggaggagtaggcagcccacttggtgatgtgcctatatttattgcaatgatgcacccaactggagttgcagcacagacccaaaaactcagagttggggataggattgtcaccatctgtggcacatccactgagggcatgactcacacccaagcagttaacctactgaaaaatgcatctggctccattgaaatgcaggtggttgctggaggagacgtgagtgtggtcacaggtcatcagcaggagcctgcaagttccagtctttctttcactgggctgacgtcaagcagtatatttcaggatgatttaggacctcctcaatgtaagtctattacactagagcgaggaccagatggcttaggcttcagtatagttggaggatatggcagccctcatggagacttacccatttatgttaaaacagtgtttgcaaagggagcagcctctgaagacggacgtctgaaaaggggcgatcagatcattgctgtcaatgggcagagtctagaaggagtcacccatgaagaagctgttgccatccttaaacggacaaaaggcactgtcactttgatggttctctcttgaattggctgccagaattgaaccaacccaacccctagctcacctcctactgtaaagagaatgcactggtcctgacaatttttatgctgtgttcagccgggtcttcaaaactgtaggggggaaataacacttaagtttctttttctcatctagaaatgctttccttactgacaacctaacatcatttttcttttcttcttgcattttgtgaacttaaagagaaggaatatttgtgtaggtgaatctcgtttttatttgtggagatatctaatgttttgtagtcacatgggcaagaattattacatgctaagctggttagtataaagaaagataattctaaagctaaccaaagaaaatggcttcagtaaattaggatgaaaaatgaaaatataaaataaagaagaaaatctcggggagtttaaaaaaaatgcctcaatttggcaatctacctcctctccccaccccaaactaaaaaaagaaaaaaaggttttctaatgaaaatctttaaaaatactgtcagtattttaaaattttcaacagtattataaaaacattgcatctccccacctctaatatgcatatatatttttcctgctaaaattggtttctacaattgagtaaatggcaaatacatgaagcaatgtccctaaattttataaagaaattatatttaatgcacatttcaattttcattcttatttttgaccttttgtaaaatattttcatgttgctataagtaaatgatgatgccaccccatgttgactatggtttttctagaaagcaactatgctgctaaccatagaggaacatagaagggttccagaatctttagtgctggttttaacaaccgatgcaacattaaaaatgtgttagtgtgctgtgcaattggttttcaattcatattaatcttaatgacagagaacaatgtgttactaattattttggttgtatgccattagtaaattgatagaaaaattaaggggattaacataacttcatttcattgccttatattaacatcttataatacaatagtttaagactaagggaaacagatggagctgtttattgagacaactggtgaggaattatcatgtgttcattcccattttagagcgtgaaactcctacattagaatatataaagtcactttaaatatctatatttgtaacagaagtagtgtacagatattttattacagcatttttgtgtaaatgcagaattaaagtgaataaataagaattttcagtggtgcacaaataaaaagaaagca

SEQ ID NO: 306509 - DNA, 5875 bp, Homo sapiens
gaacttttgcatatatccattttctcttgtttttatttatcataagaattccttttatttaatatcaaaatagctttacatttttttctgactagagatgattgaaacactgatgaaaaaagtgacagtcacgcacaatcctgctgtcgagatataaccattgcatattttcatagacctttgaatcatatatttttaatgtttgttaaaacttaggtatttcttccttcttaacaactttcagtaattactaccttaattcctaaaggtttcatgaaaagctgttgctactcttgtttgaggatgttttgtttggacagatgctgggaatatcccttttcttgtagtgttggtatgtgtgtcagctaatgcaatgcctctgaaataagagctgtctgatattatccagcctcacgtagatctaggtgagttcatcgggtcatcagagacagaggatccagtgctggcgatgactgatgcgggtcagagtacagaagaggttcaagcacctttggccatgtgggaggctggcattcagcacatagagctggagaaagggagcaaaggacttggttttagcattttagattatcaggatccaattgatccagcaagcactgtgattataattcgttctttggtgcctggcggcattgctgaaaaggatggacgacttcttcctggtgaccgactcatgtttgtaaacgatgttaacttggaaaacagcagtcttgaggaagctgtagaagcactgaagggagcaccgtcagggactgtgagaataggagttgctaagcctttacccctttcaccagaagaaggttatgtttctgctaaggaggattcctttctctacccaccacactcctgtgaggaagcagggctggctgacaaacccctcttcagggctgacttggctctggtgggcacaaatgatgctgacttagtagatgaatccacatttgagtctccatactctcctgaaaatgacagcatctactctactcaagcctctattttatctcttcatggcagttcttgtggtgatggcctgaactatggttcttcccttccatcatctcctcctaaggatgttattgaaaattcttgtgatccagtacttgatctgcatatgtctctggaggaactatatacccagaatctcctgcaaagacaggatgagaatacaccttcggtggacataagtatggggcctgcttctggctttactataaatgactacacacctgcaaatgctattgaacaacaatatgaatgtgaaaacacaatagtgtggactgaatctcatttaccaagtgaagttatatcaagtgcagaacttccttctgtgctacccgattcagctggaaagggctctgagtacctgcttgaacagagctccctggcctgtaatgctgagtgtgtcatgcttcaaaatgtatctaaagaatcttttgaaaggactattaatatagcaaaaggcaattctagcctaggaatgacagttagtgctaataaagatggcttggggatgatcgttcgaagcattattcatggaggtgccattagtcgagatggccggattgccattggggactgcatcttgtccattaatgaagagtctaccatcagtgtaaccaatgcccaggcacgagctatgttgagaagacattctctcattggccctgacataaaaattacttatgtgcctgcagaacatttggaagagttcaaaataagcttgggacaacaatctggaagagtaatggcactggatattttttcttcatacactggcagagacattccagaattaccagagcgagaagagggagagggtgaagaaagcgaacttcaaaacacagcatatagcaattggaatcagcccaggcgggtggaactctggagagaaccaagcaaatccttaggcatcagcattgttggtggacgagggatggggagtcggctaagcaatggagaagtgatgaggggcattttcatcaaacatgttctggaagatagtccagctggcaaaaatggaaccttgaaacctggagatagaatcgtagaggtggatggaatggacctcagagatgcaagccatgaacaagctgtggaagccattcggaaagcaggcaaccctgtagtctttatggtacagagcattataaacagaccaaggaaatcccctttgccttccttgctgcacaacctttaccctaagtacaacttcagcagcactaacccatttgctgactctctacaaatcaacgccgacaaggcacccagtcagtcagagtcagagccagagaaggctccattgtgcagtgtgcccccaccccctccttcagcctttgccgaaatgggtagtgatcacacacagtcatctgcaagcaaaatctcacaagatgtggacaaagaggatgagtttggttacagctggaaaaatatcagagagcgttatggaaccctaacaggcgagctgcatatgattgaactggagaaaggtcatagtggtttgggcctaagtcttgctgggaacaaagaccgatccaggatgagtgtcttcatagtggggattgatccaaatggagctgcaggaaaagatggtcgattgcaaattgcagatgagcttctagagatcaatggtcagattttatatggaagaagtcatcagaatgcctcatcaatcattaaatgtgccccttctaaagtgaaaataatttttatcagaaataaagatgcagtgaatcagatggccgtatgtcctggaaatgcagtagaacctttgccttctaactcagaaaatcttcaaaataaggagacagagccaactgttactacttctgatgcagctgtggacctcagttcatttaaaaatgtgcaacatctggagcttcccaaggatcaggggggtttgggtattgctatcagcgaagaagatacactcagtggagtcatcataaagagcttaacagagcatggggtagcagccacggatggacgactcaaagtcggagatcagatactggctgtagatgatgaaattgttgttggttaccctattgaaaagtttattagccttctgaagacagcaaagatgacagtaaaacttaccatccatgctgagaatccagattcccaggctgttccttcagcagctggtgcagccagtggagaaaaaaagaacagctcccaatacaagcagatcatcaacaccagcaatttttgcttctgatcctgcaacctgccccattatccctggctgcgaaacaaccatcgagatttccaaagggcgaacagggctgggcctgagcatcgttgggggttcagacacgctgctgggtgccattattatccatgaagtttatgaagaaggagcagcatgtaaagatggaagactctgggctggagatcagatcttagaggtgaatggaattgacttgagaaaggccacacatgatgaagcaatcaatgtcctgagacagacgccacagagagtgcgcctgacactctacagagatgaggccccatacaaagaggaggaagtgtgtgacaccctcactattgagctgcagaagaagccgggaaaaggcctaggattaagtattgttggtaaaagaaacgatactggagtatttgtgtcagacattgtcaaaggaggaattgcagatgccgatggaagactgatgcagggagaccagatattaatggtgaatggggaagacgttcgtaatgccacccaagaagcggttgccgctttgctaaagtgttccctaggcacagtaaccttggaagttggaagaatcaaagctggtccattccattcagagaggaggccatctcaaagcagccaggtgagtgaaggcagcctgtcatctttcacttttccactctctggatccagtacatctgagtcactggaaagtagctcaaagaagaatgcattggcatctgaaatacagggattaagaacagtcgaaatgaaaaagggccctactgactcactgggaatcagcatcgctggaggagtaggcagcccacttggtgatgtgcctatatttattgcaatgatgcacccaactggagttgcagcacagacccaaaaactcagagttggggataggattgtcaccatctgtggcacatccactgagggcatgactcacacccaagcagttaacctactgaaaaatgcatctggctccattgaaatgcaggtggttgctggaggagacgtgagtgtggtcacaggtcatcagcaggagcctgcaagttccagtctttctttcactgggctgacgtcaagcagtatatttcaggatgatttaggacctcctcaatgtaagtctattacactagagcgaggaccagatggcttaggcttcagtatagttggaggatatggcagccctcatggagacttacccatttatgttaaaacagtgtttgcaaagggagcagcctctgaagacggacgtctgaaaaggggcgatcagatcattgctgtcaatgggcagagtctagaaggagtcacccatgaagaagctgttgccatccttaaacggacaaaaggcactgtcactttgatggttctctcttgaattggctgccagaattgaaccaacccaacccctagctcacctcctactgtaaagagaatgcactggtcctgacaatttttatgctgtgttcagccgggtcttcaaaactgtaggggggaaataacacttaagtttctttttctcatctagaaatgctttccttactgacaacctaacatcatttttcttttcttcttgcattttgtgaacttaaagagaaggaatatttgtgtaggtgaatctcgtttttatttgtggagatatctaatgttttgtagtcacatgggcaagaattattacatgctaagctggttagtataaagaaagataattctaaagctaaccaaagaaaatggcttcagtaaattaggatgaaaaatgaaaatataaaataaagaagaaaatctcggggagtttaaaaaaaatgcctcaatttggcaatctacctcctctccccaccccaaactaaaaaaagaaaaaaaggttttctaatgaaaatctttaaaaatactgtcagtattttaaaattttcaacagtattataaaaacattgcatctccccacctctaatatgcatatatatttttcctgctaaaattggtttctacaattgagtaaatggcaaatacatgaagcaatgtccctaaattttataaagaaattatatttaatgcacatttcaattttcattcttatttttgaccttttgtaaaatattttcatgttgctataagtaaatgatgatgccaccccatgttgactatggtttttctagaaagcaactatgctgctaaccatagaggaacatagaagggttccagaatctttagtgctggttttaacaaccgatgcaacattaaaaatgtgttagtgtgctgtgcaattggttttcaattcatattaatcttaatgacagagaacaatgtgttactaattattttggttgtatgccattagtaaattgatagaaaaattaaggggattaacataacttcatttcattgccttatattaacatcttataatacaatagtttaagactaagggaaacagatggagctgtttattgagacaactggtgaggaattatcatgtgttcattcccattttagagcgtgaaactcctacattagaatatataaagtcactttaaatatctatatttgtaacagaagtagtgtacagatattttattacagcatttttgtgtaaatgcagaattaaagtgaataaataagaattttcagtggtgcacaaataaaaagaaagca

SEQ ID NO: 306510 - DNA, 6434 bp, Homo sapiens
aaggcatagaagcctgtgtcctaccctagaactagtgactcattttctggatatggtaccccagaatctatattaaaataaacagaagcctctcaaatgattctagtgcatccctgttaatactggtttccaaagagatattagggtcttactgtcaattccctgataaggtgaatacttattctccattcttttcacactaacaactatacatacacattttgtgaattggtaatacaaatatccatttatttaacatgtaacatgcttttttttttttttaatcacaggtagatggcacaaaccttcagggttttactaatcagcaagcagtagaggtattgcgacatacaggacaaactgtgctcctgacactaatgaggagaggaatgaagcaggaagccgagctcatgtcaagggaagacgtcacaaaagatgcagatttgtctcctgttaatgccagcataatcaaagaaaattatgaaaaagatgaagattttttatcttcgacgagaaacaccaacatattaccaactgaagaagaagggtatccattactgtcagctgagatagaagaaatagaagatgcacaaaaacaagaagctgctctgctgacaaaatggcaaaggattatgggaattaactatgaaatagtggtggcccatgtgagcaagtttagtgagaacagtggattggggataagcctggaagcgacagtgggacatcattttatccgatctgttctaccagagggtcctgttggacacagcgggaagctcttcagtggagacgagctattggaagtaaatggcataactttacttggggaaaatcaccaagatgtggtgaatatcttaaaagaactgcctatagaagtgacaatggtgtgctgtcgtcgaactgtgccacccaccacccaatcagaattggatagcctggacttatgtgatattgagctaacagaaaagcctcacgtagatctaggtgagttcatcgggtcatcagagacagaggatccagtgctggcgatgactgatgcgggtcagagtacagaagaggttcaagcacctttggccatgtgggaggctggcattcagcacatagagctggagaaagggagcaaaggacttggttttagcattttagattatcaggatccaattgatccagcaagcactgtgattataattcgttctttggtgcctggcggcattgctgaaaaggatggacgacttcttcctggtgaccgactcatgtttgtaaacgatgttaacttggaaaacagcagtcttgaggaagctgtagaagcactgaagggagcaccgtcagggactgtgagaataggagttgctaagcctttacccctttcaccagaagaaggttatgtttctgctaaggaggattcctttctctacccaccacactcctgtgaggaagcagggctggctgacaaacccctcttcagggctgacttggctctggtgggcacaaatgatgctgacttagtagatgaatccacatttgagtctccatactctcctgaaaatgacagcatctactctactcaagcctctattttatctcttcatggcagttcttgtggtgatggcctgaactatggttcttcccttccatcatctcctcctaaggatgttattgaaaattcttgtgatccagtacttgatctgcatatgtctctggaggaactatatacccagaatctcctgcaaagacaggatgagaatacaccttcggtggacataagtatggggcctgcttctggctttactataaatgactacacacctgcaaatgctattgaacaacaatatgaatgtgaaaacacaatagtgtggactgaatctcatttaccaagtgaagttatatcaagtgcagaacttccttctgtgctacccgattcagctggaaagggctctgagtacctgcttgaacagagctccctggcctgtaatgctgagtgtgtcatgcttcaaaatgtatctaaagaatcttttgaaaggactattaatatagcaaaaggcaattctagcctaggaatgacagttagtgctaataaagatggcttggggatgatcgttcgaagcattattcatggaggtgccattagtcgagatggccggattgccattggggactgcatcttgtccattaatgaagagtctaccatcagtgtaaccaatgcccaggcacgagctatgttgagaagacattctctcattggccctgacataaaaattacttatgtgcctgcagaacatttggaagagttcaaaataagcttgggacaacaatctggaagagtaatggcactggatattttttcttcatacactggcagagacattccagaattaccagagcgagaagagggagagggtgaagaaagcgaacttcaaaacacagcatatagcaattggaatcagcccaggcgggtggaactctggagagaaccaagcaaatccttaggcatcagcattgttggtggacgagggatggggagtcggctaagcaatggagaagtgatgaggggcattttcatcaaacatgttctggaagatagtccagctggcaaaaatggaaccttgaaacctggagatagaatcgtagaggtggatggaatggacctcagagatgcaagccatgaacaagctgtggaagccattcggaaagcaggcaaccctgtagtctttatggtacagagcattataaacagaccaaggaaatcccctttgccttccttgctgcacaacctttaccctaagtacaacttcagcagcactaacccatttgctgactctctacaaatcaacgccgacaaggcacccagtcagtcagagtcagagccagagaaggctccattgtgcagtgtgcccccaccccctccttcagcctttgccgaaatgggtagtgatcacacacagtcatctgcaagcaaaatctcacaagatgtggacaaagaggatgagtttggttacagctggaaaaatatcagagagcgttatggaaccctaacaggcgagctgcatatgattgaactggagaaaggtcatagtggtttgggcctaagtcttgctgggaacaaagaccgatccaggatgagtgtcttcatagtggggattgatccaaatggagctgcaggaaaagatggtcgattgcaaattgcagatgagcttctagagatcaatggtcagattttatatggaagaagtcatcagaatgcctcatcaatcattaaatgtgccccttctaaagtgaaaataatttttatcagaaataaagatgcagtgaatcagatggccgtatgtcctggaaatgcagtagaacctttgccttctaactcagaaaatcttcaaaataaggagacagagccaactgttactacttctgatgcagctgtggacctcagttcatttaaaaatgtgcaacatctggagcttcccaaggatcaggggggtttgggtattgctatcagcgaagaagatacactcagtggagtcatcataaagagcttaacagagcatggggtagcagccacggatggacgactcaaagtcggagatcagatactggctgtagatgatgaaattgttgttggttaccctattgaaaagtttattagccttctgaagacagcaaagatgacagtaaaacttaccatccatgctgagaatccagattcccaggctgttccttcagcagctggtgcagccagtggagaaaaaaagaacagctcccaatacaagcagatcatcaacaccagcaatttttgcttctgatcctgcaacctgccccattatccctggctgcgaaacaaccatcgagatttccaaagggcgaacagggctgggcctgagcatcgttgggggttcagacacgctgctgggtgccattattatccatgaagtttatgaagaaggagcagcatgtaaagatggaagactctgggctggagatcagatcttagaggtgaatggaattgacttgagaaaggccacacatgatgaagcaatcaatgtcctgagacagacgccacagagagtgcgcctgacactctacagagatgaggccccatacaaagaggaggaagtgtgtgacaccctcactattgagctgcagaagaagccgggaaaaggcctaggattaagtattgttggtaaaagaaacgatactggagtatttgtgtcagacattgtcaaaggaggaattgcagatgccgatggaagactgatgcagggagaccagatattaatggtgaatggggaagacgttcgtaatgccacccaagaagcggttgccgctttgctaaagtgttccctaggcacagtaaccttggaagttggaagaatcaaagctggtccattccattcagagaggaggccatctcaaagcagccaggtgagtgaaggcagcctgtcatctttcacttttccactctctggatccagtacatctgagtcactggaaagtagctcaaagaagaatgcattggcatctgaaatacagggattaagaacagtcgaaatgaaaaagggccctactgactcactgggaatcagcatcgctggaggagtaggcagcccacttggtgatgtgcctatatttattgcaatgatgcacccaactggagttgcagcacagacccaaaaactcagagttggggataggattgtcaccatctgtggcacatccactgagggcatgactcacacccaagcagttaacctactgaaaaatgcatctggctccattgaaatgcaggtggttgctggaggagacgtgagtgtggtcacaggtcatcagcaggagcctgcaagttccagtctttctttcactgggctgacgtcaagcagtatatttcaggatgatttaggacctcctcaatgtaagtctattacactagagcgaggaccagatggcttaggcttcagtatagttggaggatatggcagccctcatggagacttacccatttatgttaaaacagtgtttgcaaagggagcagcctctgaagacggacgtctgaaaaggggcgatcagatcattgctgtcaatgggcagagtctagaaggagtcacccatgaagaagctgttgccatccttaaacggacaaaaggcactgtcactttgatggttctctcttgaattggctgccagaattgaaccaacccaacccctagctcacctcctactgtaaagagaatgcactggtcctgacaatttttatgctgtgttcagccgggtcttcaaaactgtaggggggaaataacacttaagtttctttttctcatctagaaatgctttccttactgacaacctaacatcatttttcttttcttcttgcattttgtgaacttaaagagaaggaatatttgtgtaggtgaatctcgtttttatttgtggagatatctaatgttttgtagtcacatgggcaagaattattacatgctaagctggttagtataaagaaagataattctaaagctaaccaaagaaaatggcttcagtaaattaggatgaaaaatgaaaatataaaataaagaagaaaatctcggggagtttaaaaaaaatgcctcaatttggcaatctacctcctctccccaccccaaactaaaaaaagaaaaaaaggttttctaatgaaaatctttaaaaatactgtcagtattttaaaattttcaacagtattataaaaacattgcatctccccacctctaatatgcatatatatttttcctgctaaaattggtttctacaattgagtaaatggcaaatacatgaagcaatgtccctaaattttataaagaaattatatttaatgcacatttcaattttcattcttatttttgaccttttgtaaaatattttcatgttgctataagtaaatgatgatgccaccccatgttgactatggtttttctagaaagcaactatgctgctaaccatagaggaacatagaagggttccagaatctttagtgctggttttaacaaccgatgcaacattaaaaatgtgttagtgtgctgtgcaattggttttcaattcatattaatcttaatgacagagaacaatgtgttactaattattttggttgtatgccattagtaaattgatagaaaaattaaggggattaacataacttcatttcattgccttatattaacatcttataatacaatagtttaagactaagggaaacagatggagctgtttattgagacaactggtgaggaattatcatgtgttcattcccattttagagcgtgaaactcctacattagaatatataaagtcactttaaatatctatatttgtaacagaagtagtgtacagatattttattacagcatttttgtgtaaatgcagaattaaagtgaataaataagaattttcagtggtgcacaaataaaaagaaagca

SEQ ID NO: 306511 - DNA, 4036 bp, Homo sapiens
cgcggcgtatgcttcacattctagattttctgcagcacctgctgacgatcgagcccccttttatgtaattacttatgtgcctgcagaacatttggaagagttcaaaataagcttgggacaacaatctggaagagtaatggcactggatattttttcttcatacactggcagagacattccagaattaccagagcgagaagagggagagggtgaagaaagcgaacttcaaaacacagcatatagcaattggaatcagcccaggcgggtggaactctggagagaaccaagcaaatccttaggcatcagcattgttggtggacgagggatggggagtcggctaagcaatggagaagtgatgaggggcattttcatcaaacatgttctggaagatagtccagctggcaaaaatggaaccttgaaacctggagatagaatcgtagaggcacccagtcagtcagagtcagagccagagaaggctccattgtgcagtgtgcccccaccccctccttcagcctttgccgaaatgggtagtgatcacacacagtcatctgcaagcaaaatctcacaagatgtggacaaagaggatgagtttggttacagctggaaaaatatcagagagcgttatggaaccctaacaggcgagctgcatatgattgaactggagaaaggtcatagtggtttgggcctaagtcttgctgggaacaaagaccgatccaggatgagtgtcttcatagtggggattgatccaaatggagctgcaggaaaagatggtcgattgcaaattgcagatgagcttctagagatcaatggtcagattttatatggaagaagtcatcagaatgcctcatcaatcattaaatgtgccccttctaaagtgaaaataatttttatcagaaataaagatgcagtgaatcagatggccgtatgtcctggaaatgcagtagaacctttgccttctaactcagaaaatcttcaaaataaggagacagagccaactgttactacttctgatgcagctgtggacctcagttcatttaaaaatgtgcaacatctggagcttcccaaggatcaggggggtttgggtattgctatcagcgaagaagatacactcagtggagtcatcataaagagcttaacagagcatggggtagcagccacggatggacgactcaaagtcggagatcagatactggctgtagatgatgaaattgttgttggttaccctattgaaaagtttattagccttctgaagacagcaaagatgacagtaaaacttaccatccatgctgagaatccagattcccaggctgttccttcagcagctggtgcagccagtggagaaaaaaagaacagctcccaatacaagcagatcatcaacaccagcaatttttgcttctgatcctgcaacctgccccattatccctggctgcgaaacaaccatcgagatttccaaagggcgaacagggctgggcctgagcatcgttgggggttcagacacgctgctgggtgccattattatccatgaagtttatgaagaaggagcagcatgtaaagatggaagactctgggctggagatcagatcttagaggtgaatggaattgacttgagaaaggccacacatgatgaagcaatcaatgtcctgagacagacgccacagagagtgcgcctgacactctacagagatgaggccccatacaaagaggaggaagtgtgtgacaccctcactattgagctgcagaagaagccgggaaaaggcctaggattaagtattgttggtaaaagaaacgatactggagtatttgtgtcagacattgtcaaaggaggaattgcagatgccgatggaagactgatgcagggagaccagatattaatggtgaatggggaagacgttcgtaatgccacccaagaagcggttgccgctttgctaaagtgttccctaggcacagtaaccttggaagttggaagaatcaaagctggtccattccattcagagaggaggccatctcaaagcagccaggtgagtgaaggcagcctgtcatctttcacttttccactctctggatccagtacatctgagtcactggaaagtagctcaaagaagaatgcattggcatctgaaatacagggattaagaacagtcgaaatgaaaaagggccctactgactcactgggaatcagcatcgctggaggagtaggcagcccacttggtgatgtgcctatatttattgcaatgatgcacccaactggagttgcagcacagacccaaaaactcagagttggggataggattgtcaccatctgtggcacatccactgagggcatgactcacacccaagcagttaacctactgaaaaatgcatctggctccattgaaatgcaggtggttgctggaggagacgtgagtgtggtcacaggtcatcagcaggagcctgcaagttccagtctttctttcactgggctgacgtcaagcagtatatttcaggatgatttaggacctcctcaatgtaagtctattacactagagcgaggaccagatggcttaggcttcagtatagttggaggatatggcagccctcatggagacttacccatttatgttaaaacagtgtttgcaaagggagcagcctctgaagacggacgtctgaaaaggggcgatcagatcattgctgtcaatgggcagagtctagaaggagtcacccatgaagaagctgttgccatccttaaacggacaaaaggcactgtcactttgatggttctctcttgaattggctgccagaattgaaccaacccaacccctagctcacctcctactgtaaagagaatgcactggtcctgacaatttttatgctgtgttcagccgggtcttcaaaactgtaggggggaaataacacttaagtttctttttctcatctagaaatgctttccttactgacaacctaacatcatttttcttttcttcttgcattttgtgaacttaaagagaaggaatatttgtgtaggtgaatctcgtttttatttgtggagatatctaatgttttgtagtcacatgggcaagaattattacatgctaagctggttagtataaagaaagataattctaaagctaaccaaagaaaatggcttcagtaaattaggatgaaaaatgaaaatataaaataaagaagaaaatctcggggagtttaaaaaaaatgcctcaatttggcaatctacctcctctccccaccccaaactaaaaaaagaaaaaaaggttttctaatgaaaatctttaaaaatactgtcagtattttaaaattttcaacagtattataaaaacattgcatctccccacctctaatatgcatatatatttttcctgctaaaattggtttctacaattgagtaaatggcaaatacatgaagcaatgtccctaaattttataaagaaattatatttaatgcacatttcaattttcattcttatttttgaccttttgtaaaatattttcatgttgctataagtaaatgatgatgccaccccatgttgactatggtttttctagaaagcaactatgctgctaaccatagaggaacatagaagggttccagaatctttagtgctggttttaacaaccgatgcaacattaaaaatgtgttagtgtgctgtgcaattggttttcaattcatattaatcttaatgacagagaacaatgtgttactaattattttggttgtatgccattagtaaattgatagaaaaattaaggggattaacataacttcatttcattgccttatattaacatcttataatacaatagtttaagactaagggaaacagatggagctgtttattgagacaactggtgaggaattatcatgtgttcattcccattttagagcgtgaaactcctacattagaatatataaagtcactttaaatatctatatttgtaacagaagtagtgtacagatattttattacagcatttttgtgtaaatgcagaattaaagtgaataaataagaattttcagtggtgcacaaataaaaagaaagca

SEQ ID NO: 306512 - DNA, 4678 bp, Homo sapiens
  misc_feature (9)..(9): n is a, c, g, or t
  misc_feature (20)..(20): n is a, c, g, or t
  misc_feature (23)..(23): n is a, c, g, or t
  misc_feature (29)..(29): n is a, c, g, or t
  misc_feature (31)..(31): n is a, c, g, or t
  misc_feature (34)..(34): n is a, c, g, or t
  misc_feature (43)..(43): n is a, c, g, or t
  misc_feature (58)..(58): n is a, c, g, or t
  misc_feature (78)..(78): n is a, c, g, or t
  misc_feature (90)..(90): n is a, c, g, or t
ggtcatccngttcgacctcncanaagctncnggnagccccccntttgaccaagtccancctggtaagcccaacttgantcccggccaccnattgttgtggactgaatctcatttaccaagtgaagttatatcaagtgcagaacttccttctgtgctacccgattcagctggaaagggctctgagtacctgcttgaacagagctccctggcctgtaatgctgagtgtgtcatgcttcaaaatgtatctaaagaatcttttgaaaggactattaatatagcaaaaggcaattctagcctaggaatgacagttagtgctaataaagatggcttggggatgatcgttcgaagcattattcatggaggtgccattagtcgagatggccggattgccattggggactgcatcttgtccattaatgaagagtctaccatcagtgtaaccaatgcccaggcacgagctatgttgagaagacattctctcattggccctgacataaaaattacttatgtgcctgcagaacatttggaagagttcaaaataagcttgggacaacaatctggaagagtaatggcactggatattttttcttcatacactggcagagacattccagaattaccagagcgagaagagggagagggtgaagaaagcgaacttcaaaacacagcatatagcaattggaatcagcccaggcgggtggaactctggagagaaccaagcaaatccttaggcatcagcattgttggtggacgagggatggggagtcggctaagcaatggagaagtgatgaggggcattttcatcaaacatgttctggaagatagtccagctggcaaaaatggaaccttgaaacctggagatagaatcgtagaggtggatggaatggacctcagagatgcaagccatgaacaagctgtggaagccattcggaaagcaggcaaccctgtagtctttatggtacagagcattataaacagaccaaggaaatcccctttgccttccttgctgcacaacctttaccctaagtacaacttcagcagcactaacccatttgctgactctctacaaatcaacgccgacaaggcacccagtcagtcagagtcagagccagagaaggctccattgtgcagtgtgcccccaccccctccttcagcctttgccgaaatgggtagtgatcacacacagtcatctgcaagcaaaatctcacaagatgtggacaaagaggatgagtttggttacagctggaaaaatatcagagagcgttatggaaccctaacaggcgagctgcatatgattgaactggagaaaggtcatagtggtttgggcctaagtcttgctgggaacaaagaccgatccaggatgagtgtcttcatagtggggattgatccaaatggagctgcaggaaaagatggtcgattgcaaattgcagatgagcttctagagatcaatggtcagattttatatggaagaagtcatcagaatgcctcatcaatcattaaatgtgccccttctaaagtgaaaataatttttatcagaaataaagatgcagtgaatcagatggccgtatgtcctggaaatgcagtagaacctttgccttctaactcagaaaatcttcaaaataaggagacagagccaactgttactacttctgatgcagctgtggacctcagttcatttaaaaatgtgcaacatctggagcttcccaaggatcaggggggtttgggtattgctatcagcgaagaagatacactcagtggagtcatcataaagagcttaacagagcatggggtagcagccacggatggacgactcaaagtcggagatcagatactggctgtagatgatgaaattgttgttggttaccctattgaaaagtttattagccttctgaagacagcaaagatgacagtaaaacttaccatccatgctgagaatccagattcccaggctgttccttcagcagctggtgcagccagtggagaaaaaaagaacagctcccaatacaagcagatcatcaacaccagcaatttttgcttctgatcctgcaacctgccccattatccctggctgcgaaacaaccatcgagatttccaaagggcgaacagggctgggcctgagcatcgttgggggttcagacacgctgctgggtgccattattatccatgaagtttatgaagaaggagcagcatgtaaagatggaagactctgggctggagatcagatcttagaggtgaatggaattgacttgagaaaggccacacatgatgaagcaatcaatgtcctgagacagacgccacagagagtgcgcctgacactctacagagatgaggccccatacaaagaggaggaagtgtgtgacaccctcactattgagctgcagaagaagccgggaaaaggcctaggattaagtattgttggtaaaagaaacgatactggagtatttgtgtcagacattgtcaaaggaggaattgcagatgccgatggaagactgatgcagggagaccagatattaatggtgaatggggaagacgttcgtaatgccacccaagaagcggttgccgctttgctaaagtgttccctaggcacagtaaccttggaagttggaagaatcaaagctggtccattccattcagagaggaggccatctcaaagcagccaggtgagtgaaggcagcctgtcatctttcacttttccactctctggatccagtacatctgagtcactggaaagtagctcaaagaagaatgcattggcatctgaaatacagggattaagaacagtcgaaatgaaaaagggccctactgactcactgggaatcagcatcgctggaggagtaggcagcccacttggtgatgtgcctatatttattgcaatgatgcacccaactggagttgcagcacagacccaaaaactcagagttggggataggattgtcaccatctgtggcacatccactgagggcatgactcacacccaagcagttaacctactgaaaaatgcatctggctccattgaaatgcaggtggttgctggaggagacgtgagtgtggtcacaggtcatcagcaggagcctgcaagttccagtctttctttcactgggctgacgtcaagcagtatatttcaggatgatttaggacctcctcaatgtaagtctattacactagagcgaggaccagatggcttaggcttcagtatagttggaggatatggcagccctcatggagacttacccatttatgttaaaacagtgtttgcaaagggagcagcctctgaagacggacgtctgaaaaggggcgatcagatcattgctgtcaatgggcagagtctagaaggagtcacccatgaagaagctgttgccatccttaaacggacaaaaggcactgtcactttgatggttctctcttgaattggctgccagaattgaaccaacccaacccctagctcacctcctactgtaaagagaatgcactggtcctgacaatttttatgctgtgttcagccgggtcttcaaaactgtaggggggaaataacacttaagtttctttttctcatctagaaatgctttccttactgacaacctaacatcatttttcttttcttcttgcattttgtgaacttaaagagaaggaatatttgtgtaggtgaatctcgtttttatttgtggagatatctaatgttttgtagtcacatgggcaagaattattacatgctaagctggttagtataaagaaagataattctaaagctaaccaaagaaaatggcttcagtaaattaggatgaaaaatgaaaatataaaataaagaagaaaatctcggggagtttaaaaaaaatgcctcaatttggcaatctacctcctctccccaccccaaactaaaaaaagaaaaaaaggttttctaatgaaaatctttaaaaatactgtcagtattttaaaattttcaacagtattataaaaacattgcatctccccacctctaatatgcatatatatttttcctgctaaaattggtttctacaattgagtaaatggcaaatacatgaagcaatgtccctaaattttataaagaaattatatttaatgcacatttcaattttcattcttatttttgaccttttgtaaaatattttcatgttgctataagtaaatgatgatgccaccccatgttgactatggtttttctagaaagcaactatgctgctaaccatagaggaacatagaagggttccagaatctttagtgctggttttaacaaccgatgcaacattaaaaatgtgttagtgtgctgtgcaattggttttcaattcatattaatcttaatgacagagaacaatgtgttactaattattttggttgtatgccattagtaaattgatagaaaaattaaggggattaacataacttcatttcattgccttatattaacatcttataatacaatagtttaagactaagggaaacagatggagctgtttattgagacaactggtgaggaattatcatgtgttcattcccattttagagcgtgaaactcctacattagaatatataaagtcactttaaatatctatatttgtaacagaagtagtgtacagatattttattacagcatttttgtgtaaatgcagaattaaagtgaataaataagaattttcagtggtgcacaaataaaaagaaagca

SEQ ID NO: 306513 - DNA, 3597 bp, Homo sapiens
agtggcgtgcacagcgcgaaggaacagcctgggaagtctgggattctcagcaatggatggtaagtaagactgtcatcttgcgagtcttcagaaggctaagtaaactttcaatagggtaaccaacaacaatttcatcatctacagccagtatctgatctccgactttgagtcgtccatccgtggctgctaccccatgctctgttaagctctttatgatgactggagaaaggtcatagtggtttgggcctaagtcttgctgggaacaaagaccgatccaggatgagtgtcttcatagtggggattgatccaaatggagctgcaggaaaagatggtcgattgcaaattgcagatgagcttctagagatcaatggtcagattttatatggaagaagtcatcagaatgcctcatcaatcattaaatgtgccccttctaaagtgaaaataatttttatcagaaataaagatgcagtgaatcagatggccgtatgtcctggaaatgcagtagaacctttgccttctaactcagaaaatcttcaaaataaggagacagagccaactgttactacttctgatgcagctgtggacctcagttcatttaaaaatgtgcaacatctggagcttcccaaggatcaggggggtttgggtattgctatcagcgaagaagatacactcagtggagtcatcataaagagcttaacagagcatggggtagcagccacggatggacgactcaaagtcggagatcagatactggctgtagatgatgaaattgttgttggttaccctattgaaaagtttattagccttctgaagacagcaaagatgacagtaaaacttaccatccatgctgagaatccagattcccaggctgttccttcagcagctggtgcagccagtggagaaaaaaagaacagctcccaatacaagcagatcatcaacaccagcaatttttgcttctgatcctgcaacctgccccattatccctggctgcgaaacaaccatcgagatttccaaagggcgaacagggctgggcctgagcatcgttgggggttcagacacgctgctgggtgccattattatccatgaagtttatgaagaaggagcagcatgtaaagatggaagactctgggctggagatcagatcttagaggtgaatggaattgacttgagaaaggccacacatgatgaagcaatcaatgtcctgagacagacgccacagagagtgcgcctgacactctacagagatgaggccccatacaaagaggaggaagtgtgtgacaccctcactattgagctgcagaagaagccgggaaaaggcctaggattaagtattgttggtaaaagaaacgatactggagtatttgtgtcagacattgtcaaaggaggaattgcagatgccgatggaagactgatgcagggagaccagatattaatggtgaatggggaagacgttcgtaatgccacccaagaagcggttgccgctttgctaaagtgttccctaggcacagtaaccttggaagttggaagaatcaaagctggtccattccattcagagaggaggccatctcaaagcagccaggtgagtgaaggcagcctgtcatctttcacttttccactctctggatccagtacatctgagtcactggaaagtagctcaaagaagaatgcattggcatctgaaatacagggattaagaacagtcgaaatgaaaaagggccctactgactcactgggaatcagcatcgctggaggagtaggcagcccacttggtgatgtgcctatatttattgcaatgatgcacccaactggagttgcagcacagacccaaaaactcagagttggggataggattgtcaccatctgtggcacatccactgagggcatgactcacacccaagcagttaacctactgaaaaatgcatctggctccattgaaatgcaggtggttgctggaggagacgtgagtgtggtcacaggtcatcagcaggagcctgcaagttccagtctttctttcactgggctgacgtcaagcagtatatttcaggatgatttaggacctcctcaatgtaagtctattacactagagcgaggaccagatggcttaggcttcagtatagttggaggatatggcagccctcatggagacttacccatttatgttaaaacagtgtttgcaaagggagcagcctctgaagacggacgtctgaaaaggggcgatcagatcattgctgtcaatgggcagagtctagaaggagtcacccatgaagaagctgttgccatccttaaacggacaaaaggcactgtcactttgatggttctctcttgaattggctgccagaattgaaccaacccaacccctagctcacctcctactgtaaagagaatgcactggtcctgacaatttttatgctgtgttcagccgggtcttcaaaactgtaggggggaaataacacttaagtttctttttctcatctagaaatgctttccttactgacaacctaacatcatttttcttttcttcttgcattttgtgaacttaaagagaaggaatatttgtgtaggtgaatctcgtttttatttgtggagatatctaatgttttgtagtcacatgggcaagaattattacatgctaagctggttagtataaagaaagataattctaaagctaaccaaagaaaatggcttcagtaaattaggatgaaaaatgaaaatataaaataaagaagaaaatctcggggagtttaaaaaaaatgcctcaatttggcaatctacctcctctccccaccccaaactaaaaaaagaaaaaaaggttttctaatgaaaatctttaaaaatactgtcagtattttaaaattttcaacagtattataaaaacattgcatctccccacctctaatatgcatatatatttttcctgctaaaattggtttctacaattgagtaaatggcaaatacatgaagcaatgtccctaaattttataaagaaattatatttaatgcacatttcaattttcattcttatttttgaccttttgtaaaatattttcatgttgctataagtaaatgatgatgccaccccatgttgactatggtttttctagaaagcaactatgctgctaaccatagaggaacatagaagggttccagaatctttagtgctggttttaacaaccgatgcaacattaaaaatgtgttagtgtgctgtgcaattggttttcaattcatattaatcttaatgacagagaacaatgtgttactaattattttggttgtatgccattagtaaattgatagaaaaattaaggggattaacataacttcatttcattgccttatattaacatcttataatacaatagtttaagactaagggaaacagatggagctgtttattgagacaactggtgaggaattatcatgtgttcattcccattttagagcgtgaaactcctacattagaatatataaagtcactttaaatatctatatttgtaacagaagtagtgtacagatattttattacagcatttttgtgtaaatgcagaattaaagtgaataaataagaattttcagtggtgcacaaataaaaagaaagca

SEQ ID NO: 306514 - DNA, 7446 bp, Homo sapiens
tgctgctgttaatcatttcagagaagaacactgaactttgaaaaaaatgttggaagccattgacaaaaatcgggccctgcatgcagcagagcgcttgcaaaccaagctgcgagaacgtggggatgtagcaaatgaagacaaactgagccttctgaagtcagtcctgcagagccctctcttcagtcagattctgagccttcagacttctgtacagcagctgaaagaccaggtaaatattgcaacttcagcaacttcaaatattgaatatgcccacgttcctcatctcagcccagctgtgattcctactctgcaaaatgaatcgtttttattatccccaaacaatgggaatctggaagcacttacaggacctggtattccacacattaatgggaaacctgcttgtgatgaatttgatcagcttatcaaaaatatggcccagggtcgccatgtagaagtttttgagctcctcaaacctccatctggaggccttgggtttagtgttgtgggactaagaagtgaaaacagaggagagctgggaatatttgttcaagagatacaagagggcagtgtggcccatagagatggaagattgaaagaaactgatcaaattcttgctatcaatggacaggctcttgatcagacaattacacatcagcaggctatcagcatcctgcagaaagccaaagatactgtccagctagttattgccagaggctcattgcctcagcttgtcagccccatagtttcccgttctccatctgcagccagcacaatttcagctcactctaatccggttcactggcaacacatggaaacgattgaattggtgaatgatggatctggtttgggatttggcatcataggaggaaaagcaactggtgtgatagtaaaaaccattctgcctggaggagtagctgatcagcatgggcgtttatgcagtggagaccacattctaaagattggtgacacagatctagcaggaatgagcagtgagcaagtagcacaagtccttaggcaatgtggaaatagagttaagttgatgattgcaagaggtgccatagaagaacgtacagcacccactgctttgggcatcaccctctcctcatccccaacttcaacaccagagttgcgggttgatgcttctactcagaaaggtgaagaaagtgagacatttgatgtagaactcactaaaaatgtccaaggattaggaattaccattgctggctacattggagataaaaaattggaaccttcaggaatctttgtaaagagcattacaaaaagcagtgccgttgagcatgatggaagaatccaaattggagaccaaattatagcagtagatggcacaaaccttcagggttttactaatcagcaagcagtagaggtattgcgacatacaggacaaactgtgctcctgacactaatgaggagaggaatgaagcaggaagccgagctcatgtcaagggaagacgtcacaaaagatgcagatttgtctcctgttaatgccagcataatcaaagaaaattatgaaaaagatgaagattttttatcttcgacgagaaacaccaacatattaccaactgaagaagaagggtatccattactgtcagctgagatagaagaaatagaagatgcacaaaaacaagaagctgctctgctgacaaaatggcaaaggattatgggaattaactatgaaatagtggtggcccatgtgagcaagtttagtgagaacagtggattggggataagcctggaagcgacagtgggacatcattttatccgatctgttctaccagagggtcctgttggacacagcgggaagctcttcagtggagacgagctattggaagtaaatggcataactttacttggggaaaatcaccaagatgtggtgaatatcttaaaagaactgcctatagaagtgacaatggtgtgctgtcgtcgaactgtgccacccaccacccaatcagaattggatagcctggacttatgtgatattgagctaacagaaaagcctcacgtagatctaggtgagttcatcgggtcatcagagacagaggatccagtgctggcgatgactgatgcgggtcagagtacagaagaggttcaagcacctttggccatgtgggaggctggcattcagcacatagagctggagaaagggagcaaaggacttggttttagcattttagattatcaggatccaattgatccagcaagcactgtgattataattcgttctttggtgcctggcggcattgctgaaaaggatggacgacttcttcctggtgaccgactcatgtttgtaaacgatgttaacttggaaaacagcagtcttgaggaagctgtagaagcactgaagggagcaccgtcagggactgtgagaataggagttgctaagcctttacccctttcaccagaagaaggttatgtttctgctaaggaggattcctttctctacccaccacactcctgtgaggaagcagggctggctgacaaacccctcttcagggctgacttggctctggtgggcacaaatgatgctgacttagtagatgaatccacatttgagtctccatactctcctgaaaatgacagcatctactctactcaagcctctattttatctcttcatggcagttcttgtggtgatggcctgaactatggttcttcccttccatcatctcctcctaaggatgttattgaaaattcttgtgatccagtacttgatctgcatatgtctctggaggaactatatacccagaatctcctgcaaagacaggatgagaatacaccttcggtggacataagtatggggcctgcttctggctttactataaatgactacacacctgcaaatgctattgaacaacaatatgaatgtgaaaacacaatagtgtggactgaatctcatttaccaagtgaagttatatcaagtgcagaacttccttctgtgctacccgattcagctggaaagggctctgagtacctgcttgaacagagctccctggcctgtaatgctgagtgtgtcatgcttcaaaatgtatctaaagaatcttttgaaaggactattaatatagcaaaaggcaattctagcctaggaatgacagttagtgctaataaagatggcttggggatgatcgttcgaagcattattcatggaggtgccattagtcgagatggccggattgccattggggactgcatcttgtccattaatgaagagtctaccatcagtgtaaccaatgcccaggcacgagctatgttgagaagacattctctcattggccctgacataaaaattacttatgtgcctgcagaacatttggaagagttcaaaataagcttgggacaacaatctggaagagtaatggcactggatattttttcttcatacactggcagagacattccagaattaccagagcgagaagagggagagggtgaagaaagcgaacttcaaaacacagcatatagcaattggaatcagcccaggcgggtggaactctggagagaaccaagcaaatccttaggcatcagcattgttggtggacgagggatggggagtcggctaagcaatggagaagtgatgaggggcattttcatcaaacatgttctggaagatagtccagctggcaaaaatggaaccttgaaacctggagatagaatcgtagaggtggatggaatggacctcagagatgcaagccatgaacaagctgtggaagccattcggaaagcaggcaaccctgtagtctttatggtacagagcattataaacagaccaaggaaatcccctttgccttccttgctgcacaacctttaccctaagtacaacttcagcagcactaacccatttgctgactctctacaaatcaacgccgacaaggcacccagtcagtcagagtcagagccagagaaggctccattgtgcagtgtgcccccaccccctccttcagcctttgccgaaatgggtagtgatcacacacagtcatctgcaagcaaaatctcacaagatgtggacaaagaggatgagtttggttacagctggaaaaatatcagagagcgttatggaaccctaacaggcgagctgcatatgattgaactggagaaaggtcatagtggtttgggcctaagtcttgctgggaacaaagaccgatccaggatgagtgtcttcatagtggggattgatccaaatggagctgcaggaaaagatggtcgattgcaaattgcagatgagcttctagagatcaatggtcagattttatatggaagaagtcatcagaatgcctcatcaatcattaaatgtgccccttctaaagtgaaaataatttttatcagaaataaagatgcagtgaatcagatggccgtatgtcctggaaatgcagtagaacctttgccttctaactcagaaaatcttcaaaataaggagacagagccaactgttactacttctgatgcagctgtggacctcagttcatttaaaaatgtgcaacatctggagcttcccaaggatcaggggggtttgggtattgctatcagcgaagaagatacactcagtggagtcatcataaagagcttaacagagcatggggtagcagccacggatggacgactcaaagtcggagatcagatactggctgtagatgatgaaattgttgttggttaccctattgaaaagtttattagccttctgaagacagcaaagatgacagtaaaacttaccatccatgctgagaatccagattcccaggctgttccttcagcagctggtgcagccagtggagaaaaaaagaacagctcccagtctctgatggtcccacagtctggctccccagaaccggagtccatccgaaatacaagcagatcatcaacaccagcaatttttgcttctgatcctgcaacctgccccattatccctggctgcgaaacaaccatcgagatttccaaagggcgaacagggctgggcctgagcatcgttgggggttcagacacgctgctggtgaatggaattgacttgagaaaggccacacatgatgaagcaatcaatgtcctgagacagacgccacagagagtgcgcctgacactctacagagatgaggccccatacaaagaggaggaagtgtgtgacaccctcactattgagctgcagaagaagccgggaaaaggcctaggattaagtattgttggtaaaagaaacgatactggagtatttgtgtcagacattgtcaaaggaggaattgcagatgccgatggaagactgatgcagggagaccagatattaatggtgaatggggaagacgttcgtaatgccacccaagaagcggttgccgctttgctaaagtgttccctaggcacagtaaccttggaagttggaagaatcaaagctggtccattccattcagagaggaggccatctcaaagcagccaggtgagtgaaggcagcctgtcatctttcacttttccactctctggatccagtacatctgagtcactggaaagtagctcaaagaagaatgcattggcatctgaaatacagggattaagaacagtcgaaatgaaaaagggccctactgactcactgggaatcagcatcgctggaggagtaggcagcccacttggtgatgtgcctatatttattgcaatgatgcacccaactggagttgcagcacagacccaaaaactcagagttggggataggattgtcaccatctgtggcacatccactgagggcatgactcacacccaagcagttaacctactgaaaaatgcatctggctccattgaaatgcaggtggttgctggaggagacgtgagtgtggtcacaggtcatcagcaggagcctgcaagttccagtctttctttcactgggctgacgtcaagcagtatatttcaggatgatttaggacctcctcaatgtaagtctattacactagagcgaggaccagatggcttaggcttcagtatagttggaggatatggcagccctcatggagacttacccatttatgttaaaacagtgtttgcaaagggagcagcctctgaagacggacgtctgaaaaggggcgatcagatcattgctgtcaatgggcagagtctagaaggagtcacccatgaagaagctgttgccatccttaaacggacaaaaggcactgtcactttgatggttctctcttgaattggctgccagaattgaaccaacccaacccctagctcacctcctactgtaaagagaatgcactggtcctgacaatttttatgctgtgttcagccgggtcttcaaaactgtaggggggaaataacacttaagtttctttttctcatctagaaatgctttccttactgacaacctaacatcatttttcttttcttcttgcattttgtgaacttaaagagaaggaatatttgtgtaggtgaatctcgtttttatttgtggagatatctaatgttttgtagtcacatgggcaagaattattacatgctaagctggttagtataaagaaagataattctaaagctaaccaaagaaaatggcttcagtaaattaggatgaaaaatgaaaatataaaataaagaagaaaatctcggggagtttaaaaaaaatgcctcaatttggcaatctacctcctctccccaccccaaactaaaaaaagaaaaaaaggttttctaatgaaaatctttaaaaatactgtcagtattttaaaattttcaacagtattataaaaacattgcatctccccacctctaatatgcatatatatttttcctgctaaaattggtttctacaattgagtaaatggcaaatacatgaagcaatgtccctaaattttataaagaaattatatttaatgcacatttcaattttcattcttatttttgaccttttgtaaaatattttcatgttgctataagtaaatgatgatgccaccccatgttgactatggtttttctagaaagcaactatgctgctaaccatagaggaacatagaagggttccagaatctttagtgctggttttaacaaccgatgcaacattaaaaatgtgttagtgtgctgtgcaattggttttcaattcatattaatcttaatgacagagaacaatgtgttactaattattttggttgtatgccattagtaaattgatagaaaaattaaggggattaacataacttcatttcattgccttatattaacatcttataatacaatagtttaagactaagggaaacagatggagctgtttattgagacaactggtgaggaattatcatgtgttcattcccattttagagcgtgaaactcctacattagaatatataaagtcactttaaatatctatatttgtaacagaagtagtgtacagatattttattacagcatttttgtgtaaatgcagaattaaagtgaataaataagaattttcagtggtgcacaaataaaaagaaagca

SEQ ID NO: 306515 - DNA, 7430 bp, Homo sapiens
tgctgctgttaatcatttcagagaagaacactgaactttgaaaaaaatgttggaagccattgacaaaaatcgggccctgcatgcagcagagcgcttgcaaaccaagctgcgagaacgtggggatgtagcaaatgaagacaaactgagccttctgaagtcagtcctgcagagccctctcttcagtcagattctgagccttcagacttctgtacagcagctgaaagaccaggtaaatattgcaacttcagcaacttcaaatattgaatatgcccacgttcctcatctcagcccagctgtgattcctactctgcaaaatgaatcgtttttattatccccaaacaatgggaatctggaagcacttacaggacctggtattccacacattaatgggaaacctgcttgtgatgaatttgatcagcttatcaaaaatatggcccagggtcgccatgtagaagtttttgagctcctcaaacctccatctggaggccttgggtttagtgttgtgggactaagaagtgaaaacagaggagagctgggaatatttgttcaagagatacaagagggcagtgtggcccatagagatggaagattgaaagaaactgatcaaattcttgctatcaatggacaggctcttgatcagacaattacacatcagcaggctatcagcatcctgcagaaagccaaagatactgtccagctagttattgccagaggctcattgcctcagcttgtcagccccatagtttcccgttctccatctgcagccagcacaatttcagctcactctaatccggttcactggcaacacatggaaacgattgaattggtgaatgatggatctggtttgggatttggcatcataggaggaaaagcaactggtgtgatagtaaaaaccattctgcctggaggagtagctgatcagcatgggcgtttatgcagtggagaccacattctaaagattggtgacacagatctagcaggaatgagcagtgagcaagtagcacaagtccttaggcaatgtggaaatagagttaagttgatgattgcaagaggtgccatagaagaacgtacagcacccactgctttgggcatcaccctctcctcatccccaacttcaacaccagagttgcgggttgatgcttctactcagaaaggtgaagaaagtgagacatttgatgtagaactcactaaaaatgtccaaggattaggaattaccattgctggctacattggagataaaaaattggaaccttcaggaatctttgtaaagagcattacaaaaagcagtgccgttgagcatgatggaagaatccaaattggagaccaaattatagcagtagatggcacaaaccttcagggttttactaatcagcaagcagtagaggtattgcgacatacaggacaaactgtgctcctgacactaatgaggagaggaatgaagcaggaagccgagctcatgtcaagggaagacgtcacaaaagatgcagatttgtctcctgttaatgccagcataatcaaagaaaattatgaaaaagatgaagattttttatcttcgacgagaaacaccaacatattaccaactgaagaagaagggtatccattactgtcagctgagatagaagaaatagaagatgcacaaaaacaagaagctgctctgctgacaaaatggcaaaggattatgggaattaactatgaaatagtggtggcccatgtgagcaagtttagtgagaacagtggattggggataagcctggaagcgacagtgggacatcattttatccgatctgttctaccagagggtcctgttggacacagcgggaagctcttcagtggagacgagctattggaagtaaatggcataactttacttggggaaaatcaccaagatgtggtgaatatcttaaaagaactgcctatagaagtgacaatggtgtgctgtcgtcgaactgtgccacccaccacccaatcagaattggatagcctggacttatgtgatattgagctaacagaaaagcctcacgtagatctaggtgagttcatcgggtcatcagagacagaggatccagtgctggcgatgactgatgcgggtcagagtacagaagaggttcaagcacctttggccatgtgggaggctggcattcagcacatagagctggagaaagggagcaaaggacttggttttagcattttagattatcaggatccaattgatccagcaagcactgtgattataattcgttctttggtgcctggcggcattgctgaaaaggatggacgacttcttcctggtgaccgactcatgtttgtaaacgatgttaacttggaaaacagcagtcttgaggaagctgtagaagcactgaagggagcaccgtcagggactgtgagaataggagttgctaagcctttacccctttcaccagaagaaggttatgtttctgctaaggaggattcctttctctacccaccacactcctgtgaggaagcagggctggctgacaaacccctcttcagggctgacttggctctggtgggcacaaatgatgctgacttagtagatgaatccacatttgagtctccatactctcctgaaaatgacagcatctactctactcaagcctctattttatctcttcatggcagttcttgtggtgatggcctgaactatggttcttcccttccatcatctcctcctaaggatgttattgaaaattcttgtgatccagtacttgatctgcatatgtctctggaggaactatatacccagaatctcctgcaaagacaggatgagaatacaccttcggtggacataagtatggggcctgcttctggctttactataaatgactacacacctgcaaatgctattgaacaacaatatgaatgtgaaaacacaatagtgtggactgaatctcatttaccaagtgaagttatatcaagtgcagaacttccttctgtgctacccgattcagctggaaagggctctgagtacctgcttgaacagagctccctggcctgtaatgctgagtgtgtcatgcttcaaaatgtatctaaagaatcttttgaaaggactattaatatagcaaaaggcaattctagcctaggaatgacagttagtgctaataaagatggcttggggatgatcgttcgaagcattattcatggaggtgccattagtcgagatggccggattgccattggggactgcatcttgtccattaatgaagagtctaccatcagtgtaaccaatgcccaggcacgagctatgttgagaagacattctctcattggccctgacataaaaattacttatgtgcctgcagaacatttggaagagttcaaaataagcttgggacaacaatctggaagagtaatggcactggatattttttcttcatacactggcagagacattccagaattaccagagcgagaagagggagagggtgaagaaagcgaacttcaaaacacagcatatagcaattggaatcagcccaggcgggtggaactctggagagaaccaagcaaatccttaggcatcagcattgttggtggacgagggatggggagtcggctaagcaatggagaagtgatgaggggcattttcatcaaacatgttctggaagatagtccagctggcaaaaatggaaccttgaaacctggagatagaatcgtagaggtggatggaatggacctcagagatgcaagccatgaacaagctgtggaagccattcggaaagcaggcaaccctgtagtctttatggtacagagcattataaacagaccaaggaaatcccctttgccttccttgctgcacaacctttaccctaagtacaacttcagcagcactaacccatttgctgactctctacaaatcaacgccgacaaggcacccagtcagtcagagtcagagccagagaaggctccattgtgcagtgtgcccccaccccctccttcagcctttgccgaaatgggtagtgatcacacacagtcatctgcaagcaaaatctcacaagatgtggacaaagaggatgagtttggttacagctggaaaaatatcagagagcgttatggaaccctaacaggcgagctgcatatgattgaactggagaaaggtcatagtggtttgggcctaagtcttgctgggaacaaagaccgatccaggatgagtgtcttcatagtggggattgatccaaatggagctgcaggaaaagatggtcgattgcaaattgcagatgagcttctagagatcaatggtcagattttatatggaagaagtcatcagaatgcctcatcaatcattaaatgtgccccttctaaagtgaaaataatttttatcagaaataaagatgcagtgaatcagatggccgtatgtcctggaaatgcagtagaacctttgccttctaactcagaaaatcttcaaaataaggagacagagccaactgttactacttctgatgcagctgtggacctcagttcatttaaaaatgtgcaacatctggagcttcccaaggatcaggggggtttgggtattgctatcagcgaagaagatacactcagtggagtcatcataaagagcttaacagagcatggggtagcagccacggatggacgactcaaagtcggagatcagatactggctgtagatgatgaaattgttgttggttaccctattgaaaagtttattagccttctgaagacagcaaagatgacagtaaaacttaccatccatgctgagaatccagattcccaggctgttccttcagcagctggtgcagccagtggagaaaaaaagaacagctcccaatacaagcagatcatcaacaccagcaatttttgcttctgatcctgcaacctgccccattatccctggctgcgaaacaaccatcgagatttccaaagggcgaacagggctgggcctgagcatcgttgggggttcagacacgctgctgggtgccattattatccatgaagtttatgaagaaggagcagcatgtaaagatggaagactctgggctggagatcagatcttagaggtgaatggaattgacttgagaaaggccacacatgatgaagcaatcaatgtcctgagacagacgccacagagagtgcgcctgacactctacagagatgaggccccatacaaagaggaggaagtgtgtgacaccctcactattgagctgcagaagaagccgggaaaaggcctaggattaagtattgttggtaaaagatgccgatggaagactgatgcagggagaccagatattaatggtgaatggggaagacgttcgtaatgccacccaagaagcggttgccgctttgctaaagtgttccctaggcacagtaaccttggaagttggaagaatcaaagctggtccattccattcagagaggaggccatctcaaagcagccaggtgagtgaaggcagcctgtcatctttcacttttccactctctggatccagtacatctgagtcactggaaagtagctcaaagaagaatgcattggcatctgaaatacagggattaagaacagtcgaaatgaaaaagggccctactgactcactgggaatcagcatcgctggaggagtaggcagcccacttggtgatgtgcctatatttattgcaatgatgcacccaactggagttgcagcacagacccaaaaactcagagttggggataggattgtcaccatctgtggcacatccactgagggcatgactcacacccaagcagttaacctactgaaaaatgcatctggctccattgaaatgcaggtggttgctggaggagacgtgagtgtggtcacaggtcatcagcaggagcctgcaagttccagtctttctttcactgggctgacgtcaagcagtatatttcaggatgatttaggacctcctcaatgtaagtctattacactagagcgaggaccagatggcttaggcttcagtatagttggaggatatggcagccctcatggagacttacccatttatgttaaaacagtgtttgcaaagggagcagcctctgaagacggacgtctgaaaaggggcgatcagatcattgctgtcaatgggcagagtctagaaggagtcacccatgaagaagctgttgccatccttaaacggacaaaaggcactgtcactttgatggttctctcttgaattggctgccagaattgaaccaacccaacccctagctcacctcctactgtaaagagaatgcactggtcctgacaatttttatgctgtgttcagccgggtcttcaaaactgtaggggggaaataacacttaagtttctttttctcatctagaaatgctttccttactgacaacctaacatcatttttcttttcttcttgcattttgtgaacttaaagagaaggaatatttgtgtaggtgaatctcgtttttatttgtggagatatctaatgttttgtagtcacatgggcaagaattattacatgctaagctggttagtataaagaaagataattctaaagctaaccaaagaaaatggcttcagtaaattaggatgaaaaatgaaaatataaaataaagaagaaaatctcggggagtttaaaaaaaatgcctcaatttggcaatctacctcctctccccaccccaaactaaaaaaagaaaaaaaggttttctaatgaaaatctttaaaaatactgtcagtattttaaaattttcaacagtattataaaaacattgcatctccccacctctaatatgcatatatatttttcctgctaaaattggtttctacaattgagtaaatggcaaatacatgaagcaatgtccctaaattttataaagaaattatatttaatgcacatttcaattttcattcttatttttgaccttttgtaaaatattttcatgttgctataagtaaatgatgatgccaccccatgttgactatggtttttctagaaagcaactatgctgctaaccatagaggaacatagaagggttccagaatctttagtgctggttttaacaaccgatgcaacattaaaaatgtgttagtgtgctgtgcaattggttttcaattcatattaatcttaatgacagagaacaatgtgttactaattattttggttgtatgccattagtaaattgatagaaaaattaaggggattaacataacttcatttcattgccttatattaacatcttataatacaatagtttaagactaagggaaacagatggagctgtttattgagacaactggtgaggaattatcatgtgttcattcccattttagagcgtgaaactcctacattagaatatataaagtcactttaaatatctatatttgtaacagaagtagtgtacagatattttattacagcatttttgtgtaaatgcagaattaaagtgaataaataagaattttcagtggtgcacaaataaaaagaaagca

SEQ ID NO: 306516 - DNA, 2913 bp, Homo sapiens
attaaataggtaatttttggcccactaccctaaattaacaatggtgatttaatcacatttgttttatttttaaatataagataattaaaagattgaggtaaatacaaagtctcttttcccacagtcatgggcccatttctctgccccatccctcagagtcaatctgtgtgatgagtttgatggatatgccttagtaaccaatttttatttgtatttcatttttaacttatttttagatacaagcagatcatcaacaccagcaatttttgcttctgatcctgcaacctgccccattatccctggctgcgaaacaaccatcgagatttccaaagggcgaacagggctgggcctgagcatcgttgggggttcagacacgctgctgggtgccattattatccatgaagtttatgaagaaggagcagcatgtaaagatggaagactctgggctggagatcagatcttagaggtgaatggaattgacttgagaaaggccacacatgatgaagcaatcaatgtcctgagacagacgccacagagagtgcgcctgacactctacagagatgaggccccatacaaagaggaggaagtgtgtgacaccctcactattgagctgcagaagaagccgggaaaaggcctaggattaagtattgttggtaaaagaaacgatactggagtatttgtgtcagacattgtcaaaggaggaattgcagatgccgatggaagactgatgcagggagaccagatattaatggtgaatggggaagacgttcgtaatgccacccaagaagcggttgccgctttgctaaagtgttccctaggcacagtaaccttggaagttggaagaatcaaagctggtccattccattcagagaggaggccatctcaaagcagccaggtgagtgaaggcagcctgtcatctttcacttttccactctctggatccagtacatctgagtcactggaaagtagctcaaagaagaatgcattggcatctgaaatacagggattaagaacagtcgaaatgaaaaagggccctactgactcactgggaatcagcatcgctggaggagtaggcagcccacttggtgatgtgcctatatttattgcaatgatgcacccaactggagttgcagcacagacccaaaaactcagagttggggataggattgtcaccatctgtggcacatccactgagggcatgactcacacccaagcagttaacctactgaaaaatgcatctggctccattgaaatgcaggtggttgctggaggagacgtgagtgtggtcacaggtcatcagcaggagcctgcaagttccagtctttctttcactgggctgacgtcaagcagtatatttcaggatgatttaggacctcctcaatgtaagtctattacactagagcgaggaccagatggcttaggcttcagtatagttggaggatatggcagccctcatggagacttacccatttatgttaaaacagtgtttgcaaagggagcagcctctgaagacggacgtctgaaaaggggcgatcagatcattgctgtcaatgggcagagtctagaaggagtcacccatgaagaagctgttgccatccttaaacggacaaaaggcactgtcactttgatggttctctcttgaattggctgccagaattgaaccaacccaacccctagctcacctcctactgtaaagagaatgcactggtcctgacaatttttatgctgtgttcagccgggtcttcaaaactgtaggggggaaataacacttaagtttctttttctcatctagaaatgctttccttactgacaacctaacatcatttttcttttcttcttgcattttgtgaacttaaagagaaggaatatttgtgtaggtgaatctcgtttttatttgtggagatatctaatgttttgtagtcacatgggcaagaattattacatgctaagctggttagtataaagaaagataattctaaagctaaccaaagaaaatggcttcagtaaattaggatgaaaaatgaaaatataaaataaagaagaaaatctcggggagtttaaaaaaaatgcctcaatttggcaatctacctcctctccccaccccaaactaaaaaaagaaaaaaaggttttctaatgaaaatctttaaaaatactgtcagtattttaaaattttcaacagtattataaaaacattgcatctccccacctctaatatgcatatatatttttcctgctaaaattggtttctacaattgagtaaatggcaaatacatgaagcaatgtccctaaattttataaagaaattatatttaatgcacatttcaattttcattcttatttttgaccttttgtaaaatattttcatgttgctataagtaaatgatgatgccaccccatgttgactatggtttttctagaaagcaactatgctgctaaccatagaggaacatagaagggttccagaatctttagtgctggttttaacaaccgatgcaacattaaaaatgtgttagtgtgctgtgcaattggttttcaattcatattaatcttaatgacagagaacaatgtgttactaattattttggttgtatgccattagtaaattgatagaaaaattaaggggattaacataacttcatttcattgccttatattaacatcttataatacaatagtttaagactaagggaaacagatggagctgtttattgagacaactggtgaggaattatcatgtgttcattcccattttagagcgtgaaactcctacattagaatatataaagtcactttaaatatctatatttgtaacagaagtagtgtacagatattttattacagcatttttgtgtaaatgcagaattaaagtgaataaataagaattttcagtggtgcacaaataaaaagaaagca

SEQ ID NO: 306517 - DNA, 7386 bp, Homo sapiens
tgctgctgttaatcatttcagagaagaacactgaactttgaaaaaaatgttggaagccattgacaaaaatcgggccctgcatgcagcagagcgcttgcaaaccaagctgcgagaacgtggggatgtagcaaatgaagacaaactgagccttctgaagtcagtcctgcagagccctctcttcagtcagattctgagccttcagacttctgtacagcagctgaaagaccaggtaaatattgcaacttcagcaacttcaaatattgaatatgcccacgttcctcatctcagcccagctgtgattcctactctgcaaaatgaatcgtttttattatccccaaacaatgggaatctggaagcacttacaggacctggtattccacacattaatgggaaacctgcttgtgatgaatttgatcagcttatcaaaaatatggcccagggtcgccatgtagaagtttttgagctcctcaaacctccatctggaggccttgggtttagtgttgtgggactaagaagtgaaaacagaggagagctgggaatatttgttcaagagatacaagagggcagtgtggcccatagagatggaagattgaaagaaactgatcaaattcttgctatcaatggacaggctcttgatcagacaattacacatcagcaggctatcagcatcctgcagaaagccaaagatactgtccagctagttattgccagaggctcattgcctcagcttgtcagccccatagtttcccgttctccatctgcagccagcacaatttcagctcactctaatccggttcactggcaacacatggaaacgattgaattggtgaatgatggatctggtttgggatttggcatcataggaggaaaagcaactggtgtgatagtaaaaaccattctgcctggaggagtagctgatcagcatgggcgtttatgcagtggagaccacattctaaagattggtgacacagatctagcaggaatgagcagtgagcaagtagcacaagtccttaggcaatgtggaaatagagttaagttgatgattgcaagaggtgccatagaagaacgtacagcacccactgctttgggcatcaccctctcctcatccccaacttcaacaccagagttgcgggttgatgcttctactcagaaaggtgaagaaagtgagacatttgatgtagaactcactaaaaatgtccaaggattaggaattaccattgctggctacattggagataaaaaattggaaccttcaggaatctttgtaaagagcattacaaaaagcagtgccgttgagcatgatggaagaatccaaattggagaccaaattatagcagtagatggcacaaaccttcagggttttactaatcagcaagcagtagaggtattgcgacatacaggacaaactgtgctcctgacactaatgaggagaggaatgaagcaggaagccgagctcatgtcaagggaagacgtcacaaaagatgcagatttgtctcctgttaatgccagcataatcaaagaaaattatgaaaaagatgaagattttttatcttcgacgagaaacaccaacatattaccaactgaagaagaagggtatccattactgtcagctgagatagaagaaatagaagatgcacaaaaacaagaagctgctctgctgacaaaatggcaaaggattatgggaattaactatgaaatagtggtggcccatgtgagcaagtttagtgagaacagtggattggggataagcctggaagcgacagtgggacatcattttatccgatctgttctaccagagggtcctgttggacacagcgggaagctcttcagtggagacgagctattggaagtaaatggcataactttacttggggaaaatcaccaagatgtggtgaatatcttaaaagaactgcctatagaagtgacaatggtgtgctgtcgtcgaactgtgccacccaccacccaatcagaattggatagcctggacttatgtgatattgagctaacagaaaagcctcacgtagatctaggtgagttcatcgggtcatcagagacagaggatccagtgctggcgatgactgatgcgggtcagagtacagaagaggttcaagcacctttggccatgtgggaggctggcattcagcacatagagctggagaaagggagcaaaggacttggttttagcattttagattatcaggatccaattgatccagcaagcactgtgattataattcgttctttggtgcctggcggcattgctgaaaaggatggacgacttcttcctggtgaccgactcatgtttgtaaacgatgttaacttggaaaacagcagtcttgaggaagctgtagaagcactgaagggagcaccgtcagggactgtgagaataggagttgctaagcctttacccctttcaccagaagaaggttatgtttctgctaaggaggattcctttctctacccaccacactcctgtgaggaagcagggctggctgacaaacccctcttcagggctgacttggctctggtgggcacaaatgatgctgacttagtagatgaatccacatttgagtctccatactctcctgaaaatgacagcatctactctactcaagcctctattttatctcttcatggcagttcttgtggtgatggcctgaactatggttcttcccttccatcatctcctcctaaggatgttattgaaaattcttgtgatccagtacttgatctgcatatgtctctggaggaactatatacccagaatctcctgcaaagacaggatgagaatacaccttcggtggacataagtatggggcctgcttctggctttactataaatgactacacacctgcaaatgctattgaacaacaatatgaatgtgaaaacacaatagtgtggactgaatctcatttaccaagtgaagttatatcaagtgcagaacttccttctgtgctacccgattcagctggaaagggctctgagtacctgcttgaacagagctccctggcctgtaatgctgagtgtgtcatgcttcaaaatgtatctaaagaatcttttgaaaggactattaatatagcaaaaggcaattctagcctaggaatgacagttagtgctaataaagatggcttggggatgatcgttcgaagcattattcatggaggtgccattagtcgagatggccggattgccattggggactgcatcttgtccattaatgaagagtctaccatcagtgtaaccaatgcccaggcacgagctatgttgagaagacattctctcattggccctgacataaaaattacttatgtgcctgcagaacatttggaagagttcaaaataagcttgggacaacaatctggaagagtaatggcactggatattttttcttcatacactggcagagacattccagaattaccagagcgagaagagggagagggtgaagaaagcgaacttcaaaacacagcatatagcaattggaatcagcccaggcgggtggaactctggagagaaccaagcaaatccttaggcatcagcattgttggtggacgagggatggggagtcggctaagcaatggagaagtgatgaggggcattttcatcaaacatgttctggaagatagtccagctggcaaaaatggaaccttgaaacctggagatagaatcgtagaggtggatggaatggacctcagagatgcaagccatgaacaagctgtggaagccattcggaaagcaggcaaccctgtagtctttatggtacagagcattataaacagaccaaggaaatcccctttgccttccttgctgcacaacctttaccctaagtacaacttcagcagcactaacccatttgctgactctctacaaatcaacgccgacaaggcacccagtcagtcagagtcagagccagagaaggctccattgtgcagtgtgcccccaccccctccttcagcctttgccgaaatgggtagtgatcacacacagtcatctgcaagcaaaatctcacaagatgtggacaaagaggatgagtttggttacagctggaaaaatatcagagagcgttatggaaccctaacaggcgagctgcatatgattgaactggagaaaggtcatagtggtttgggcctaagtcttgctgggaacaaagaccgatccaggatgagtgtcttcatagtggggattgatccaaatggagctgcaggaaaagatggtcgattgcaaattgcagatgagcttctagagatcaatggtcagattttatatggaagaagtcatcagaatgcctcatcaatcattaaatgtgccccttctaaagtgaaaataatttttatcagaaataaagatgcagtgaatcagatggccgtatgtcctggaaatgcagtagaacctttgccttctaactcagaaaatcttcaaaataaggagacagagccaactgttactacttctgatgcagctgtggacctcagttcatttaaaaatgtgcaacatctggagcttcccaaggatcaggggggtttgggtattgctatcagcgaagaagatacactcagtggagtcatcataaagagcttaacagagcatggggtagcagccacggatggacgactcaaagtcggagatcagatactggctgtagatgatgaaattgttgttggttaccctattgaaaagtttattagccttctgaagacagcaaagatgacagtaaaacttaccatccatgctgagaatccagattcccaggctgttccttcagcagctggtgcagccagtggagaaaaaaagaacagctcccagtctctgatggtcccacagtctggctccccagaaccggagtccatccgaaatacaagcagatcatcaacaccagcaatttttgcttctgatcctgcaacctgccccattatccctggctgcgaaacaaccatcgagatttccaaagggcgaacagggctgggcctgagcatcgttgggggttcagacacgctgctgacgccacagagagtgcgcctgacactctacagagatgaggccccatacaaagaggaggaagtgtgtgacaccctcactattgagctgcagaagaagccgggaaaaggcctaggattaagtattgttggtaaaagaaacgatactggagtatttgtgtcagacattgtcaaaggaggaattgcagatgccgatggaagactgatgcagggagaccagatattaatggtgaatggggaagacgttcgtaatgccacccaagaagcggttgccgctttgctaaagtgttccctaggcacagtaaccttggaagttggaagaatcaaagctggtccattccattcagagaggaggccatctcaaagcagccaggtgagtgaaggcagcctgtcatctttcacttttccactctctggatccagtacatctgagtcactggaaagtagctcaaagaagaatgcattggcatctgaaatacagggattaagaacagtcgaaatgaaaaagggccctactgactcactgggaatcagcatcgctggaggagtaggcagcccacttggtgatgtgcctatatttattgcaatgatgcacccaactggagttgcagcacagacccaaaaactcagagttggggataggattgtcaccatctgtggcacatccactgagggcatgactcacacccaagcagttaacctactgaaaaatgcatctggctccattgaaatgcaggtggttgctggaggagacgtgagtgtggtcacaggtcatcagcaggagcctgcaagttccagtctttctttcactgggctgacgtcaagcagtatatttcaggatgatttaggacctcctcaatgtaagtctattacactagagcgaggaccagatggcttaggcttcagtatagttggaggatatggcagccctcatggagacttacccatttatgttaaaacagtgtttgcaaagggagcagcctctgaagacggacgtctgaaaaggggcgatcagatcattgctgtcaatgggcagagtctagaaggagtcacccatgaagaagctgttgccatccttaaacggacaaaaggcactgtcactttgatggttctctcttgaattggctgccagaattgaaccaacccaacccctagctcacctcctactgtaaagagaatgcactggtcctgacaatttttatgctgtgttcagccgggtcttcaaaactgtaggggggaaataacacttaagtttctttttctcatctagaaatgctttccttactgacaacctaacatcatttttcttttcttcttgcattttgtgaacttaaagagaaggaatatttgtgtaggtgaatctcgtttttatttgtggagatatctaatgttttgtagtcacatgggcaagaattattacatgctaagctggttagtataaagaaagataattctaaagctaaccaaagaaaatggcttcagtaaattaggatgaaaaatgaaaatataaaataaagaagaaaatctcggggagtttaaaaaaaatgcctcaatttggcaatctacctcctctccccaccccaaactaaaaaaagaaaaaaaggttttctaatgaaaatctttaaaaatactgtcagtattttaaaattttcaacagtattataaaaacattgcatctccccacctctaatatgcatatatatttttcctgctaaaattggtttctacaattgagtaaatggcaaatacatgaagcaatgtccctaaattttataaagaaattatatttaatgcacatttcaattttcattcttatttttgaccttttgtaaaatattttcatgttgctataagtaaatgatgatgccaccccatgttgactatggtttttctagaaagcaactatgctgctaaccatagaggaacatagaagggttccagaatctttagtgctggttttaacaaccgatgcaacattaaaaatgtgttagtgtgctgtgcaattggttttcaattcatattaatcttaatgacagagaacaatgtgttactaattattttggttgtatgccattagtaaattgatagaaaaattaaggggattaacataacttcatttcattgccttatattaacatcttataatacaatagtttaagactaagggaaacagatggagctgtttattgagacaactggtgaggaattatcatgtgttcattcccattttagagcgtgaaactcctacattagaatatataaagtcactttaaatatctatatttgtaacagaagtagtgtacagatattttattacagcatttttgtgtaaatgcagaattaaagtgaataaataagaattttcagtggtgcacaaataaaaagaaagca

SEQ ID NO: 306518 - DNA, 6597 bp, Homo sapiens
tgctgctgttaatcatttcagagaagaacactgaactttgaaaaaaatgttggaagccattgacaaaaatcgggccctgcatgcagcagagcgcttgcaaaccaagctgcgagaacgtggggatgtagcaaatgaagacaaactgagccttctgaagtcagtcctgcagagccctctcttcagtcagattctgagccttcagacttctgtacagcagctgaaagaccaggtaaatattgcaacttcagcaacttcaaatattgaatatgcccacgttcctcatctcagcccagctgtgattcctactctgcaaaatgaatcgtttttattatccccaaacaatgggaatctggaagcacttacaggacctggtattccacacattaatgggaaacctgcttgtgatgaatttgatcagcttatcaaaaatatggcccagggtcgccatgtagaagtttttgagctcctcaaacctccatctggaggccttgggtttagtgttgtgggactaagaagtgaaaacagaggagagctgggaatatttgttcaagagatacaagagggcagtgtggcccatagagatggaagattgaaagaaactgatcaaattcttgctatcaatggacaggctcttgatcagacaattacacatcagcaggctatcagcatcctgcagaaagccaaagatactgtccagctagttattgccagaggctcattgcctcagcttgtcagccccatagtttcccgttctccatctgcagccagcacaatttcagctcactctaatccggttcactggcaacacatggaaacgattgaattggtgaatgatggatctggtttgggatttggcatcataggaggaaaagcaactggtgtgatagtaaaaaccattctgcctggaggagtagctgatcagcatgggcgtttatgcagtggagaccacattctaaagattggtgacacagatctagcaggaatgagcagtgagcaagtagcacaagtccttaggcaatgtggaaatagagttaagttgatgattgcaagaggtgccatagaagaacgtacagcacccactgctttgggcatcaccctctcctcatccccaacttcaacaccagagttgcgggttgatgcttctactcagaaaggtgaagaaagtgagacatttgatgtagaactcactaaaaatgtccaaggattaggaattaccattgctggctacattggagataaaaaattggaaccttcaggaatctttgtaaagagcattacaaaaagcagtgccgttgagcatgatggaagaatccaaattggagaccaaattatagcagtagatggcacaaaccttcagggttttactaatcagcaagcagtagaggtattgcgacatacaggacaaactgtgctcctgacactaatgaggagaggaatgaagcaggaagccgagctcatgtcaagggaagacgtcacaaaagatgcagatttgtctcctgttaatgccagcataatcaaagaaaattatgaaaaagatgaagattttttatcttcgacgagaaacaccaacatattaccaactgaagaagaagggtatccattactgtcagctgagatagaagaaatagaagatgcacaaaaacaagaagctgctctgctgacaaaatggcaaaggattatgggaattaactatgaaatagtggtggcccatgtgagcaagtttagtgagaacagtggattggggataagcctggaagcgacagtgggacatcattttatccgatctgttctaccagagggtcctgttggacacagcgggaagctcttcagtggagacgagctattggaagtaaatggcataactttacttggggaaaatcaccaagatgtggtgaatatcttaaaagaactgcctatagaagtgacaatggtgtgctgtcgtcgaactgtgccacccaccacccaatcagaattggatagcctggacttatgtgatattgagctaacagaaaagcctcacgtagatctaggtgagttcatcgggtcatcagagacagaggatccagtgctggcgatgactgatgcgggtcagagtacagaagaggttcaagcacctttggccatgtgggaggctggcattcagcacatagagctggagaaagggagcaaaggacttggttttagcattttagattatcaggatccaattgatccagcaagcactgtgattataattcgttctttggtgcctggcggcattgctgaaaaggatggacgacttcttcctggtgaccgactcatgtttgtaaacgatgttaacttggaaaacagcagtcttgaggaagctgtagaagcactgaagggagcaccgtcagggactgtgagaataggagttgctaagcctttacccctttcaccagaagaaggttatgtttctgctaaggaggattcctttctctacccaccacactcctgtgaggaagcagggctggctgacaaacccctcttcagggctgacttggctctggtgggcacaaatgatgctgacttagtagatgaatccacatttgagtctccatactctcctgaaaatgacagcatctactctactcaagcctctattttatctcttcatggcagttcttgtggtgatggcctgaactatggttcttcccttccatcatctcctcctaaggatgttattgaaaattcttgtgatccagtacttgatctgcatatgtctctggaggaactatatacccagaatctcctgcaaagacaggatgagaatacaccttcggtggacataagtatggggcctgcttctggctttactataaatgactacacacctgcaaatgctattgaacaacaatatgaatgtgaaaacacaatagtgtggactgaatctcatttaccaagtgaagttatatcaagtgcagaacttccttctgtgctacccgattcagctggaaagggctctgagtacctgcttgaacagagctccctggcctgtaatgctgagtgtgtcatgcttcaaaatgtatctaaagaatcttttgaaaggactattaatatagcaaaaggcaattctagcctaggaatgacagttagtgctaataaagatggcttggggatgatcgttcgaagcattattcatggaggtgccattagtcgagatggccggattgccattggggactgcatcttgtccattaatgaagagtctaccatcagtgtaaccaatgcccaggcacgagctatgttgagaagacattctctcattggccctgacataaaaattacttatgtgcctgcagaacatttggaagagttcaaaataagcttgggacaacaatctggaagagtaatggcactggatattttttcttcatacactggcagagacattccagaattaccagagcgagaagagggagagggtgaagaaagcgaacttcaaaacacagcatatagcaattggaatcagcccaggcgggtggaactctggagagaaccaagcaaatccttaggcatcagcattgttggtggacgagggatggggagtcggctaagcaatggagaagtgatgaggggcattttcatcaaacatgttctggaagatagtccagctggcaaaaatggaaccttgaaacctggagatagaatcgtagaggtggatggaatggacctcagagatgcaagccatgaacaagctgtggaagccattcggaaagcaggcaaccctgtagtctttatggtacagagcattataaacagaccaaggaaatcccctttgccttccttgctgcacaacctttaccctaagtacaacttcagcagcactaacccatttgctgactctctacaaatcaacgccgacaaggcacccagtcagtcagagtcagagccagagaaggctccattgtgcagtgtgcccccaccccctccttcagcctttgccgaaatgggtagtgatcacacacagtcatctgcaagcaaaatctcacaagatgtggacaaagaggatgagtttggttacagctggaaaaatatcagagagcgttatggaaccctaacaggcgagctgcatatgattgaactggagaaaggtcatagtggtttgggcctaagtcttgctgggaacaaagaccgatccaggatgagtgtcttcatagtggggattgatccaaatggagctgcaggaaaagatggtcgattgcaaattgcagatgagcttctagagatcaatggtcagattttatatggaagaagtcatcagaatgcctcatcaatcattaaatgtgccccttctaaagtgaaaataatttttatcagaaataaagatgcagtgaatcagatggccgtatgtcctggaaatgcagtagaacctttgccttctaactcagaaaatcttcaaaataaggagacagagccaactgttactacttctgatgcagctgtggacctcagttcatttaaaaatgtgcaacatctggagcttcccaaggatcaggggggtttgggtattgctatcagcgaagaagatacactcagtggagtcatcataaagagcttaacagagcatggggtagcagccacggatggacgactcaaagtcggagatcagatactggctgtagatgatgaaattgttgttggttaccctattgaaaagtttattagccttctgaagacagcaaagatgacagtaaaacttaccatccatgctgagaatccagattcccaggctgttccttcagcagctggtgcagccagtggagaaaaaaagaacagctcccaatacaagcagatcatcaacaccagcaatttttgcttctgatcctgcaacctgccccattatccctggctgcgaaacaaccatcgagatttccaaagggcgaacagggctgggcctgagcatcgttgggggttcagacacgctgctgggtgccattattatccatgaagtttatgaagaaggagcagcatgtaaagatggaagactctgggctggagatcagatcttagaggtgaatggaattgacttgagaaaggccacacatgatgaagcaatcaatgtcctgagacagacgccacagagagtgcgcctgacactctacagagatgaggccccatacaaagaggaggaagtgtgtgacaccctcactattgagctgcagaagaagccgggaaaaggcctaggattaagtattgttggtaaaagaaacgatactggagtatttgtgtcagacattgtcaaaggaggaattgcagatgccgatggaagactgatgcagggagaccagatattaatggtgaatggggaagacgttcgtaatgccacccaagaagcggttgccgctttgctaaagtgttccctaggcacagtaaccttggaagttggaagaatcaaagctggtccattccattcagagaggaggccatctcaaagcagccaggtgagtgaaggcagcctgtcatctttcacttttccactctctggatccagtacatctgagtcactggaaagtagctcaaagaagaatgcattggcatctgaaatacagggattaagaacagtcgaaatgaaaaagggccctactgactcactgggaatcagcatcgctggaggagtaggcagcccacttggtgatgtgcctatatttattgcaatgatgcacccaactggagttgcagcacagacccaaaaactcagagttggggataggattgtcaccatctgtggcacatccactgagggcatgactcacacccaagcagttaacctactgaaaaatgcatctggctccattgaaatgcaggtggttgctggaggagacgtgagtgtggtcacaggtcatcagcaggagcctgcaagttccagtctttctttcactgggctgacgtcaagcagtatatttcaggatgatttaggacctcctcaatgtaagtctattacactagagcgaggaccagatggcttaggcttcagtatagttggaggatatggcagccctcatggagacttacccatttatgttaaaacagtgtttgcaaagggagcagcctctgaagacggacgtctgaaaaggggcgatcagatcattgctgtcaatgggcagagtctagaaggagtcacccatgaagaagctgttgccatccttaaacggacaaaaggcactgtcactttgatggttctctcttgaattggctgccagaattgaaccaacccaacccctagctcacctcctactgtaaagagaatgcactggtcctgacaatttttatgctgtgttcagccgggtcttcaaaactgtaggggggaaataacacttaagtttctttttctcatctagaaatgctttccttactgacaacctaacatcatttttcttttcttcttgcattttgtgaacttaaagagaaggaatatttgtgtaggtgaatctcgtttttatttgtggagatatctaatgttttgtagtcacatgggcaagaattattacatgctaagctggttagtataaagaaagataattctaaagctaaccaaagaaaatggcttcagtaaattaggatgaaaaatgaaaatat

SEQ ID NO: 306519 - DNA, 5604 bp, Homo sapiens
tgctgctgttaatcatttcagagaagaacactgaactttgaaaaaaatgttggaagccattgacaaaaatcgggccctgcatgcagcagagcgcttgcaaaccaagctgcgagaacgtggggatgtagcaaatgaagacaaactgagccttctgaagtcagtcctgcagagccctctcttcagtcagattctgagccttcagacttctgtacagcagctgaaagaccaggtaaatattgcaacttcagcaacttcaaatattgaatatgcccacgttcctcatctcagcccagctgtgattcctactctgcaaaatgaatcgtttttattatccccaaacaatgggaatctggaagcacttacaggacctggtattccacacattaatgggaaacctgcttgtgatgaatttgatcagcttatcaaaaatatggcccagggtcgccatgtagaagtttttgagctcctcaaacctccatctggaggccttgggtttagtgttgtgggactaagaagtgaaaacagaggagagctgggaatatttgttcaagagatacaagagggcagtgtggcccatagagatggaagattgaaagaaactgatcaaattcttgctatcaatggacaggctcttgatcagacaattacacatcagcaggctatcagcatcctgcagaaagccaaagatactgtccagctagttattgccagaggctcattgcctcagcttgtcagccccatagtttcccgttctccatctgcagccagcacaatttcagctcactctaatccggttcactggcaacacatggaaacgattgaattggtgaatgatggatctggtttgggatttggcatcataggaggaaaagcaactggtgtgatagtaaaaaccattctgcctggaggagtagctgatcagcatgggcgtttatgcagtggagaccacattctaaagattggtgacacagatctagcaggaatgagcagtgagcaagtagcacaagtccttaggcaatgtggaaatagagttaagttgatgattgcaagaggtgccatagaagaacgtacagcacccactgctttgggcatcaccctctcctcatccccaacttcaacaccagagttgcgggttgatgcttctactcagaaaggtgaagaaagtgagacatttgatgtagaactcactaaaaatgtccaaggattaggaattaccattgctggctacattggagataaaaaattggaaccttcaggaatctttgtaaagagcattacaaaaagcagtgccgttgagcatgatggaagaatccaaattggagaccaaattatagcagtagatggcacaaaccttcagggttttactaatcagcaagcagtagaggtattgcgacatacaggacaaactgtgctcctgacactaatgaggagaggaatgaagcaggaagccgagctcatgtcaagggaagacgtcacaaaagatgcagatttgtctcctgttaatgccagcataatcaaagaaaattatgaaaaagatgaagattttttatcttcgacgagaaacaccaacatattaccaactgaagaagaagggtatccattactgtcagctgagatagaagaaatagaagatgcacaaaaacaagaagctgctctgctgacaaaatggcaaaggattatgggaattaactatgaaatagtggtggcccatgtgagcaagtttagtgagaacagtggattggggataagcctggaagcgacagtgggacatcattttatccgatctgttctaccagagggtcctgttggacacagcgggaagctcttcagtggagacgagctattggaagtaaatggcataactttacttggggaaaatcaccaagatgtggtgaatatcttaaaagaactgcctatagaagtgacaatggtgtgctgtcgtcgaactgtgccacccaccacccaatcagaattggatagcctggacttatgtgatattgagctaacagaaaagcctcacgtagatctaggtgagttcatcgggtcatcagagacagaggatccagtgctggcgatgactgatgcgggtcagagtacagaagaggttcaagcacctttggccatgtgggaggctggcattcagcacatagagctggagaaagggagcaaaggacttggttttagcattttagattatcaggatccaattgatccagcaagcactgtgattataattcgttctttggtgcctggcggcattgctgaaaaggatggacgacttcttcctggtgaccgactcatgtttgtaaacgatgttaacttggaaaacagcagtcttgaggaagctgtagaagcactgaagggagcaccgtcagggactgtgagaataggagttgctaagcctttacccctttcaccagaagaaggttatgtttctgctaaggaggattcctttctctacccaccacactcctgtgaggaagcagggctggctgacaaacccctcttcagggctgacttggctctggtgggcacaaatgatgctgacttagtagatgaatccacatttgagtctccatactctcctgaaaatgacagcatctactctactcaagcctctattttatctcttcatggcagttcttgtggtgatggcctgaactatggttcttcccttccatcatctcctcctaaggatgttattgaaaattcttgtgatccagtacttgatctgcatatgtctctggaggaactatatacccagaatctcctgcaaagacaggatgagaatacaccttcggtggacataagtatggggcctgcttctggctttactataaatgactacacacctgcaaatgctattgaacaacaatatgaatgtgaaaacacaatagtgtggactgaatctcatttaccaagtgaagttatatcaagtgcagaacttccttctgtgctacccgattcagctggaaagggctctgagtacctgcttgaacagagctccctggcctgtaatgctgagtgtgtcatgcttcaaaatgtatctaaagaatcttttgaaaggactattaatatagcaaaaggcaattctagcctaggaatgacagttagtgctaataaagatggcttggggatgatcgttcgaagcattattcatggaggtgccattagtcgagatggccggattgccattggggactgcatcttgtccattaatgaagagtctaccatcagtgtaaccaatgcccaggcacgagctatgttgagaagacattctctcattggccctgacataaaaattacttatgtgcctgcagaacatttggaagagttcaaaataagcttgggacaacaatctggaagagtaatggcactggatattttttcttcatacactggcagagacattccagaattaccagagcgagaagagggagagggtgaagaaagcgaacttcaaaacacagcatatagcaattggaatcagcccaggcgggtggaactctggagagaaccaagcaaatccttaggcatcagcattgttggtggacgagggatggggagtcggctaagcaatggagaagtgatgaggggcattttcatcaaacatgttctggaagatagtccagctggcaaaaatggaaccttgaaacctggagatagaatcgtagaggtggatggaatggacctcagagatgcaagccatgaacaagctgtggaagccattcggaaagcaggcaaccctgtagtctttatggtacagagcattataaacagaccaaggaaatcccctttgccttccttgctgcacaacctttaccctaagtacaacttcagcagcactaacccatttgctgactctctacaaatcaacgccgacaaggcacccagtcagtcagagtcagagccagagaaggctccattgtgcagtgtgcccccaccccctccttcagcctttgccgaaatgggtagtgatcacacacagtcatctgcaagcaaaatctcacaagatgtggacaaagaggatgagtttggttacagctggaaaaatatcagagagcgttatggaaccctaacaggcgagctgcatatgattgaactggagaaaggtcatagtggtttgggcctaagtcttgctgggaacaaagaccgatccaggatgagtgtcttcatagtggggattgatccaaatggagctgcaggaaaagatggtcgattgcaaattgcagatgagcttctagagatcaatggtcagattttatatggaagaagtcatcagaatgcctcatcaatcattaaatgtgccccttctaaagtgaaaataatttttatcagaaataaagatgcagtgaatcagatggccgtatgtcctggaaatgcagtagaacctttgccttctaactcagaaaatcttcaaaataaggagacagagccaactgttactacttctgatgcagctgtggacctcagttcatttaaaaatgtgcaacatctggagcttcccaaggatcaggggggtttgggtattgctatcagcgaagaagatacactcagtggagtcatcataaagagcttaacagagcatggggtagcagccacggatggacgactcaaagtcggagatcagatactggctgtagatgatgaaattgttgttggttaccctattgaaaagtttattagccttctgaagacagcaaagatgacagtaaaacttaccatccatgctgagaatccagattcccaggctgttccttcagcagctggtgcagccagtggagaaaaaaagaacagctcccaatacaagcagatcatcaacaccagcaatttttgcttctgatcctgcaacctgccccattatccctggctgcgaaacaaccatcgagatttccaaagggcgaacagggctgggcctgagcatcgttgggggttcagacacgctgctgggtgccattattatccatgaagtttatgaagaaggagcagcatgtaaagatggaagactctgggctggagatcagatcttagaggtgaatggaattgacttgagaaaggccacacatgatgaagcaatcaatgtcctgagacagacgccacagagagtgcgcctgacactctacagagatgaggccccatacaaagaggaggaagtgtgtgacaccctcactattgagctgcagaagaagccgggaaaaggcctaggattaagtattgttggtaaaagaaacgatactggagtatttgtgtcagacattgtcaaaggaggaattgcagatgccgatggaagactgatgcagggagaccagatattaatggtgaatggggaagacgttcgtaatgccacccaagaagcggttgccgctttgctaaagtgttccctaggcacagtaaccttggaagttggaagaatcaaagctggtccattccattcagagaggaggccatctcaaagcagccaggtgagtgaaggcagcctgtcatctttcacttttccactctctggatccagtacatctgagtcactggaaagtagctcaaagaagaatgcattggcatctgaaatacagggattaagcagtcgtgacacttggtgatgtgcct

SEQ ID NO: 306520 - DNA, 5059 bp, Homo sapiens
tgctgctgttaatcatttcagagaagaacactgaactttgaaaaaaatgttggaagccattgacaaaaatcgggccctgcatgcagcagagcgcttgcaaaccaagctgcgagaacgtggggatgtagcaaatgaagacaaactgagccttctgaagtcagtcctgcagagccctctcttcagtcagattctgagccttcagacttctgtacagcagctgaaagaccaggtaaatattgcaacttcagcaacttcaaatattgaatatgcccacgttcctcatctcagcccagctgtgattcctactctgcaaaatgaatcgtttttattatccccaaacaatgggaatctggaagcacttacaggacctggtattccacacattaatgggaaacctgcttgtgatgaatttgatcagcttatcaaaaatatggcccagggtcgccatgtagaagtttttgagctcctcaaacctccatctggaggccttgggtttagtgttgtgggactaagaagtgaaaacagaggagagctgggaatatttgttcaagagatacaagagggcagtgtggcccatagagatggaagattgaaagaaactgatcaaattcttgctatcaatggacaggctcttgatcagacaattacacatcagcaggctatcagcatcctgcagaaagccaaagatactgtccagctagttattgccagaggctcattgcctcagcttgtcagccccatagtttcccgttctccatctgcagccagcacaatttcagctcactctaatccggttcactggcaacacatggaaacgattgaattggtgaatgatggatctggtttgggatttggcatcataggaggaaaagcaactggtgtgatagtaaaaaccattctgcctggaggagtagctgatcagcatgggcgtttatgcagtggagaccacattctaaagattggtgacacagatctagcaggaatgagcagtgagcaagtagcacaagtccttaggcaatgtggaaatagagttaagttgatgattgcaagaggtgccatagaagaacgtacagcacccactgctttgggcatcaccctctcctcatccccaacttcaacaccagagttgcgggttgatgcttctactcagaaaggtgaagaaagtgagacatttgatgtagaactcactaaaaatgtccaaggattaggaattaccattgctggctacattggagataaaaaattggaaccttcaggaatctttgtaaagagcattacaaaaagcagtgccgttgagcatgatggaagaatccaaattggagaccaaattatagcagtagatggcacaaaccttcagggttttactaatcagcaagcagtagaggtattgcgacatacaggacaaactgtgctcctgacactaatgaggagaggaatgaagcaggaagccgagctcatgtcaagggaagacgtcacaaaagatgcagatttgtctcctgttaatgccagcataatcaaagaaaattatgaaaaagatgaagattttttatcttcgacgagaaacaccaacatattaccaactgaagaagaagggtatccattactgtcagctgagatagaagaaatagaagatgcacaaaaacaagaagctgctctgctgacaaaatggcaaaggattatgggaattaactatgaaatagtggtggcccatgtgagcaagtttagtgagaacagtggattggggataagcctggaagcgacagtgggacatcattttatccgatctgttctaccagagggtcctgttggacacagcgggaagctcttcagtggagacgagctattggaagtaaatggcataactttacttggggaaaatcaccaagatgtggtgaatatcttaaaagaactgcctatagaagtgacaatggtgtgctgtcgtcgaactgtgccacccaccacccaatcagaattggatagcctggacttatgtgatattgagctaacagaaaagcctcacgtagatctaggtgagttcatcgggtcatcagagacagaggatccagtgctggcgatgactgatgcgggtcagagtacagaagaggttcaagcacctttggccatgtgggaggctggcattcagcacatagagctggagaaagggagcaaaggacttggttttagcattttagattatcaggatccaattgatccagcaagcactgtgattataattcgttctttggtgcctggcggcattgctgaaaaggatggacgacttcttcctggtgaccgactcatgtttgtaaacgatgttaacttggaaaacagcagtcttgaggaagctgtagaagcactgaagggagcaccgtcagggactgtgagaataggagttgctaagcctttacccctttcaccagaagaaggttatgtttctgctaaggaggattcctttctctacccaccacactcctgtgaggaagcagggctggctgacaaacccctcttcagggctgacttggctctggtgggcacaaatgatgctgacttagtagatgaatccacatttgagtctccatactctcctgaaaatgacagcatctactctactcaagcctctattttatctcttcatggcagttcttgtggtgatggcctgaactatggttcttcccttccatcatctcctcctaaggatgttattgaaaattcttgtgatccagtacttgatctgcatatgtctctggaggaactatatacccagaatctcctgcaaagacaggatgagaatacaccttcggtggacataagtatggggcctgcttctggctttactataaatgactacacacctgcaaatgctattgaacaacaatatgaatgtgaaaacacaatagtgtggactgaatctcatttaccaagtgaagttatatcaagtgcagaacttccttctgtgctacccgattcagctggaaagggctctgagtacctgcttgaacagagctccctggcctgtaatgctgagtgtgtcatgcttcaaaatgtatctaaagaatcttttgaaaggactattaatatagcaaaaggcaattctagcctaggaatgacagttagtgctaataaagatggcttggggatgatcgttcgaagcattattcatggaggtgccattagtcgagatggccggattgccattggggactgcatcttgtccattaatgaagagtctaccatcagtgtaaccaatgcccaggcacgagctatgttgagaagacattctctcattggccctgacataaaaattacttatgtgcctgcagaacatttggaagagttcaaaataagcttgggacaacaatctggaagagtaatggcactggatattttttcttcatacactggcagagacattccagaattaccagagcgagaagagggagagggtgaagaaagcgaacttcaaaacacagcatatagcaattggaatcagcccaggcgggtggaactctggagagaaccaagcaaatccttaggcatcagcattgttggtggacgagggatggggagtcggctaagcaatggagaagtgatgaggggcattttcatcaaacatgttctggaagatagtccagctggcaaaaatggaaccttgaaacctggagatagaatcgtagaggtggatggaatggacctcagagatgcaagccatgaacaagctgtggaagccattcggaaagcaggcaaccctgtagtctttatggtacagagcattataaacagaccaaggaaatcccctttgccttccttgctgcacaacctttaccctaagtacaacttcagcagcactaacccatttgctgactctctacaaatcaacgccgacaaggcacccagtcagtcagagtcagagccagagaaggctccattgtgcagtgtgcccccaccccctccttcagcctttgccgaaatgggtagtgatcacacacagtcatctgcaagcaaaatctcacaagatgtggacaaagaggatgagtttggttacagctggaaaaatatcagagagcgttatggaaccctaacaggcgagctgcatatgattgaactggagaaaggtcatagtggtttgggcctaagtcttgctgggaacaaagaccgatccaggatgagtgtcttcatagtggggattgatccaaatggagctgcaggaaaagatggtcgattgcaaattgcagatgagcttctagagatcaatggtcagattttatatggaagaagtcatcagaatgcctcatcaatcattaaatgtgccccttctaaagtgaaaataatttttatcagaaataaagatgcagtgaatcagatggccgtatgtcctggaaatgcagtagaacctttgccttctaactcagaaaatcttcaaaataaggagacagagccaactgttactacttctgatgcagctgtggacctcagttcatttaaaaatgtgcaacatctggagcttcccaaggatcaggggggtttgggtattgctatcagcgaagaagatacactcagtggagtcatcataaagagcttaacagagcatggggtagcagccacggatggacgactcaaagtcggagatcagatactggctgtagatgatgaaattgttgttggttaccctattgaaaagtttattagccttctgaagacagcaaagatgacagtaaaacttaccatccatgctgagaatccagattcccaggctgttccttcagcagctggtgcagccagtggagaaaaaaagaacagctcccagtctctgatggtcccacagtctggctccccagaaccggagtccatccgaaatacaagcagatcatcaacaccagcaatttttgcttctgatcctgcaacctgccccattatccctggctgcgaaacaaccatcgagatttccaaagggcgaacagggctgggcctgagcatcgttgggggttcagacacgctgctggtgccattattatccatgaagtttaacagcagtgggggtacttaacaatacctgataagg

SEQ ID NO: 306521 - DNA, 4177 bp, Homo sapiens
tgctgctgttaatcatttcagagaagaacactgaactttgaaaaaaatgttggaagccattgacaaaaatcgggccctgcatgcagcagagcgcttgcaaaccaagctgcgagaacgtggggatgtagcaaatgaagacaaactgagccttctgaagtcagtcctgcagagccctctcttcagtcagattctgagccttcagacttctgtacagcagctgaaagaccaggtaaatattgcaacttcagcaacttcaaatattgaatatgcccacgttcctcatctcagcccagctgtgattcctactctgcaaaatgaatcgtttttattatccccaaacaatgggaatctggaagcacttacaggacctggtattccacacattaatgggaaacctgcttgtgatgaatttgatcagcttatcaaaaatatggcccagggtcgccatgtagaagtttttgagctcctcaaacctccatctggaggccttgggtttagtgttgtgggactaagaagtgaaaacagaggagagctgggaatatttgttcaagagatacaagagggcagtgtggcccatagagatggaagattgaaagaaactgatcaaattcttgctatcaatggacaggctcttgatcagacaattacacatcagcaggctatcagcatcctgcagaaagccaaagatactgtccagctagttattgccagaggctcattgcctcagcttgtcagccccatagtttcccgttctccatctgcagccagcacaatttcagctcactctaatccggttcactggcaacacatggaaacgattgaattggtgaatgatggatctggtttgggatttggcatcataggaggaaaagcaactggtgtgatagtaaaaaccattctgcctggaggagtagctgatcagcatgggcgtttatgcagtggagaccacattctaaagattggtgacacagatctagcaggaatgagcagtgagcaagtagcacaagtccttaggcaatgtggaaatagagttaagttgatgattgcaagaggtgccatagaagaacgtacagcacccactgctttgggcatcaccctctcctcatccccaacttcaacaccagagttgcgggttgatgcttctactcagaaaggtgaagaaagtgagacatttgatgtagaactcactaaaaatgtccaaggattaggaattaccattgctggctacattggagataaaaaattggaaccttcaggaatctttgtaaagagcattacaaaaagcagtgccgttgagcatgatggaagaatccaaattggagaccaaattatagcagtagatggcacaaaccttcagggttttactaatcagcaagcagtagaggtattgcgacatacaggacaaactgtgctcctgacactaatgaggagaggaatgaagcaggaagccgagctcatgtcaagggaagacgtcacaaaagatgcagatttgtctcctgttaatgccagcataatcaaagaaaattatgaaaaagatgaagattttttatcttcgacgagaaacaccaacatattaccaactgaagaagaagggtatccattactgtcagctgagatagaagaaatagaagatgcacaaaaacaagaagctgctctgctgacaaaatggcaaaggattatgggaattaactatgaaatagtggtggcccatgtgagcaagtttagtgagaacagtggattggggataagcctggaagcgacagtgggacatcattttatccgatctgttctaccagagggtcctgttggacacagcgggaagctcttcagtggagacgagctattggaagtaaatggcataactttacttggggaaaatcaccaagatgtggtgaatatcttaaaagaactgcctatagaagtgacaatggtgtgctgtcgtcgaactgtgccacccaccacccaatcagaattggatagcctggacttatgtgatattgagctaacagaaaagcctcacgtagatctaggtgagttcatcgggtcatcagagacagaggatccagtgctggcgatgactgatgcgggtcagagtacagaagaggttcaagcacctttggccatgtgggaggctggcattcagcacatagagctggagaaagggagcaaaggacttggttttagcattttagattatcaggatccaattgatccagcaagcactgtgattataattcgttctttggtgcctggcggcattgctgaaaaggatggacgacttcttcctggtgaccgactcatgtttgtaaacgatgttaacttggaaaacagcagtcttgaggaagctgtagaagcactgaagggagcaccgtcagggactgtgagaataggagttgctaagcctttacccctttcaccagaagaaggttatgtttctgctaaggaggattcctttctctacccaccacactcctgtgaggaagcagggctggctgacaaacccctcttcagggctgacttggctctggtgggcacaaatgatgctgacttagtagatgaatccacatttgagtctccatactctcctgaaaatgacagcatctactctactcaagcctctattttatctcttcatggcagttcttgtggtgatggcctgaactatggttcttcccttccatcatctcctcctaaggatgttattgaaaattcttgtgatccagtacttgatctgcatatgtctctggaggaactatatacccagaatctcctgcaaagacaggatgagaatacaccttcggtggacataagtatggggcctgcttctggctttactataaatgactacacacctgcaaatgctattgaacaacaatatgaatgtgaaaacacaatagtgtggactgaatctcatttaccaagtgaagttatatcaagtgcagaacttccttctgtgctacccgattcagctggaaagggctctgagtacctgcttgaacagagctccctggcctgtaatgctgagtgtgtcatgcttcaaaatgtatctaaagaatcttttgaaaggactattaatatagcaaaaggcaattctagcctaggaatgacagttagtgctaataaagatggcttggggatgatcgttcgaagcattattcatggaggtgccattagtcgagatggccggattgccattggggactgcatcttgtccattaatgaagagtctaccatcagtgtaaccaatgcccaggcacgagctatgttgagaagacattctctcattggccctgacataaaaattacttatgtgcctgcagaacatttggaagagttcaaaataagcttgggacaacaatctggaagagtaatggcactggatattttttcttcatacactggcagagacattccagaattaccagagcgagaagagggagagggtgaagaaagcgaacttcaaaacacagcatatagcaattggaatcagcccaggcgggtggaactctggagagaaccaagcaaatccttaggcatcagcattgttggtggacgagggatggggagtcggctaagcaatggagaagtgatgaggggcattttcatcaaacatgttctggaagatagtccagctggcaaaaatggaaccttgaaacctggagatagaatcgtagaggtaccctctagtgagcctgtgctaaaatttgtttgttttgttttatttatttattttttaattttactattattatactttaagttttagggtacatgtgctaaaatttttcacctgctccaccctttgtactgagggaattgtcatcttcatactagttactcaacccagcattcgagtaaaatgtgtgtgtggataaattatttctttcttatttgtttattttcatacgtaattttctcttatgtatataatgacagattatatgttttgatatagagactgatgtttggagataaagccaaccatttaaaaaaaaatggctccaaggtaaaataattatgttctgtttgaaagaacaaagcacaattctcagggaaaaattttgaattaagattacattagacatacaatatatgtatatgtacacacaaaaatgtagatataattaagttaatgagattttatttttccaagtgagtcttttttagtaaaatattt

SEQ ID NO: 306522 - DNA, 3511 bp, Homo sapiens
tgctgctgttaatcatttcagagaagaacactgaactttgaaaaaaatgttggaagccattgacaaaaatcgggccctgcatgcagcagagcgcttgcaaaccaagctgcgagaacgtggggatgtagcaaatgaagacaaactgagccttctgaagtcagtcctgcagagccctctcttcagtcagattctgagccttcagacttctgtacagcagctgaaagaccaggtaaatattgcaacttcagcaacttcaaatattgaatatgcccacgttcctcatctcagcccagctgtgattcctactctgcaaaatgaatcgtttttattatccccaaacaatgggaatctggaagcacttacaggacctggtattccacacattaatgggaaacctgcttgtgatgaatttgatcagcttatcaaaaatatggcccagggtcgccatgtagaagtttttgagctcctcaaacctccatctggaggccttgggtttagtgttgtgggactaagaagtgaaaacagaggagagctgggaatatttgttcaagagatacaagagggcagtgtggcccatagagatggaagattgaaagaaactgatcaaattcttgctatcaatggacaggctcttgatcagacaattacacatcagcaggctatcagcatcctgcagaaagccaaagatactgtccagctagttattgccagaggctcattgcctcagcttgtcagccccatagtttcccgttctccatctgcagccagcacaatttcagctcactctaatccggttcactggcaacacatggaaacgattgaattggtgaatgatggatctggtttgggatttggcatcataggaggaaaagcaactggtgtgatagtaaaaaccattctgcctggaggagtagctgatcagcatgggcgtttatgcagtggagaccacattctaaagattggtgacacagatctagcaggaatgagcagtgagcaagtagcacaagtccttaggcaatgtggaaatagagttaagttgatgattgcaagaggtgccatagaagaacgtacagcacccactgctttgggcatcaccctctcctcatccccaacttcaacaccagagttgcgggttgatgcttctactcagaaaggtgaagaaagtgagacatttgatgtagaactcactaaaaatgtccaaggattaggaattaccattgctggctacattggagataaaaaattggaaccttcaggaatctttgtaaagagcattacaaaaagcagtgccgttgagcatgatggaagaatccaaattggagaccaaattatagcagtagatggcacaaaccttcagggttttactaatcagcaagcagtagaggtattgcgacatacaggacaaactgtgctcctgacactaatgaggagaggaatgaagcaggaagccgagctcatgtcaagggaagacgtcacaaaagatgcagatttgtctcctgttaatgccagcataatcaaagaaaattatgaaaaagatgaagattttttatcttcgacgagaaacaccaacatattaccaactgaagaagaagggtatccattactgtcagctgagatagaagaaatagaagatgcacaaaaacaagaagctgctctgctgacaaaatggcaaaggattatgggaattaactatgaaatagtggtggcccatgtgagcaagtttagtgagaacagtggattggggataagcctggaagcgacagtgggacatcattttatccgatctgttctaccagagggtcctgttggacacagcgggaagctcttcagtggagacgagctattggaagtaaatggcataactttacttggggaaaatcaccaagatgtggtgaatatcttaaaagaactgcctatagaagtgacaatggtgtgctgtcgtcgaactgtgccacccaccacccaatcagaattggatagcctggacttatgtgatattgagctaacagaaaagcctcacgtagatctaggtgagttcatcgggtcatcagagacagaggatccagtgctggcgatgactgatgcgggtcagagtacagaagaggttcaagcacctttggccatgtgggaggctggcattcagcacatagagctggagaaagggagcaaaggacttggttttagcattttagattatcaggatccaattgatccagcaagcactgtgattataattcgttctttggtgcctggcggcattgctgaaaaggatggacgacttcttcctggtgaccgactcatgtttgtaaacgatgttaacttggaaaacagcagtcttgaggaagctgtagaagcactgaagggagcaccgtcagggactgtgagaataggagttgctaagcctttacccctttcaccagaagaaggttatgtttctgctaaggaggattcctttctctacccaccacactcctgtgaggaagcagggctggctgacaaacccctcttcagggctgacttggctctggtgggcacaaatgatgctgacttagtagatgaatccacatttgagtctccatactctcctgaaaatgacagcatctactctactcaagcctctattttatctcttcatggcagttcttgtggtgatggcctgaactatggttcttcccttccatcatctcctcctaaggatgttattgaaaattcttgtgatccagtacttgatctgcatatgtctctggaggaactatatacccagaatctcctgcaaagacaggatgagaatacaccttcggtggacataagtatggggcctgcttctggctttactataaatgactacacacctgcaaatgctattgaacaacaatatgaatgtgaaaacacaatagtgtggactgaatctcatttaccaagtgaagttatatcaagtgcagaacttccttctgtgctacccgattcagctggaaagggctctgagtacctgcttgaacagagctccctggcctgtaatgctgagtgtgtcatgcttcaaaatgtatctaaagaatcttttgaaaggactattaatatagcaaaaggcaattctagcctaggaatgacagttagtgctaataaagatggcttggggatgatcgttcgaagcattattcatggaggtgccattagtcgagatggccggattgccattggggactgcatcttgtccattaatgaagagtctaccatcagtgtaaccaatgcccaggcacgagctatgttgagaagacattctctcattggccctgacataaaaattacttatgtgcctgcagaacatttggaagagttcaaaataagcttgggacaacaatctggaagagtaatggcactggatattttttcttcatacactggcagagacattccaggatcaccagaacgagaacggcgcctgtagtgcgcacccaggcgcacttctcacctggcactgtccccggagcggtcgcgcccggccgagaaagtg

SEQ ID NO: 306523 - DNA, 241 bp, Homo sapiens
agttgcaaggcagcattttttgagaaataaacaagtctactttataatttgcagggagcagcctctgaagacggacgtctgaaaaggggcgatcagatcattgctgtcaatgggcagagtctagaaggagtcacccatgaagaagctgttgccatccttaaacggacaaaaggcactgtcactttgatggttctctcttgaattggctgccagaattgaaccaacccaacccctagctcac

SEQ ID NO: 306524 - DNA, 379 bp, Homo sapiens
ttgggcgaagagtctgacgtgatacagcgggttctgatcagagaatccttggtacaggatgttaagatgtggagatttctgtagtttgctgctaacttaattgccttgactgtttcagggtatccattactgtcagctgagatagaagaaatagaagatgcacaaaaacaagaagctgctctgctgacaaaatggcaaaggattatgggaattaactatgaaatagtggtaggttagctgaccttctgtaattttctaacttgtaactgtatttgagcaggcagttcgagggaataatagaggcaatcattagagttccagagaagaatcaaatgtacaggccttttttagacaacctaaatatggtgatccaggtaat

SEQ ID NO: 306525 - DNA, 762 bp, Homo sapiens
cgtgctgcgcttggctggctgtggagtcggccgaagctttcggcggcggctgagccagctgaggggaaaaatggctcggactgtggcggcttcggcggctcaggttgtggtagaggcggaggctcaggcagcttgaggattcgactacatatataaagcagtgctgtacatgagaaatatgtgagccaaaaatgggagtcacataggttccttgtgtcctcacgttggcaggcagatacctactctgaagcctttgtaggagcctgagcacctttgcgaacctgagctggaactgaagctggagttgcagcctgggccttggtttgatccttgtccttgtcgtttggccggcacaacccaagccccttggcaatgcgggcacaagcacgcttcccaagcttggggtgggcaatgtaggcaagtcgatggagcttgctgctgacaccctttgggatcttgggcttaacctcctttacaagggccttcatagcctcaccacgtggactgatggcctgccaaagcctgcatcttctttaggcccttcttgttttgcttcttggcaatgcacatgttcctcaggaatttggggtccaccccattgagagagtcatatctttgtgatcggggtatcttttctctttcttttgtctgatctttgcttttgttttcttttcttttctcttttcttttcttttctttttttgagacagagtctcgctctgttgccaggctggagcgcagtggtgcgatctcggctcactg

SEQ ID NO: 306526 - DNA, 455 bp, Homo sapiens
ggtacccttagcacttcctgtactttttttcaccgtttgacaactgggcattttataaattgtatccacagcataacttgtctgaaaaatagatcttcattttcattatgtacttacagtatcacatctctttctataggttgttctccaaagaagtatggaacgagtacagtccttttttcagaaaaataaatgccgtctccctctcaagccaagtctagtggcaaaagaattaaatattaaggtgacacataaaatacttataagttcatattacatttgaaaataataggaagaaggcaaatgggcaggtatgcttaaggcaaatgaaggtaaaacctgcacaggttggttataagcatggatggttgtgattaggatccatatttatcttagcatatttttttacctaaccaccattcctgggaaaaaaaaagtataaaattatttactgc

SEQ ID NO: 306527 - DNA, 8428 bp, Homo sapiens
cgtgctgcgcttggctggctgtggagtcggccgaagctttcggcggcggctgagccagctgaggggaaaaatggctcggactgtggcggcttcggcggctcaggttgtggtagaggcggaggctcaggcagcttgaggccttgctattttggaagctacaagaaaaaaatagaggaaggaaggtttggtctttttagtggacatggctcagatatctagcaacagcggatttaaagaatgtccatcttcacatccggaaccaacaagagcaaaagatgtggacaaagaagaagcattacagatggaagcagaggctttagcaaaactgcaaaaggatagacaagtgactgacaatcagagaggctttgagttgtcaagcagcaccagaaaaaaagcacaggtttataacaagcaggattatgatctcatggtgtttcctgaatcagattcccaaaaaagagcattagatattgatgtagaaaagctcacccaagctgaacttgagaaactattgctggatgacagtttcgagactaaaaaaacacctgtattaccagttactcctattctgagcccttccttttcagcacagctctattttagacctactattcagagaggacagtggccacctggattacctgggccttccacttatgctttaccttctatttatccttctacttacagtaaacaggctgcattccaaaatggcttcaatccaagaatgcccacttttccatctacagaacctatatatttaagtcttccgggacaatctccatatttctcatatcctttgacacctgccacaccctttcatccacaaggaagcttacctatctatcgtccagtagtcagtactgacatggcaaaactatttgacaaaatagctagtacatcagaatttttaaaaaatgggaaagcaaggactgatttggagataacagattcaaaagtcagcaatctacaggtatctccaaagtctgaggatatcagtaaatttgactggttagacttggatcctctaagtaagcctaaggtggataatgtggaggtattagaccatgaggaagagaaaaatgtttcaagtttgctagcaaaggatccttgggatgctgttcttcttgaagagagatcgacagcaaattgtcatcttgaaagaaaggtgaatggaaaatccctttctgtggcaactgttacaagaagccagtctttaaatattcgaacaactcagcttgcaaaagcccagggccatatatctcagaaagacccaaatgggaccagtagtttgccaactggaagttctcttcttcaagaagttgaagtacagaatgaggagatggcagctttttgtcgatccattacaaaattgaagaccaaatttccatataccaatcaccgcacaaacccaggctatttgttaagtccagtcacagcgcaaagaaacatatgcggagaaaatgctagtgtgaaggtctccattgacattgaaggatttcagctaccagttacttttacgtgtgatgtgagttctactgtagaaatcattataatgcaagccctttgctgggtacatgatgacttgaatcaagtagatgttggcagctatgttctaaaagtttgtggtcaagaggaagtgctgcagaataatcattgccttggaagtcatgagcatattcaaaactgtcgaaaatgggacacagaaattagactacaactcttgaccttcagtgcaatgtgtcaaaatctggcccgaacagcagaagatgatgaaacacccgtggatttaaacaaacacctgtatcaaatagaaaaaccttgcaaagaagccatgacgagacaccctgttgaagaactcttagattcttatcacaaccaagtagaactggctcttcaaattgaaaaccaacaccgagcagtagatcaagtaattaaagctgtaagaaaaatctgtagtgctttagatggtgtcgagactcttgccattacagaatcagtaaagaagctaaagagagcagttaatcttccaaggagtaaaactgctgatgtgacttctttgtttggaggagaagacactagcaggagttcaactaggggctcacttaatcctgaaaatcctgttcaagtaagcataaaccaattaactgcagcaatttatgatcttctcagactccatgcaaattctggtaggagtcctacagactgtgcccaaagtagcaagagtgtcaaggaagcatggactacaacagagcagctccagtttactatttttgctgctcatggaatttcaagtaattgggtatcaaattatgaaaaatactacttgatatgttcactgtctcacaatggaaaggatctttttaaacctattcaatcaaagaaggttggcacttacaagaatttcttctatcttattaaatgggatgaactaatcatttttcctatccagatatcacaattgccattagaatcagttcttcaccttactctttttggaattttaaatcagagcagtggaagttcccctgattctaataagcagagaaagggaccagaagctttgggcaaagtttctttacctctttgtgactttagacggtttttaacatgtggaactaaacttctatatctttggacttcatcacatacaaattctgttcctggaacagttaccaaaaaaggatatgtcatggaaagaatagtgctacaggttgattttccttctcctgcatttgatattatttatacaactcctcaagttgacagaagcattatacagcaacataacttagaaacactagagaatgatataaaagggaaacttcttgatattcttcataaagactcatcacttggactttctaaagaagataaagcttttttatgggagaaacgttattattgcttcaaacacccaaattgtcttcctaaaatattagcaagcgccccaaactggaaatggggtaatcttgccaaaacttactcattgcttcaccagtggcctgcattgtacccactaattgcattggaacttcttgattcaaaatttgctgatcaggaagtaagatccctagctgtgacctggattgaggccattagtgatgatgagctaacagatcttcttccacagtttgtacaagctttgaaatatgaaatttacttgaatagttcattagtgcaattccttttgtccagggcattgggaaatatccagatagcacacaatttatattggcttctcaaagatgccctgcatgatgtacagtttagtacccgatacgaacatgttttgggtgctctcctgtcagtaggaggaaaacgacttagagaagaacttctaaaacagacgaaacttgtacagcttttaggaggagtagcagaaaaagtaaggcaggctagtggatcagccagacaggttgttctccaaagaagtatggaacgagtacagtccttttttcagaaaaataaatgccgtctccctctcaagccaagtctagtggcaaaagaattaaatattaagtcgtgttccttcttcagttctaatgctgtccccctaaaagtcacaatggtgaatgctgaccctatgggagaagaaattaatgtcatgtttaaggttggtgaagatcttcggcaagatatgttagctttacagatgataaagattatggataagatctggcttaaagaaggactagatctgaggatggtaattttcaaatgtctctcaactggcagagatcgaggcatggtggagctggttcctgcttccgataccctcaggaaaatccaagtggaatatggtgtgacaggatcctttaaagataaaccacttgcagagtggctaaggaaatacaatccctctgaagaagaatatgaaaaggcttcagagaactttatctattcctgtgctggatgctgtgtagccacctatgttttaggcatctgtgatcgacacaatgacaatataatgcttcgaagcacgggacacatgtttcacattgactttggaaagtttttgggacatgcacagatgtttggcagcttcaaaagggatcgggctccttttgtgctgacctctgatatggcatatgtcattaatgggggtgaaaagcccaccattcgttttcagttgtttgtggacctctgctgtcaggcctacaacttgataagaaagcagacaaacctttttcttaacctcctttcactgatgattccttcagggttaccagaacttacaagtattcaagatttgaaatacgttagagatgcacttcaaccccaaactacagacgcagaagctacaattttctttactaggcttattgaatcaagtttgggaagcattgccacaaagtttaacttcttcattcacaaccttgctcagcttcgtttttctggtcttccttctaatgatgagcccatcctttcattttcacctaaaacatactcctttagacaagatggtcgaatcaaggaagtctctgtttttacatatcataagaaatacaacccagataaacattatatttatgtagtccgaattttgagggaaggacagattgaaccatcatttgtcttccgaacatttgacgaatttcaggaacttcacaataagctcagtattatttttccactttggaagttaccaggctttcctaataggatggttctaggaagaacacacataaaagatgtagcagccaaaaggaaaattgagttaaacagttacttacagagtttgatgaatgcttcaacggatgtagcagagtgtgatcttgtttgtactttcttccaccctttacttcgtgatgagaaagctgaagggatagctaggtctgcagatgcaggttccttcagtcctactccaggccaaataggaggagctgtgaaattatccatctcttaccgaaatggtactcttttcatcatggtgatgcatatcaaagatcttgttactgaagatggagctgacccaaatccatatgtcaaaacatacctacttccagataaccacaaaacatccaaacgtaaaaccaaaatttcacgaaaaacgaggaatccgacattcaatgaaatgcttgtatacagtggatatagcaaagaaaccctaagacagcgagaacttcaactaagtgtactcagtgcagaatctctgcgggagaattttttcttgggtggagtaaccctgcctttgaaagatttcaacttgagcaaagagacggttaaatggtatcagctgactgcggcaacatacttgtaaactagtgaatgtctgagctttggaagcatgaacagttataaacgtgcatgcatacatgcacacacacacagacacacacacacacacttgttaattttgtatagtatttttatacttggacagaacttataaagttaaatatacttgctgcatttcaacacatctgttggaccaacagtcacataactaacctttttgaatttttggaagccattgctgttttaaagtcattatgtagaatgctacaaaccctaaacttaatatatactaattcctgaaaaagactttgagacagtactatgtcagttcagccacctattttgcattgttttctataaggaggcaaagcatatgtgttttcctgttatgcaccttttatagcctttaccactgtgtaatgttcacaaacaccaaagtaaaggaaaaatgcaggatgttaccgtaaaatccagctgctattcatggagctgaaaaacaaagcacaaataatagatagctaagttaagaactactaagtagtttatagaagtagggaaaaacgtaatactgctttttattcatgtctttaaagcctttttcagaataagtgccaatcactgatgttgtaaataatggtgccttaactttatatgcttccctggcacttcgtttctgatttttttcctgatttgataaataattagtacatagttttcactcacttgcagcttactaaagacaagaaattatgtacatgtactaatgtttttcccacaaaaaaatcctttacttctgatgtatgaattagttatctaaatagttaagcctaatacctgaataagactcaccaatgtgattgtacaataaattctatcattccattaaaatcctacatttattcccaggaatggtaatttcacctccctacatctatactccactccctcagtaaataagtgaaaattgttaacccatgtgcccattcctgagtagggcagactcttcacaagaggcccatgacaagaattctagggtccagattgaactttaatatagacctttgtctgtgtagaccagtttgtcttgtaaactgtcttacttatgtgtgtaaacattttacattcacatgaaaagttattttcctttatataattggattcagaatcataagggacaggactgaaattattctacagtaaccagtaagaataagattcggccgggcacggtggctcctgcctgtaatcccaacactttgggaggccaaggtgggcggatcacctgaggtcaggagtttgagaccagcctggccaacatggtgaaaccccgtctctacacaaaaattagccaggcgtggtagcgggcatctgtaatcccagctacttggggggctgaggcaggagaatcgcttgaacccaggaggcggaggttgcagtgagccgagatcacgccactgcactcccgcctgggtgacaagagcaaaactccatcttaaaaaaaaagaaaaaaagagtaagattcatttttattagttactcaacttcagacacaattttgttaatttggatatatacatatatataataagaactcatggttagaatagaaatacagatactttaaaaatggtaatagaaattgtaccaatcaggttgctgtgagaaaactgacaaaatatgcaataaagaataccaagagagaaaggacaatcgccaattcagtttcccagaacagaatttttatgaactgcacaaatgtttaatgtaaatggtgatacctacagggaagaaatagaagagttgataatatatcactgggacggggtgggggaaagacttgaaatttttggtgcctaacactaatggtccatatgtagttaaacccatgagtatggtatatgaatgtcttttttaaatgttaaaatgtgttgtctatttaataagttaattaaaatgcagatcaaagcaccaccatttgctttttccacagatcattaacatttccttaaagtatgtaagtacctttgcaaatgcaaatgtactagtaattttcacttaagcttttgagaccgaattccattccaccagttatcacttagccactgtaatttaaaaacaaacaaacaaacaaaaactgtcttggtagaggtcgttaattagactcaacatgtactgcctttttgcagtctattatgacagtgtcttttagcacaaataatagagctaaaaaatgtcctgtcacttccattataagaaatctggattcatatctaagtgtatattataatactgtacagttaagagttcagaacaagtggtaatgttttctcttaatttaactcattttgtgccttctttactcattcaaacacacatacattttacatatagtttatttctttatgaaatgctaatcttcagcccgtaccaaaaagtagagtggagcctctttgcactactactatcaataaattttaaatcagttggatttttaagcattttttaaaagctgacattaaagtaaatctaaaaaaagtttaacaaactggccaagacactaatttttatgtataatcacaatattttatactcacctttattgactaaaaataattatgctacatgttgtcctgcatcagaagaattatttcttcttgccagtgttttgggatttgaagataatggttcactcaaagaacctattattttctctactgaggaacccaatgtagaacttgcactgatatttttattactgcctttatatgaatctataggtatctaaatgttaaggcatgtatgatctttgatcatttcttttttcaaattaaagttgtataaaagtttcaatatcttgccttaaattagttgcctattctttctaggattcaaatattgtgacatttaaaaaagaaaacattcacttttgaaacttagacttcagatcaaaaaggactgaacccccactatcataatccatacattcatttccatgttgtttgactagcagtgcatatatgaatgaatatggtaattaatcttacctataagaaccaaatactttaattatattaagatagtgaataaagatgtataatatttttattaataccttgaatatattcagtggattgaatgtgacttcataactgtactacgattgtattaaaatatttctggaataaaa

SEQ ID NO: 306528 - DNA, 8374 bp, Homo sapiens
cgtgctgcgcttggctggctgtggagtcggccgaagctttcggcggcggctgagccagctgaggggaaaaatggctcggactgtggcggcttcggcggctcaggttgtggtagaggcggaggctcaggcagcttgaggccttgctattttggaagctacaagaaaaaaatagaggaaggaaggtttggtctttttagtggacatggctcagatatctagcaacagcggatttaaagaatgtccatcttcacatccggaaccaacaagagcaaaagatgtggacaaagaagaagcattacagatggaagcagaggctttagcaaaactgcaaaaggatagacaagtgactgacaatcagagaggctttgagttgtcaagcagcaccagaaaaaaagcacaggtttataacaagcaggattatgatctcatggtgtttcctgaatcagattcccaaaaaagagcattagatattgatgtagaaaagctcacccaagctgaacttgagaaactattgctggatgacagtttcgagactaaaaaaacacctgtattaccagttactcctattctgagcccttccttttcagcacagctctattttagacctactattcagagaggacagtggccacctggattacctgggccttccacttatgctttaccttctatttatccttctacttacagtaaacaggctgcattccaaaatggcttcaatccaagaatgcccacttttccatctacagaacctatatatttaagtcttccgggacaatctccatatttctcatatcctttgacacctgccacaccctttcatccacaaggaagcttacctatctatcgtccagtagtcagtactgacatggcaaaactatttgacaaaatagctagtacatcagaatttttaaaaaatgggaaagcaaggactgatttggagataacagattcaaaagtcagcaatctacaggtatctccaaagtctgaggatatcagtaaatttgactggttagacttggatcctctaagtaagcctaaggtggataatgtggaggtattagaccatgaggaagagaaaaatgtttcaagtttgctagcaaaggatccttgggatgctgttcttcttgaagagagatcgacagcaaattgtcatcttgaaagaaaggtgaatggaaaatccctttctgtggcaactgttacaagaagccagtctttaaatattcgaacaactcagcttgcaaaagcccagggccatatatctcagaaagacccaaatgggaccagtagtttgccaactggaagttctcttcttcaagaagttgaagtacagaatgaggagatggcagctttttgtcgatccattacaaaattgaagaccaaatttccatataccaatcaccgcacaaacccaggctatttgttaagtccagtcacagcgcaaagaaacatatgcggagaaaatgctagtgtgaaggtctccattgacattgaaggatttcagctaccagttacttttacgtgtgatgtgagttctactgtagaaatcattataatgcaagccctttgctgggtacatgatgacttgaatcaagtagatgttggcagctatgttctaaaagtttgtggtcaagaggaagtgctgcagaataatcattgccttggaagtcatgagcatattcaaaactgtcgaaaatgggacacagaaattagactacaactcttgaccttcagtgcaatgtgtcaaaatctggcccgaacagcagaagatgatgaaacacccgtggatttaaacaaacacctgtatcaaatagaaaaaccttgcaaagaagccatgacgagacaccctgttgaagaactcttagattcttatcacaaccaagtagaactggctcttcaaattgaaaaccaacaccgagcagtagatcaagtaattaaagctgtaagaaaaatctgtagtgctttagatggtgtcgagactcttgccattacagaatcagtaaagaagctaaagagagcagttaatcttccaaggagtaaaactgctgatgtgacttctttgtttggaggagaagacactagcaggagttcaactaggggctcacttaatcctgaaaatcctgttcaagtaagcataaaccaattaactgcagcaatttatgatcttctcagactccatgcaaattctggtaggagtcctacagactgtgcccaaagtagcaagagtgtcaaggaagcatggactacaacagagcagctccagtttactatttttgctgctcatggaatttcaagtaattgggtatcaaattatgaaaaatactacttgatatgttcactgtctcacaatggaaaggatctttttaaacctattcaatcaaagaaggttggcacttacaagaatttcttctatcttattaaatgggatgaactaatcatttttcctatccagatatcacaattgccattagaatcagttcttcaccttactctttttggaattttaaatcagagcagtggaagttcccctgattctaataagcagagaaagggaccagaagctttgggcaaagtttctttacctctttgtgactttagacggtttttaacatgtggaactaaacttctatatctttggacttcatcacatacaaattctgttcctggaacagttaccaaaaaaggatatgtcatggaaagaatagtgctacaggttgattttccttctcctgcatttgatattatttatacaactcctcaagttgacagaagcattatacagcaacataacttagaaacactagagaatgatataaaagggaaacttcttgatattcttcataaagactcatcacttggactttctaaagaagataaagcttttttatgggagaaacgttattattgcttcaaacacccaaattgtcttcctaaaatattagcaagcgccccaaactggaaatggggtaatcttgccaaaacttactcattgcttcaccagtggcctgcattgtacccactaattgcattggaacttcttgattcaaaatttgctgatcaggaagtaagatccctagctgtgacctggattgaggccattagtgatgatgagctaacagatcttcttccacagtttgtacaagctttgaaatatgaaatttacttgaatagttcattagtgcaattccttttgtccagggcattgggaaatatccagatagcacacaatttatattggcttctcaaagatgccctgcatgatgtacagtttagtacccgatacgaacatgttttgggtgctctcctgtcagtaggaggaaaacgacttagagaagaacttctaaaacagacgaaacttgtacagcttttaggaggagtagcagaaaaagtaaggcaggctagtggatcagccagacaggttgttctccaaagaagtatggaacgagtacagtccttttttcagaaaaataaatgccgtctccctctcaagccaagtctagtggcaaaagaattaaatattaagtcgtgttccttcttcagttctaatgctgtccccctaaaagtcacaatggtgaatgctgaccctatgggagaagaaattaatgtcatgtttaaggttggtgaagatcttcggcaagatatgttagctttacagatgataaagattatggataagatctggcttaaagaaggactagatctgaggatggtaattttcaaatgtctctcaactggcagagatcgaggcatggtggagctggttcctgcttccgataccctcaggaaaatccaagtggaatatggtgtgacaggatcctttaaagataaaccacttgcagagtggctaaggaaatacaatccctctgaagaagaatatgaaaaggcttcagagaactttatctattcctgtgctggatgctgtgtagccacctatgttttaggcatctgtgatcgacacaatgacaatataatgcttcgaagcacgggacacatgtttcacattgactttggaaagtttttgggacatgcacagatgtttggcagcttcaaaagggatcgggctccttttgtgctgacctctgatatggcatatgtcattaatgggggtgaaaagcccaccattcgttttcagttgtttgtggacctctgctgtcaggcctacaacttgataagaaagcagacaaacctttttcttaacctcctttcactgatgattccttcagggttaccagaacttacaagtattcaagatttgaaatacgttagagatgcacttcaaccccaaactacagacgcagaagctacaattttctttactaggcttattgaatcaagtttgggaagcattgccacaaagtttaacttcttcattcacaaccttgctcagcttcgtttttctggtcttccttctaatgatgagcccatcctttcattttcacctaaaacatactcctttagacaagatggtcgaatcaaggaagtctctgtttttacatatcataagaaatacaacccagataaacattatatttatgtagtccgaattttgagggaaggacagattgaaccatcatttgtcttccgaacatttgacgaatttcaggaacttcacaataagctcagtattatttttccactttggaagttaccaggctttcctaataggatggttctaggaagaacacacataaaagatgtagcagccaaaaggaaaattgagttaaacagttacttacagagtttgatgaatgcttcaacggatgtagcagagtgtgatcttgtttgtactttcttccaccctttacttcgtgatgagaaagctgaagggatagctaggtctgcagatgcaggttccttcagtcctactccaggccaaataggaggagctgtgaaattatccatctcttaccgaaatggtactcttttcatcatggtgatgcatatcaaagatcttgttactgaagatggagctgacccaaatccatatgtcaaaacatacctacttccagataaccacaaaacatccaaacgtaaaaccaaaatttcacgaaaaacgaggaatccgacattcaatgaaatgcttgtatacagtggatatagcaaagaaaccctaagacagcgagaacttcaactaagtgtactcagtgcagaatctctgcgggagaattttttcttgggtggagtaaccctgcctttgaaagatttcaacttgagcaaagagacggttaaatggtatcagctgactgcggcaacatacttgtaaactagtgaatgtctgagctttggaagcatgaacagttataaacgtgcatgcatacatgcacacacacacagacacacacacacacacttgttaattttgtatagtatttttatacttggacagaacttataaagttaaatatacttgctgcatttcaacacatctgttggaccaacagtcacataactaacctttttgaatttttggaagccattgctgttttaaagtcattatgtagaatgctacaaaccctaaacttaatatatactaattcctgaaaaagactttgagacagtactatgtcagttcagccacctattttgcattgttttctataaggaggcaaagcatatgtgttttcctgttatgcaccttttatagcctttaccactgtgtaatgttcacaaacaccaaagtaaaggaaaaatgcaggatgttaccgtaaaatccagctgctattcatggagctgaaaaacaaagcacaaataatagatagctaagttaagaactactaagtagtttatagaagtagggaaaaacgtaatactgctttttattcatgtctttaaagcctttttcagaataagtgccaatcactgatgttgtaaataatggtgccttaactttatatgcttccctggcacttcgtttctgatttttttcctgatttgataaataattagtacatagttttcactcacttgcagcttactaaagacaagaaattatgtacatgtactaatgtttttcccacaaaaaaatcctttacttctgatgtatgaattagttatctaaatagttaagcctaatacctgaataagactcaccaatgtgattgtacaataaattctatcattccattaaaatcctacatttattcccaggaatggtaatttcacctccctacatctatactccactccctcagtaaataagtgaaaattgttaacccatgtgcccattcctgagtagggcagactcttcacaagaggcccatgacaagaattctagggtccagattgaactttaatatagacctttgtctgtgtagaccagtttgtcttgtaaactgtcttacttatgtgtgtaaacattttacattcacatgaattattctacagtaaccagtaagaataagattcggccgggcacggtggctcctgcctgtaatcccaacactttgggaggccaaggtgggcggatcacctgaggtcaggagtttgagaccagcctggccaacatggtgaaaccccgtctctacacaaaaattagccaggcgtggtagcgggcatctgtaatcccagctacttggggggctgaggcaggagaatcgcttgaacccaggaggcggaggttgcagtgagccgagatcacgccactgcactcccgcctgggtgacaagagcaaaactccatcttaaaaaaaaagaaaaaaagagtaagattcatttttattagttactcaacttcagacacaattttgttaatttggatatatacatatatataataagaactcatggttagaatagaaatacagatactttaaaaatggtaatagaaattgtaccaatcaggttgctgtgagaaaactgacaaaatatgcaataaagaataccaagagagaaaggacaatcgccaattcagtttcccagaacagaatttttatgaactgcacaaatgtttaatgtaaatggtgatacctacagggaagaaatagaagagttgataatatatcactgggacggggtgggggaaagacttgaaatttttggtgcctaacactaatggtccatatgtagttaaacccatgagtatggtatatgaatgtcttttttaaatgttaaaatgtgttgtctatttaataagttaattaaaatgcagatcaaagcaccaccatttgctttttccacagatcattaacatttccttaaagtatgtaagtacctttgcaaatgcaaatgtactagtaattttcacttaagcttttgagaccgaattccattccaccagttatcacttagccactgtaatttaaaaacaaacaaacaaacaaaaactgtcttggtagaggtcgttaattagactcaacatgtactgcctttttgcagtctattatgacagtgtcttttagcacaaataatagagctaaaaaatgtcctgtcacttccattataagaaatctggattcatatctaagtgtatattataatactgtacagttaagagttcagaacaagtggtaatgttttctcttaatttaactcattttgtgccttctttactcattcaaacacacatacattttacatatagtttatttctttatgaaatgctaatcttcagcccgtaccaaaaagtagagtggagcctctttgcactactactatcaataaattttaaatcagttggatttttaagcattttttaaaagctgacattaaagtaaatctaaaaaaagtttaacaaactggccaagacactaatttttatgtataatcacaatattttatactcacctttattgactaaaaataattatgctacatgttgtcctgcatcagaagaattatttcttcttgccagtgttttgggatttgaagataatggttcactcaaagaacctattattttctctactgaggaacccaatgtagaacttgcactgatatttttattactgcctttatatgaatctataggtatctaaatgttaaggcatgtatgatctttgatcatttcttttttcaaattaaagttgtataaaagtttcaatatcttgccttaaattagttgcctattctttctaggattcaaatattgtgacatttaaaaaagaaaacattcacttttgaaacttagacttcagatcaaaaaggactgaacccccactatcataatccatacattcatttccatgttgtttgactagcagtgcatatatgaatgaatatggtaattaatcttacctataagaaccaaatactttaattatattaagatagtgaataaagatgtataatatttttattaataccttgaatatattcagtggattgaatgtgacttcataactgtactacgattgtattaaaatatttctggaataaaa

SEQ ID NO: 306529 - DNA, 8765 bp, Homo sapiens
cgtgctgcgcttggctggctgtggagtcggccgaagctttcggcggcggctgagccagctgaggggaaaaatggctcggactgtggcggcttcggcggctcaggttgtggtagaggcggaggctcaggcagcttgaggccttgctattttggaagctacaagaaaaaaatagaggaaggaaggtttggtctttttagtggacatggctcagatatctagcaacagcggatttaaagaatgtccatcttcacatccggaaccaacaagagcaaaagatgtggacaaagaagaagcattacagatggaagcagaggctttagcaaaactgcaaaaggatagacaagtgactgacaatcagagaggctttgagttgtcaagcagcaccagaaaaaaagcacaggtttataacaagcaggattatgatctcatggtgtttcctgaatcagattcccaaaaaagagcattagatattgatgtagaaaagctcacccaagctgaacttgagaaactattgctggatgacagtttcgagactaaaaaaacacctgtattaccagttactcctattctgagcccttccttttcagcacagctctattttagacctactattcagagaggacagtggccacctggattacctgggccttccacttatgctttaccttctatttatccttctacttacagtaaacaggctgcattccaaaatggcttcaatccaagaatgcccacttttccatctacagaacctatatatttaagtcttccgggacaatctccatatttctcatatcctttgacacctgccacaccctttcatccacaaggaagcttacctatctatcgtccagtagtcagtactgacatggcaaaactatttgacaaaatagctagtacatcagaatttttaaaaaatgggaaagcaaggactgatttggagataacagattcaaaagtcagcaatctacaggtatctccaaagtctgaggatatcagtaaatttgactggttagacttggatcctctaagtaagcctaaggtggataatgtggaggtattagaccatgaggaagagaaaaatgtttcaagtttgctagcaaaggatccttgggatgctgttcttcttgaagagagatcgacagcaaattgtcatcttgaaagaaaggtgaatggaaaatccctttctgtggcaactgttacaagaagccagtctttaaatattcgaacaactcagcttgcaaaagcccagggccatatatctcagaaagacccaaatgggaccagtagtttgccaactggaagttctcttcttcaagaagttgaagtacagaatgaggagatggcagctttttgtcgatccattacaaaattgaagaccaaatttccatataccaatcaccgcacaaacccaggctatttgttaagtccagtcacagcgcaaagaaacatatgcggagaaaatgctagtgtgaaggtctccattgacattgaaggatttcagctaccagttacttttacgtgtgatgtgagttctactgtagaaatcattataatgcaagccctttgctgggtacatgatgacttgaatcaagtagatgttggcagctatgttctaaaagtttgtggtcaagaggaagtgctgcagaataatcattgccttggaagtcatgagcatattcaaaactgtcgaaaatgggacacagaaattagactacaactcttgaccttcagtgcaatgtgtcaaaatctggcccgaacagcagaagatgatgaaacacccgtggatttaaacaaacacctgtatcaaatagaaaaaccttgcaaagaagccatgacgagacaccctgttgaagaactcttagattcttatcacaaccaagtagaactggctcttcaaattgaaaaccaacaccgagcagtagatcaagtaattaaagctgtaagaaaaatctgtagtgctttagatggtgtcgagactcttgccattacagaatcagtaaagaagctaaagagagcagttaatcttccaaggagtaaaactgctgatgtgacttctttgtttggaggagaagacactagcaggagttcaactaggggctcacttaatcctgaaaatcctgttcaagtaagcataaaccaattaactgcagcaatttatgatcttctcagactccatgcaaattctggtaggagtcctacagactgtgcccaaagtagcaagagtgtcaaggaagcatggactacaacagagcagctccagtttactatttttgctgctcatggaatttcaagtaattgggtatcaaattatgaaaaatactacttgatatgttcactgtctcacaatggaaaggatctttttaaacctattcaatcaaagaaggttggcacttacaagaatttcttctatcttattaaatgggatgaactaatcatttttcctatccagatatcacaattgccattagaatcagttcttcaccttactctttttggaattttaaatcagagcagtggaagttcccctgattctaataagcagagaaagggaccagaagctttgggcaaagtttctttacctctttgtgactttagacggtttttaacatgtggaactaaacttctatatctttggacttcatcacatacaaattctgttcctggaacagttaccaaaaaaggatatgtcatggaaagaatagtgctacaggttgattttccttctcctgcatttgatattatttatacaactcctcaagttgacagaagcattatacagcaacataacttagaaacactagagaatgatataaaagggaaacttcttgatattcttcataaagactcatcacttggactttctaaagaagataaagcttttttatgggagaaacgttattattgcttcaaacacccaaattgtcttcctaaaatattagcaagcgccccaaactggaaatggggtaatcttgccaaaacttactcattgcttcaccagtggcctgcattgtacccactaattgcattggaacttcttgattcaaaatttgctgatcaggaagtaagatccctagctgtgacctggattgaggccattagtgatgatgagctaacagatcttcttccacagtttgtacaagctttgaaatatgaaatttacttgaatagttcattagtgcaattccttttgtccagggcattgggaaatatccagatagcacacaatttatattggcttctcaaagatgccctgcatgatgtacagtttagtacccgatacgaacatgttttgggtgctctcctgtcagtaggaggaaaacgacttagagaagaacttctaaaacagacgaaacttgtacagcttttaggaggagtagcagaaaaagtaaggcaggctagtggatcagccagacaggttgttctccaaagaagtatggaacgagtacagtccttttttcagaaaaataaatgccgtctccctctcaagccaagtctagtggcaaaagaattaaatattaagtcgtgttccttcttcagttctaatgctgtccccctaaaagtcacaatggtgaatgctgaccctatgggagaagaaattaatgtcatgtttaaggttggtgaagatcttcggcaagatatgttagctttacagatgataaagattatggataagatctggcttaaagaaggactagatctgaggatggtaattttcaaatgtctctcaactggcagagatcgaggcatggtggagctggttcctgcttccgataccctcaggaaaatccaagtggaatatggtgtgacaggatcctttaaagataaaccacttgcagagtggctaaggaaatacaatccctctgaagaagaatatgaaaaggcttcagagaactttatctattcctgtgctggatgctgtgtagccacctatgttttaggcatctgtgatcgacacaatgacaatataatgcttcgaagcacgggacacatgtttcacattgactttggaaagtttttgggacatgcacagatgtttggcagcttcaaaagggatcgggctccttttgtgctgacctctgatatggcatatgtcattaatgggggtgaaaagcccaccattcgttttcagttgtttgtggacctctgctgtcaggcctacaacttgataagaaagcagacaaacctttttcttaacctcctttcactgatgattccttcagggttaccagaacttacaagtattcaagatttgaaatacgttagagatgcacttcaaccccaaactacagacgcagaagctacaattttctttactaggcttattgaatcaagtttgggaagcattgccacaaagtttaacttcttcattcacaaccttgctcagcttcgtttttctggtcttccttctaatgatgagcccatcctttcattttcacctaaaacatactcctttagacaagatggtcgaatcaaggaagtctctgtttttacatatcataagaaatacaacccagataaacattatatttatgtagtccgaattttgagggaaggacagattgaaccatcatttgtcttccgaacatttgacgaatttcaggaacttcacaataagctcagtattatttttccactttggaagttaccaggctttcctaataggatggttctaggaagaacacacataaaagatgtagcagccaaaaggaaaattgagttaaacagttacttacagagtttgatgaatgcttcaacggatgtagcagagtgtgatcttgtttgtactttcttccaccctttacttcgtgatgagaaagctgaagggatagctaggtctgcagatgcaggttccttcagtcctactccaggccaaataggaggagctgtgaaattatccatctcttaccgaaatggtactcttttcatcatggtgatgcatatcaaagatcttgttactgaagatggagctgacccaaatccatatgtcaaaacatacctacttccagataaccacaaaacatccaaacgtaaaaccaaaatttcacgaaaaacgaggaatccgacattcaatgaaatgcttgtatacagtggatatagcaaagaaaccctaagacagcgagaacttcaactaagtgtactcagtgcagaatctctgcgggagaattttttcttgggtggagtaaccctgcctttgaaagatttcaacttgagcaaagagacggttaaatggtatcagctgactgcggcaacatacttgtaaactagtgaatgtctgagctttggaagcatgaacagttataaacgtgcatgcatacatgcacacacacacagacacacacacacacacttgttaattttgtatagtatttttatacttggacagaacttataaagttaaatatacttgctgcatttcaacacatctgttggaccaacagtcacataactaacctttttgaatttttggaagccattgctgttttaaagtcattatgtagaatgctacaaaccctaaacttaatatatactaattcctgaaaaagactttgagacagtactatgtcagttcagccacctattttgcattgttttctataaggaggcaaagcatatgtgttttcctgttatgcaccttttatagcctttaccactgtgtaatgttcacaaacaccaaagtaaaggaaaaatgcaggatgttaccgtaaaatccagctgctattcatggagctgaaaaacaaagcacaaataatagatagctaagttaagaactactaagtagtttatagaagtagggaaaaacgtaatactgctttttattcatgtctttaaagcctttttcagaataagtgccaatcactgatgttgtaaataatggtgccttaactttatatgcttccctggcacttcgtttctgatttttttcctgatttgataaataattagtacatagttttcactcacttgcagcttactaaagacaagaaattatgtacatgtactaatgtttttcccacaaaaaaatcctttacttctgatgtatgaattagttatctaaatagttaagcctaatacctgaataagactcaccaatgtgattgtacaataaattctatcattccattaaaatcctacatttattcccaggaatggtaatttcacctccctacatctatactccactccctcagtaaataagtgaaaattgttaacccatgtgcccattcctgagtagggcagactcttcacaagaggcccatgacaagaattctagggtccagattgaactttaatatagacctttgtctgtgtagaccagtttgtcttgtaaactgtcttacttatgtgtgtaaacattttacattcacatgaaaagttattttcctttatataattggattcagaatcataagggacaggactgaaattattctacagtaaccagtaagaataagattcggccgggcacggtggctcctgcctgtaatcccaacactttgggaggccaaggtgggcggatcacctgaggtcaggagtttgagaccagcctggccaacatggtgaaaccccgtctctacacaaaaattagccaggcgtggtagcgggcatctgtaatcccagctacttggggggctgaggcaggagaatcgcttgaacccaggaggcggaggttgcagtgagccgagatcacgccactgcactcccgcctgggtgacaagagcaaaactccatcttaaaaaaaaagaaaaaaagagtaagattcatttttattagttactcaacttcagacacaattttgttaatttggatatatacatatatataataagaactcatggttagaatagaaatacagatactttaaaaatggtaatagaaattgtaccaatcaggttgctgtgagaaaactgacaaaatatgcaataaagaataccaagagagaaaggacaatcgccaattcagtttcccagaacagaatttttatgaactgcacaaatgtttaatgtaaatggtgatacctacagggaagaaatagaagagttgataatatatcactgggacggggtgggggaaagacttgaaatttttggtgcctaacactaatggtccatatgtagttaaacccatgagtatggtatatgaatgtcttttttaaatgttaaaatgtgttgtctatttaataagttaattaaaatgcagatcaaagcaccaccatttgctttttccacagatcattaacatttccttaaagtatgtaagtacctttgcaaatgcaaatgtactagtaattttcacttaagcttttgagaccgaattccattccaccagttatcacttagccactgtaatttaaaaacaaacaaacaaacaaaaactgtcttggtagaggtcgttaattagactcaacatgtactgcctttttgcagtctattatgacagtgtcttttagcacaaataatagagctaaaaaatgtcctgtcacttccattataagaaatctggattcatatctaagtgtatattataatactgtacagttaagagttcagaacaagtggtaatgttttctcttaatttaactcattttgtgccttctttactcattcaaacacacatacattttacatatagtttatttctttatgaaatgctaatcttcagcccgtaccaaaaagtagagtggagcctctttgcactactactatcaataaattttaaatcagttggatttttaagcattttttaaaagctgacattaaagtaaatctaaaaaaagtttaacaaactggccaagacactaatttttatgtataatcacaatattttatactcacctttattgactaaaaataattatgctacatgttgtcctgcatcagaagaattatttcttcttgccagtgttttgggatttgaagataatggttcactcaaagaacctattattttctctactgaggaacccaatgtagaacttgcactgatatttttattactgcctttatatgaatctataggtatctaaatgttaaggcatgtatgatctttgatcatttcttttttcaaattaaagttgtataaaagtttcaatatcttgccttaaattagttgcctattctttctaggattcaaatattgtgacatttaaaaaagaaaacattcacttttgaaacttagacttcagatcaaaaaggactgaacccccactatcataatccatacattcatttccatgttgtttgactagcagtgcatatatgaatgaatatggtaattaatcttacctataagaaccaaatactttaattatattaagatagtgaataaagatgtataatatttttattaataccttgaatatattcagtggattgaatgtgacttcataactgtactacgattgtattaaaatatttctggaataaaaaaaaaaaaaaaaaaaaaaaaaaaaaaaaaaaaaaaaaaaaaaaaaaaaaaaaaaaaaaaaacaacaagaataagagacacaaaaacacatgctgtgtgggcggcgcgccgcgtcggcccgcgcacaaaaaaaaaggtttggagaagacaaacaagtggagggggacgggcggagcgccccacaggagagaagataggaagcaagagacgagcaaaaaaagttggtgtgcgaacagaaaaaacacgggggagtaccataacaagggggcgggaactgaccacgacagagaaaaaaaaagcgccggcgggggagacaaaagacgggggtgggaaacaca

SEQ ID NO: 306530 - DNA, 8374 bp, Homo sapiens
cgtgctgcgcttggctggctgtggagtcggccgaagctttcggcggcggctgagccagctgaggggaaaaatggctcggactgtggcggcttcggcggctcaggttgtggtagaggcggaggctcaggcagcttgaggccttgctattttggaagctacaagaaaaaaatagaggaaggaaggtttggtctttttagtggacatggctcagatatctagcaacagcggatttaaagaatgtccatcttcacatccggaaccaacaagagcaaaagatgtggacaaagaagaagcattacagatggaagcagaggctttagcaaaactgcaaaaggatagacaagtgactgacaatcagagaggctttgagttgtcaagcagcaccagaaaaaaagcacaggtttataacaagcaggattatgatctcatggtgtttcctgaatcagattcccaaaaaagagcattagatattgatgtagaaaagctcacccaagctgaacttgagaaactattgctggatgacagtttcgagactaaaaaaacacctgtattaccagttactcctattctgagcccttccttttcagcacagctctattttagacctactattcagagaggacagtggccacctggattacctgggccttccacttatgctttaccttctatttatccttctacttacagtaaacaggctgcattccaaaatggcttcaatccaagaatgcccacttttccatctacagaacctatatatttaagtcttccgggacaatctccatatttctcatatcctttgacacctgccacaccctttcatccacaaggaagcttacctatctatcgtccagtagtcagtactgacatggcaaaactatttgacaaaatagctagtacatcagaatttttaaaaaatgggaaagcaaggactgatttggagataacagattcaaaagtcagcaatctacaggtatctccaaagtctgaggatatcagtaaatttgactggttagacttggatcctctaagtaagcctaaggtggataatgtggaggtattagaccatgaggaagagaaaaatgtttcaagtttgctagcaaaggatccttgggatgctgttcttcttgaagagagatcgacagcaaattgtcatcttgaaagaaaggtgaatggaaaatccctttctgtggcaactgttacaagaagccagtctttaaatattcgaacaactcagcttgcaaaagcccagggccatatatctcagaaagacccaaatgggaccagtagtttgccaactggaagttctcttcttcaagaagttgaagtacagaatgaggagatggcagctttttgtcgatccattacaaaattgaagaccaaatttccatataccaatcaccgcacaaacccaggctatttgttaagtccagtcacagcgcaaagaaacatatgcggagaaaatgctagtgtgaaggtctccattgacattgaaggatttcagctaccagttacttttacgtgtgatgtgagttctactgtagaaatcattataatgcaagccctttgctgggtacatgatgacttgaatcaagtagatgttggcagctatgttctaaaagtttgtggtcaagaggaagtgctgcagaataatcattgccttggaagtcatgagcatattcaaaactgtcgaaaatgggacacagaaattagactacaactcttgaccttcagtgcaatgtgtcaaaatctggcccgaacagcagaagatgatgaaacacccgtggatttaaacaaacacctgtatcaaatagaaaaaccttgcaaagaagccatgacgagacaccctgttgaagaactcttagattcttatcacaaccaagtagaactggctcttcaaattgaaaaccaacaccgagcagtagatcaagtaattaaagctgtaagaaaaatctgtagtgctttagatggtgtcgagactcttgccattacagaatcagtaaagaagctaaagagagcagttaatcttccaaggagtaaaactgctgatgtgacttctttgtttggaggagaagacactagcaggagttcaactaggggctcacttaatcctgaaaatcctgttcaagtaagcataaaccaattaactgcagcaatttatgatcttctcagactccatgcaaattctggtaggagtcctacagactgtgcccaaagtagcaagagtgtcaaggaagcatggactacaacagagcagctccagtttactatttttgctgctcatggaatttcaagtaattgggtatcaaattatgaaaaatactacttgatatgttcactgtctcacaatggaaaggatctttttaaacctattcaatcaaagaaggttggcacttacaagaatttcttctatcttattaaatgggatgaactaatcatttttcctatccagatatcacaattgccattagaatcagttcttcaccttactctttttggaattttaaatcagagcagtggaagttcccctgattctaataagcagagaaagggaccagaagctttgggcaaagtttctttacctctttgtgactttagacggtttttaacatgtggaactaaacttctatatctttggacttcatcacatacaaattctgttcctggaacagttaccaaaaaaggatatgtcatggaaagaatagtgctacaggttgattttccttctcctgcatttgatattatttatacaactcctcaagttgacagaagcattatacagcaacataacttagaaacactagagaatgatataaaagggaaacttcttgatattcttcataaagactcatcacttggactttctaaagaagataaagcttttttatgggagaaacgttattattgcttcaaacacccaaattgtcttcctaaaatattagcaagcgccccaaactggaaatggggtaatcttgccaaaacttactcattgcttcaccagtggcctgcattgtacccactaattgcattggaacttcttgattcaaaatttgctgatcaggaagtaagatccctagctgtgacctggattgaggccattagtgatgatgagctaacagatcttcttccacagtttgtacaagctttgaaatatgaaatttacttgaatagttcattagtgcaattccttttgtccagggcattgggaaatatccagatagcacacaatttatattggcttctcaaagatgccctgcatgatgtacagtttagtacccgatacgaacatgttttgggtgctctcctgtcagtaggaggaaaacgacttagagaagaacttctaaaacagacgaaacttgtacagcttttaggaggagtagcagaaaaagtaaggcaggctagtggatcagccagacaggttgttctccaaagaagtatggaacgagtacagtccttttttcagaaaaataaatgccgtctccctctcaagccaagtctagtggcaaaagaattaaatattaagtcgtgttccttcttcagttctaatgctgtccccctaaaagtcacaatggtgaatgctgaccctatgggagaagaaattaatgtcatgtttaaggttggtgaagatcttcggcaagatatgttagctttacagatgataaagattatggataagatctggcttaaagaaggactagatctgaggatggtaattttcaaatgtctctcaactggcagagatcgaggcatggtggagctggttcctgcttccgataccctcaggaaaatccaagtggaatatggtgtgacaggatcctttaaagataaaccacttgcagagtggctaaggaaatacaatccctctgaagaagaatatgaaaaggcttcagagaactttatctattcctgtgctggatgctgtgtagccacctatgttttaggcatctgtgatcgacacaatgacaatataatgcttcgaagcacgggacacatgtttcacattgactttggaaagtttttgggacatgcacagatgtttggcagcttcaaaagggatcgggctccttttgtgctgacctctgatatggcatatgtcattaatgggggtgaaaagcccaccattcgttttcagttgtttgtggacctctgctgtcaggcctacaacttgataagaaagcagacaaacctttttcttaacctcctttcactgatgattccttcagggttaccagaacttacaagtattcaagatttgaaatacgttagagatgcacttcaaccccaaactacagacgcagaagctacaattttctttactaggcttattgaatcaagtttgggaagcattgccacaaagtttaacttcttcattcacaaccttgctcagcttcgtttttctggtcttccttctaatgatgagcccatcctttcattttcacctaaaacatactcctttagacaagatggtcgaatcaaggaagtctctgtttttacatatcataagaaatacaacccagataaacattatatttatgtagtccgaattttgagggaaggacagattgaaccatcatttgtcttccgaacatttgacgaatttcaggaacttcacaataagctcagtattatttttccactttggaagttaccaggctttcctaataggatggttctaggaagaacacacataaaagatgtagcagccaaaaggaaaattgagttaaacagttacttacagagtttgatgaatgcttcaacggatgtagcagagtgtgatcttgtttgtactttcttccaccctttacttcgtgatgagaaagctgaagggatagctaggtctgcagatgcaggttccttcagtcctactccaggccaaataggaggagctgtgaaattatccatctcttaccgaaatggtactcttttcatcatggtgatgcatatcaaagatcttgttactgaagatggagctgacccaaatccatatgtcaaaacatacctacttccagataaccacaaaacatccaaacgtaaaaccaaaatttcacgaaaaaccctaagacagcgagaacttcaactaagtgtactcagtgcagaatctctgcgggagaattttttcttgggtggagtaaccctgcctttgaaagatttcaacttgagcaaagagacggttaaatggtatcagctgactgcggcaacatacttgtaaactagtgaatgtctgagctttggaagcatgaacagttataaacgtgcatgcatacatgcacacacacacagacacacacacacacacttgttaattttgtatagtatttttatacttggacagaacttataaagttaaatatacttgctgcatttcaacacatctgttggaccaacagtcacataactaacctttttgaatttttggaagccattgctgttttaaagtcattatgtagaatgctacaaaccctaaacttaatatatactaattcctgaaaaagactttgagacagtactatgtcagttcagccacctattttgcattgttttctataaggaggcaaagcatatgtgttttcctgttatgcaccttttatagcctttaccactgtgtaatgttcacaaacaccaaagtaaaggaaaaatgcaggatgttaccgtaaaatccagctgctattcatggagctgaaaaacaaagcacaaataatagatagctaagttaagaactactaagtagtttatagaagtagggaaaaacgtaatactgctttttattcatgtctttaaagcctttttcagaataagtgccaatcactgatgttgtaaataatggtgccttaactttatatgcttccctggcacttcgtttctgatttttttcctgatttgataaataattagtacatagttttcactcacttgcagcttactaaagacaagaaattatgtacatgtactaatgtttttcccacaaaaaaatcctttacttctgatgtatgaattagttatctaaatagttaagcctaatacctgaataagactcaccaatgtgattgtacaataaattctatcattccattaaaatcctacatttattcccaggaatggtaatttcacctccctacatctatactccactccctcagtaaataagtgaaaattgttaacccatgtgcccattcctgagtagggcagactcttcacaagaggcccatgacaagaattctagggtccagattgaactttaatatagacctttgtctgtgtagaccagtttgtcttgtaaactgtcttacttatgtgtgtaaacattttacattcacatgaaaagttattttcctttatataattggattcagaatcataagggacaggactgaaattattctacagtaaccagtaagaataagattcggccgggcacggtggctcctgcctgtaatcccaacactttgggaggccaaggtgggcggatcacctgaggtcaggagtttgagaccagcctggccaacatggtgaaaccccgtctctacacaaaaattagccaggcgtggtagcgggcatctgtaatcccagctacttggggggctgaggcaggagaatcgcttgaacccaggaggcggaggttgcagtgagccgagatcacgccactgcactcccgcctgggtgacaagagcaaaactccatcttaaaaaaaaagaaaaaaagagtaagattcatttttattagttactcaacttcagacacaattttgttaatttggatatatacatatatataataagaactcatggttagaatagaaatacagatactttaaaaatggtaatagaaattgtaccaatcaggttgctgtgagaaaactgacaaaatatgcaataaagaataccaagagagaaaggacaatcgccaattcagtttcccagaacagaatttttatgaactgcacaaatgtttaatgtaaatggtgatacctacagggaagaaatagaagagttgataatatatcactgggacggggtgggggaaagacttgaaatttttggtgcctaacactaatggtccatatgtagttaaacccatgagtatggtatatgaatgtcttttttaaatgttaaaatgtgttgtctatttaataagttaattaaaatgcagatcaaagcaccaccatttgctttttccacagatcattaacatttccttaaagtatgtaagtacctttgcaaatgcaaatgtactagtaattttcacttaagcttttgagaccgaattccattccaccagttatcacttagccactgtaatttaaaaacaaacaaacaaacaaaaactgtcttggtagaggtcgttaattagactcaacatgtactgcctttttgcagtctattatgacagtgtcttttagcacaaataatagagctaaaaaatgtcctgtcacttccattataagaaatctggattcatatctaagtgtatattataatactgtacagttaagagttcagaacaagtggtaatgttttctcttaatttaactcattttgtgccttctttactcattcaaacacacatacattttacatatagtttatttctttatgaaatgctaatcttcagcccgtaccaaaaagtagagtggagcctctttgcactactactatcaataaattttaaatcagttggatttttaagcattttttaaaagctgacattaaagtaaatctaaaaaaagtttaacaaactggccaagacactaatttttatgtataatcacaatattttatactcacctttattgactaaaaataattatgctacatgttgtcctgcatcagaagaattatttcttcttgccagtgttttgggatttgaagataatggttcactcaaagaacctattattttctctactgaggaacccaatgtagaacttgcactgatatttttattactgcctttatatgaatctataggtatctaaatgttaaggcatgtatgatctttgatcatttcttttttcaaattaaagttgtataaaagtttcaatatcttgccttaaattagttgcctattctttctaggattcaaatattgtgacatttaaaaaagaaaacattcacttttgaaacttagacttcagatcaaaaaggactgaacccccactatcataatccatacattcatttccatgttgtttgactagcagtgcatatatgaatgaatatggtaattaatcttacctataagaaccaaatactttaattatattaagatagtgaataaagatgtataatatttttattaataccttgaatatattcagtggattgaatgtgacttcataactgtactacgattgtattaaaatatttctggaataaaa

SEQ ID NO: 306531 - DNA, 6920 bp, Homo sapiens
ttaaatgctcagacttgattttaaaactgtctctgtttcaccattctcttcaatttctgatgcaggtgcaatttaaattttaccctcacctttataatttctaatttgaatagaatagtgaataattaatatatcttaacagtaatcattgccttggaagtcatgagcatattcaaaactgtcgaaaatgggacacagaaattagactacaactcttgaccttcagtgcaatgtgtcaaaatctggcccgaacagcagaagatgatgaaacacccgtggatttaaacaaacacctgtatcaaatagaaaaaccttgcaaagaagccatgacgagacaccctgttgaagaactcttagattcttatcacaaccaagtagaactggctcttcaaattgaaaaccaacaccgagcagtagatcaagtaattaaagctgtaagaaaaatctgtagtgctttagatggtgtcgagactcttgccattacagaatcagtaaagaagctaaagagagcagttaatcttccaaggagtaaaactgctgatgtgacttctttgtttggaggagaagacactagcaggagttcaactaggggctcacttaatcctgaaaatcctgttcaagtaagcataaaccaattaactgcagcaatttatgatcttctcagactccatgcaaattctggtaggagtcctacagactgtgcccaaagtagcaagagtgtcaaggaagcatggactacaacagagcagctccagtttactatttttgctgctcatggaatttcaagtaattgggtatcaaattatgaaaaatactacttgatatgttcactgtctcacaatggaaaggatctttttaaacctattcaatcaaagaaggttggcacttacaagaatttcttctatcttattaaatgggatgaactaatcatttttcctatccagatatcacaattgccattagaatcagttcttcaccttactctttttggaattttaaatcagagcagtggaagttcccctgattctaataagcagagaaagggaccagaagctttgggcaaagtttctttacctctttgtgactttagacggtttttaacatgtggaactaaacttctatatctttggacttcatcacatacaaattctgttcctggaacagttaccaaaaaaggatatgtcatggaaagaatagtgctacaggttgattttccttctcctgcatttgatattatttatacaactcctcaagttgacagaagcattatacagcaacataacttagaaacactagagaatgatataaaagggaaacttcttgatattcttcataaagactcatcacttggactttctaaagaagataaagcttttttatgggagaaacgttattattgcttcaaacacccaaattgtcttcctaaaatattagcaagcgccccaaactggaaatggggtaatcttgccaaaacttactcattgcttcaccagtggcctgcattgtacccactaattgcattggaacttcttgattcaaaatttgctgatcaggaagtaagatccctagctgtgacctggattgaggccattagtgatgatgagctaacagatcttcttccacagtttgtacaagctttgaaatatgaaatttacttgaatagttcattagtgcaattccttttgtccagggcattgggaaatatccagatagcacacaatttatattggcttctcaaagatgccctgcatgatgtacagtttagtacccgatacgaacatgttttgggtgctctcctgtcagtaggaggaaaacgacttagagaagaacttctaaaacagacgaaacttgtacagcttttaggaggagtagcagaaaaagtaaggcaggctagtggatcagccagacaggttgttctccaaagaagtatggaacgagtacagtccttttttcagaaaaataaatgccgtctccctctcaagccaagtctagtggcaaaagaattaaatattaagtcgtgttccttcttcagttctaatgctgtccccctaaaagtcacaatggtgaatgctgaccctatgggagaagaaattaatgtcatgtttaaggttggtgaagatcttcggcaagatatgttagctttacagatgataaagattatggataagatctggcttaaagaaggactagatctgaggatggtaattttcaaatgtctctcaactggcagagatcgaggcatggtggagctggttcctgcttccgataccctcaggaaaatccaagtggaatatggtgtgacaggatcctttaaagataaaccacttgcagagtggctaaggaaatacaatccctctgaagaagaatatgaaaaggcttcagagaactttatctattcctgtgctggatgctgtgtagccacctatgttttaggcatctgtgatcgacacaatgacaatataatgcttcgaagcacgggacacatgtttcacattgactttggaaagtttttgggacatgcacagatgtttggcagcttcaaaagggatcgggctccttttgtgctgacctctgatatggcatatgtcattaatgggggtgaaaagcccaccattcgttttcagttgtttgtggacctctgctgtcaggcctacaacttgataagaaagcagacaaacctttttcttaacctcctttcactgatgattccttcagggttaccagaacttacaagtattcaagatttgaaatacgttagagatgcacttcaaccccaaactacagacgcagaagctacaattttctttactaggcttattgaatcaagtttgggaagcattgccacaaagtttaacttcttcattcacaaccttgctcagcttcgtttttctggtcttccttctaatgatgagcccatcctttcattttcacctaaaacatactcctttagacaagatggtcgaatcaaggaagtctctgtttttacatatcataagaaatacaacccagataaacattatatttatgtagtccgaattttgagggaaggacagattgaaccatcatttgtcttccgaacatttgacgaatttcaggaacttcacaataagctcagtattatttttccactttggaagttaccaggctttcctaataggatggttctaggaagaacacacataaaagatgtagcagccaaaaggaaaattgagttaaacagttacttacagagtttgatgaatgcttcaacggatgtagcagagtgtgatcttgtttgtactttcttccaccctttacttcgtgatgagaaagctgaagggatagctaggtctgcagatgcaggttccttcagtcctactccaggccaaataggaggagctgtgaaattatccatctcttaccgaaatggtactcttttcatcatggtgatgcatatcaaagatcttgttactgaagatggagctgacccaaatccatatgtcaaaacatacctacttccagataaccacaaaacatccaaacgtaaaaccaaaatttcacgaaaaacgaggaatccgacattcaatgaaatgcttgtatacagtggatatagcaaagaaaccctaagacagcgagaacttcaactaagtgtactcagtgcagaatctctgcgggagaattttttcttgggtggagtaaccctgcctttgaaagatttcaacttgagcaaagagacggttaaatggtatcagctgactgcggcaacatacttgtaaactagtgaatgtctgagctttggaagcatgaacagttataaacgtgcatgcatacatgcacacacacacagacacacacacacacacttgttaattttgtatagtatttttatacttggacagaacttataaagttaaatatacttgctgcatttcaacacatctgttggaccaacagtcacataactaacctttttgaatttttggaagccattgctgttttaaagtcattatgtagaatgctacaaaccctaaacttaatatatactaattcctgaaaaagactttgagacagtactatgtcagttcagccacctattttgcattgttttctataaggaggcaaagcatatgtgttttcctgttatgcaccttttatagcctttaccactgtgtaatgttcacaaacaccaaagtaaaggaaaaatgcaggatgttaccgtaaaatccagctgctattcatggagctgaaaaacaaagcacaaataatagatagctaagttaagaactactaagtagtttatagaagtagggaaaaacgtaatactgctttttattcatgtctttaaagcctttttcagaataagtgccaatcactgatgttgtaaataatggtgccttaactttatatgcttccctggcacttcgtttctgatttttttcctgatttgataaataattagtacatagttttcactcacttgcagcttactaaagacaagaaattatgtacatgtactaatgtttttcccacaaaaaaatcctttacttctgatgtatgaattagttatctaaatagttaagcctaatacctgaataagactcaccaatgtgattgtacaataaattctatcattccattaaaatcctacatttattcccaggaatggtaatttcacctccctacatctatactccactccctcagtaaataagtgaaaattgttaacccatgtgcccattcctgagtagggcagactcttcacaagaggcccatgacaagaattctagggtccagattgaactttaatatagacctttgtctgtgtagaccagtttgtcttgtaaactgtcttacttatgtgtgtaaacattttacattcacatgaaaagttattttcctttatataattggattcagaatcataagggacaggactgaaattattctacagtaaccagtaagaataagattcggccgggcacggtggctcctgcctgtaatcccaacactttgggaggccaaggtgggcggatcacctgaggtcaggagtttgagaccagcctggccaacatggtgaaaccccgtctctacacaaaaattagccaggcgtggtagcgggcatctgtaatcccagctacttggggggctgaggcaggagaatcgcttgaacccaggaggcggaggttgcagtgagccgagatcacgccactgcactcccgcctgggtgacaagagcaaaactccatcttaaaaaaaaagaaaaaaagagtaagattcatttttattagttactcaacttcagacacaattttgttaatttggatatatacatatatataataagaactcatggttagaatagaaatacagatactttaaaaatggtaatagaaattgtaccaatcaggttgctgtgagaaaactgacaaaatatgcaataaagaataccaagagagaaaggacaatcgccaattcagtttcccagaacagaatttttatgaactgcacaaatgtttaatgtaaatggtgatacctacagggaagaaatagaagagttgataatatatcactgggacggggtgggggaaagacttgaaatttttggtgcctaacactaatggtccatatgtagttaaacccatgagtatggtatatgaatgtcttttttaaatgttaaaatgtgttgtctatttaataagttaattaaaatgcagatcaaagcaccaccatttgctttttccacagatcattaacatttccttaaagtatgtaagtacctttgcaaatgcaaatgtactagtaattttcacttaagcttttgagaccgaattccattccaccagttatcacttagccactgtaatttaaaaacaaacaaacaaacaaaaactgtcttggtagaggtcgttaattagactcaacatgtactgcctttttgcagtctattatgacagtgtcttttagcacaaataatagagctaaaaaatgtcctgtcacttccattataagaaatctggattcatatctaagtgtatattataatactgtacagttaagagttcagaacaagtggtaatgttttctcttaatttaactcattttgtgccttctttactcattcaaacacacatacattttacatatagtttatttctttatgaaatgctaatcttcagcccgtaccaaaaagtagagtggagcctctttgcactactactatcaataaattttaaatcagttggatttttaagcattttttaaaagctgacattaaagtaaatctaaaaaaagtttaacaaactggccaagacactaatttttatgtataatcacaatattttatactcacctttattgactaaaaataattatgctacatgttgtcctgcatcagaagaattatttcttcttgccagtgttttgggatttgaagataatggttcactcaaagaacctattattttctctactgaggaacccaatgtagaacttgcactgatatttttattactgcctttatatgaatctataggtatctaaatgttaaggcatgtatgatctttgatcatttcttttttcaaattaaagttgtataaaagtttcaatatcttgccttaaattagttgcctattctttctaggattcaaatattgtgacatttaaaaaagaaaacattcacttttgaaacttagacttcagatcaaaaaggactgaacccccactatcataatccatacattcatttccatgttgtttgactagcagtgcatatatgaatgaatatggtaattaatcttacctataagaaccaaatactttaattatattaagatagtgaataaagatgtataatatttttattaataccttgaatatattcagtggattgaatgtgacttcataactgtactacgattgtattaaaatatttctggaataaaa

SEQ ID NO: 306532 - DNA, 5499 bp, Homo sapiens
  misc_feature (63)..(64): n is a, c, g, or t
cccgcatctgctcccatcagcagaacacaaggtctgtgatatcttttccttcttctaaatcanngggatgtgagacctccattcttctgtttatggtactatgtaattaattagccatggaagtattcacaaaaactaaaaattttattagcaatgatcaaatcttacttttaaaatgaaaccgactaaaaagctaatttaagacagtgagaccagctgaggcatggtcggctcacctgaggtcaggagttcgagaccagcctggccaacacggcgaaaccccgtctctactaaacatacaaatattagccaggcgtggtggcaagacacctgtggtcccagctactggggaggctgaggcaggaggatcacttgagcccaggagttagaggtggtgggaagctatggttgcatcactgcattccagcctgggtaacaaagcaagacgctgtctctaacagaaataaaaataaaaaataaatctaaaaacaagacacaaaggaagaagtgagaaggggaaatgcgtaggacgaaaaaaaaattctaaatccattttcatttatctttctaatgcttaacatgtggtatttgcagtcgtgttccttcttcagttctaatgctgtccccctaaaagtcacaatggtgaatgctgaccctatgggagaagaaattaatgtcatgtttaaggttggtgaagatcttcggcaagatatgttagctttacagatgataaagattatggataagatctggcttaaagaaggactagatctgaggatggtaattttcaaatgtctctcaactggcagagatcgaggcatggtggagctggttcctgcttccgataccctcaggaaaatccaagtggaatatggtgtgacaggatcctttaaagataaaccacttgcagagtggctaaggaaatacaatccctctgaagaagaatatgaaaaggcttcagagaactttatctattcctgtgctggatgctgtgtagccacctatgttttaggcatctgtgatcgacacaatgacaatataatgcttcgaagcacgggacacatgtttcacattgactttggaaagtttttgggacatgcacagatgtttggcagcttcaaaagggatcgggctccttttgtgctgacctctgatatggcatatgtcattaatgggggtgaaaagcccaccattcgttttcagttgtttgtggacctctgctgtcaggcctacaacttgataagaaagcagacaaacctttttcttaacctcctttcactgatgattccttcagggttaccagaacttacaagtattcaagatttgaaatacgttagagatgcacttcaaccccaaactacagacgcagaagctacaattttctttactaggcttattgaatcaagtttgggaagcattgccacaaagtttaacttcttcattcacaaccttgctcagcttcgtttttctggtcttccttctaatgatgagcccatcctttcattttcacctaaaacatactcctttagacaagatggtcgaatcaaggaagtctctgtttttacatatcataagaaatacaacccagataaacattatatttatgtagtccgaattttgagggaaggacagattgaaccatcatttgtcttccgaacatttgacgaatttcaggaacttcacaataagctcagtattatttttccactttggaagttaccaggctttcctaataggatggttctaggaagaacacacataaaagatgtagcagccaaaaggaaaattgagttaaacagttacttacagagtttgatgaatgcttcaacggatgtagcagagtgtgatcttgtttgtactttcttccaccctttacttcgtgatgagaaagctgaagggatagctaggtctgcagatgcaggttccttcagtcctactccaggccaaataggaggagctgtgaaattatccatctcttaccgaaatggtactcttttcatcatggtgatgcatatcaaagatcttgttactgaagatggagctgacccaaatccatatgtcaaaacatacctacttccagataaccacaaaacatccaaacgtaaaaccaaaatttcacgaaaaacgaggaatccgacattcaatgaaatgcttgtatacagtggatatagcaaagaaaccctaagacagcgagaacttcaactaagtgtactcagtgcagaatctctgcgggagaattttttcttgggtggagtaaccctgcctttgaaagatttcaacttgagcaaagagacggttaaatggtatcagctgactgcggcaacatacttgtaaactagtgaatgtctgagctttggaagcatgaacagttataaacgtgcatgcatacatgcacacacacacagacacacacacacacacttgttaattttgtatagtatttttatacttggacagaacttataaagttaaatatacttgctgcatttcaacacatctgttggaccaacagtcacataactaacctttttgaatttttggaagccattgctgttttaaagtcattatgtagaatgctacaaaccctaaacttaatatatactaattcctgaaaaagactttgagacagtactatgtcagttcagccacctattttgcattgttttctataaggaggcaaagcatatgtgttttcctgttatgcaccttttatagcctttaccactgtgtaatgttcacaaacaccaaagtaaaggaaaaatgcaggatgttaccgtaaaatccagctgctattcatggagctgaaaaacaaagcacaaataatagatagctaagttaagaactactaagtagtttatagaagtagggaaaaacgtaatactgctttttattcatgtctttaaagcctttttcagaataagtgccaatcactgatgttgtaaataatggtgccttaactttatatgcttccctggcacttcgtttctgatttttttcctgatttgataaataattagtacatagttttcactcacttgcagcttactaaagacaagaaattatgtacatgtactaatgtttttcccacaaaaaaatcctttacttctgatgtatgaattagttatctaaatagttaagcctaatacctgaataagactcaccaatgtgattgtacaataaattctatcattccattaaaatcctacatttattcccaggaatggtaatttcacctccctacatctatactccactccctcagtaaataagtgaaaattgttaacccatgtgcccattcctgagtagggcagactcttcacaagaggcccatgacaagaattctagggtccagattgaactttaatatagacctttgtctgtgtagaccagtttgtcttgtaaactgtcttacttatgtgtgtaaacattttacattcacatgaaaagttattttcctttatataattggattcagaatcataagggacaggactgaaattattctacagtaaccagtaagaataagattcggccgggcacggtggctcctgcctgtaatcccaacactttgggaggccaaggtgggcggatcacctgaggtcaggagtttgagaccagcctggccaacatggtgaaaccccgtctctacacaaaaattagccaggcgtggtagcgggcatctgtaatcccagctacttggggggctgaggcaggagaatcgcttgaacccaggaggcggaggttgcagtgagccgagatcacgccactgcactcccgcctgggtgacaagagcaaaactccatcttaaaaaaaaagaaaaaaagagtaagattcatttttattagttactcaacttcagacacaattttgttaatttggatatatacatatatataataagaactcatggttagaatagaaatacagatactttaaaaatggtaatagaaattgtaccaatcaggttgctgtgagaaaactgacaaaatatgcaataaagaataccaagagagaaaggacaatcgccaattcagtttcccagaacagaatttttatgaactgcacaaatgtttaatgtaaatggtgatacctacagggaagaaatagaagagttgataatatatcactgggacggggtgggggaaagacttgaaatttttggtgcctaacactaatggtccatatgtagttaaacccatgagtatggtatatgaatgtcttttttaaatgttaaaatgtgttgtctatttaataagttaattaaaatgcagatcaaagcaccaccatttgctttttccacagatcattaacatttccttaaagtatgtaagtacctttgcaaatgcaaatgtactagtaattttcacttaagcttttgagaccgaattccattccaccagttatcacttagccactgtaatttaaaaacaaacaaacaaacaaaaactgtcttggtagaggtcgttaattagactcaacatgtactgcctttttgcagtctattatgacagtgtcttttagcacaaataatagagctaaaaaatgtcctgtcacttccattataagaaatctggattcatatctaagtgtatattataatactgtacagttaagagttcagaacaagtggtaatgttttctcttaatttaactcattttgtgccttctttactcattcaaacacacatacattttacatatagtttatttctttatgaaatgctaatcttcagcccgtaccaaaaagtagagtggagcctctttgcactactactatcaataaattttaaatcagttggatttttaagcattttttaaaagctgacattaaagtaaatctaaaaaaagtttaacaaactggccaagacactaatttttatgtataatcacaatattttatactcacctttattgactaaaaataattatgctacatgttgtcctgcatcagaagaattatttcttcttgccagtgttttgggatttgaagataatggttcactcaaagaacctattattttctctactgaggaacccaatgtagaacttgcactgatatttttattactgcctttatatgaatctataggtatctaaatgttaaggcatgtatgatctttgatcatttcttttttcaaattaaagttgtataaaagtttcaatatcttgccttaaattagttgcctattctttctaggattcaaatattgtgacatttaaaaaagaaaacattcacttttgaaacttagacttcagatcaaaaaggactgaacccccactatcataatccatacattcatttccatgttgtttgactagcagtgcatatatgaatgaatatggtaattaatcttacctataagaaccaaatactttaattatattaagatagtgaataaagatgtataatatttttattaataccttgaatatattcagtggattgaatgtgacttcataactgtactacgattgtattaaaatatttctggaataaaa

SEQ ID NO: 306533 - DNA, 4381 bp, Homo sapiens
  misc_feature (4368)..(4368): n is a, c, g, or t
cgtgctgcgcttggctggctgtggagtcggccgaagctttcggcggcggctgagccagctgaggggaaaaatggctcggactgtggcggcttcggcggctcaggttgtggtagaggcggaggctcaggcagcttgaggccttgctattttggaagctacaagaaaaaaatagaggaaggaaggtttggtctttttagtggacatggctcagatatctagcaacagcggatttaaagaatgtccatcttcacatccggaaccaacaagagcaaaagatgtggacaaagaagaagcattacagatggaagcagaggctttagcaaaactgcaaaaggatagacaagtgactgacaatcagagaggctttgagttgtcaagcagcaccagaaaaaaagcacaggtttataacaagcaggattatgatctcatggtgtttcctgaatcagattcccaaaaaagagcattagatattgatgtagaaaagctcacccaagctgaacttgagaaactattgctggatgacagtttcgagactaaaaaaacacctgtattaccagttactcctattctgagcccttccttttcagcacagctctattttagacctactattcagagaggacagtggccacctggattacctgggccttccacttatgctttaccttctatttatccttctacttacagtaaacaggctgcattccaaaatggcttcaatccaagaatgcccacttttccatctacagaacctatatatttaagtcttccgggacaatctccatatttctcatatcctttgacacctgccacaccctttcatccacaaggaagcttacctatctatcgtccagtagtcagtactgacatggcaaaactatttgacaaaatagctagtacatcagaatttttaaaaaatgggaaagcaaggactgatttggagataacagattcaaaagtcagcaatctacaggtatctccaaagtctgaggatatcagtaaatttgactggttagacttggatcctctaagtaagcctaaggtggataatgtggaggtattagaccatgaggaagagaaaaatgtttcaagtttgctagcaaaggatccttgggatgctgttcttcttgaagagagatcgacagcaaattgtcatcttgaaagaaaggtgaatggaaaatccctttctgtggcaactgttacaagaagccagtctttaaatattcgaacaactcagcttgcaaaagcccagggccatatatctcagaaagacccaaatgggaccagtagtttgccaactggaagttctcttcttcaagaagttgaagtacagaatgaggagatggcagctttttgtcgatccattacaaaattgaagaccaaatttccatataccaatcaccgcacaaacccaggctatttgttaagtccagtcacagcgcaaagaaacatatgcggagaaaatgctagtgtgaaggtctccattgacattgaaggatttcagctaccagttacttttacgtgtgatgtgagttctactgtagaaatcattataatgcaagccctttgctgggtacatgatgacttgaatcaagtagatgttggcagctatgttctaaaagtttgtggtcaagaggaagtgctgcagaataatcattgccttggaagtcatgagcatattcaaaactgtcgaaaatgggacacagaaattagactacaactcttgaccttcagtgcaatgtgtcaaaatctggcccgaacagcagaagatgatgaaacacccgtggatttaaacaaacacctgtatcaaatagaaaaaccttgcaaagaagccatgacgagacaccctgttgaagaactcttagattcttatcacaaccaagtagaactggctcttcaaattgaaaaccaacaccgagcagtagatcaagtaattaaagctgtaagaaaaatctgtagtgctttagatggtgtcgagactcttgccattacagaatcagtaaagaagctaaagagagcagttaatcttccaaggagtaaaactgctgatgtgacttctttgtttggaggagaagacactagcaggagttcaactaggggctcacttaatcctgaaaatcctgttcaagtaagcataaaccaattaactgcagcaatttatgatcttctcagactccatgcaaattctggtaggagtcctacagactgtgcccaaagtagcaagagtgtcaaggaagcatggactacaacagagcagctccagtttactatttttgctgctcatggaatttcaagtaattgggtatcaaattatgaaaaatactacttgatatgttcactgtctcacaatggaaaggatctttttaaacctattcaatcaaagaaggttggcacttacaagaatttcttctatcttattaaatgggatgaactaatcatttttcctatccagatatcacaattgccattagaatcagttcttcaccttactctttttggaattttaaatcagagcagtggaagttcccctgattctaataagcagagaaagggaccagaagctttgggcaaagtttctttacctctttgtgactttagacggtttttaacatgtggaactaaacttctatatctttggacttcatcacatacaaattctgttcctggaacagttaccaaaaaaggatatgtcatggaaagaatagtgctacaggttgattttccttctcctgcatttgatattatttatacaactcctcaagttgacagaagcattatacagcaacataacttagaaacactagagaatgatataaaagggaaacttcttgatattcttcataaagactcatcacttggactttctaaagaagataaagcttttttatgggagaaacgttattattgcttcaaacacccaaattgtcttcctaaaatattagcaagcgccccaaactggaaatggggtaatcttgccaaaacttactcattgcttcaccagtggcctgcattgtacccactaattgcattggaacttcttgattcaaaatttgctgatcaggaagtaagatccctagctgtgacctggattgaggccattagtgatgatgagctaacagatcttcttccacagtttgtacaagctttgaaatatgaaatttacttgaatagttcattagtgcaattccttttgtccagggcattgggaaatatccagatagcacacaatttatattggcttctcaaagatgccctgcatgatgtacagtttagtacccgatacgaacatgttttgggtgctctcctgtcagtaggaggaaaacgacttagagaagaacttctaaaacagacgaaacttgtacagcttttaggaggagtagcagaaaaagtaaggcaggctagtggatcagccagacaggttgttctccaaagaagtatggaacgagtacagtccttttttcagaaaaataaatgccgtctccctctcaagccaagtctagtggcaaaagaattaaatattaagtcgtgttccttcttcagttctaatgctgtccccctaaaagtcacaatggtgaatgctgaccctatgggagaagaaattaatgtcatgtttaaggttggtgaagatcttcggcaagatatgttagctttacagatgataaagattatggataagatctggcttaaagaaggactagatctgaggatggtaattttcaaatgtctctcaactggcagagatcgaggcatggtggagctggttcctgcttccgataccctcaggaaaatccaagtggaatatggtgtgacaggatcctttaaagataaaccacttgcagagtggctaaggaaatacaatccctctgaagaagaatatgaaaaggcttcagagaactttatctattcctgtgctggatgctgtgtagccacctatgttttaggcatctgtgatcgacacaatgacaatataatgcttcgaagcacgggacacatgtttcacattgactttggaaagtttttgggacatgcacagatgtttggcagcttcaaaagggatcgggctccttttgtgctgacctctgatatggcatatgtcattaatgggggtgaaaagcccaccattcgttttcagttgtttgtggacctctgctgtcaggcctacaacttgataagaaagcagacaaacctttttcttaacctcctttcactgatgattccttcagggttaccagaacttacaagtattcaagatttgaaatacgttagagatgcacttcaaccccaaactacagacgcagaagctacaattttctttactaggcttattgaatcaagtttgggaagcattgccacaaagttccgttgaanccgtcgggtaccg

SEQ ID NO: 306534 - DNA, 1729 bp, Homo sapiens
cgtgctgcgcttggctggctgtggagtcggccgaagctttcggcggcggctgagccagctgaggggaaaaatggctcggactgtggcggcttcggcggctcaggttgtggtagaggcggaggctcaggcagcttgaggccttgctattttggaagctacaagaaaaaaatagaggaaggaaggtttggtctttttagtggacatggctcagatatctagcaacagcggatttaaagaatgtccatcttcacatccggaaccaacaagagcaaaagatgtggacaaagaagaagcattacagatggaagcagaggctttagcaaaactgcaaaaggatagacaagtgactgacaatcagagaggctttgagttgtcaagcagcaccagaaaaaaagcacaggtttataacaagcaggattatgatctcatggtgtttcctgaatcagattcccaaaaaagagcattagatattgatgtagaaaagctcacccaagctgaacttgagaaactattgctggatgacagtttcgagactaaaaaaacacctgtattaccagttactcctattctgagcccttccttttcagcacagctctattttagacctactattcagagaggacagtggccacctggattacctgggccttccacttatgctttaccttctatttatccttctacttacagtaaacaggctgcattccaaaatggcttcaatccaagaatgcccacttttccatctacagaacctatatatttaagtcttccgggacaatctccatatttctcatatcctttgacacctgccacaccctttcatccacaaggaagcttacctatctatcgtccagtagtcagtactgacatggcaaaactatttgacaaaatagctagtacatcagaatttttaaaaaatgggaaagcaaggactgatttggagataacagattcaaaagtcagcaatctacaggtatctccaaagtctgaggatatcagtaaatttgactggttagacttggatcctctaagtaagcctaaggtggataatgtggaggtattagaccatgaggaagagaaaaatgtttcaagtttgctagcaaaggatccttgggatgctgttcttcttgaagagagatcgacagcaaattgtcatcttgaaagaaaggtgaatggaaaatccctttctgtggcaactgttacaagaagccagtctttaaatattcgaacaactcagcttgcaaaagcccagggccatatatctcagaaagacccaaatgggaccagtagtttgccaactggaagttctcttcttcaagaagttgaagtacagaatgaggagatggcagctttttgtcgatccattacaaaattgaagaccaaatttccatataccaatcaccgcacaaacccaggctatttgttaagtccagtcacagcgcaaagaaacatatgcggagaaaatgctagtgtgaaggtctccattgacattgaaggatttcagctaccagttacttttacgtgtgatgtgagttctactgtagaaatcattataatgcaagccctttgctgggtacatgatgacttgaatcaagtagatgttggcagctatgttctaaaagtttgtggtcaagaggaagtgctgcagaagtaagtttatttaactactgagcaacatccttggaaatttcatttttaatggtttaatctagaaaaatttcaagttaaa

SEQ ID NO: 306535 - DNA, 632 bp, Homo sapiens
tcaggtttatttgtacaaatagcacaggaggtgaggacccagccccatgcagacggcagcctgggcaggttgcaccagtccttgtgtcctcacgttggcaggcagatacctactctgaagcctttgtaggagcctgagcacctttgcgaacctgagctggaactgaagctggagttgcagcctgggccttggtttgatccttgtccttgtcgtttggccggcacaacccaagccccttggcaatgcgggcacaagcacgcttcccaagcttggggtgggcaatgtaggcaagtcgatggagcttgctgctgacaccctttgggatcttgggcttaacctcctttacaagggccttcatagcctcaccacgtggactgatggcctgccaaagcctgcatcttctttaggcccttcttgttttgcttcttggcaatgcacatgttcctcaggaatttggggtccaccccattgagagagtcatatctttgtgatcggggtatcttttctctttcttttgtctgatctttgcttttgttttcttttcttttctcttttcttttcttttctttttttgagacagagtctcgctctgttgccaggctggagcgcagtggtgcgatctcggctcactg

SEQ ID NO: 306536 - DNA, 415 bp, Homo sapiens
atcattagaaaaaataatgcagaaatttaaatgacctccatctgttttctaccccatatgcatttggctatcagccatctttagtgtttttagctctctattctctatatatagaacagaagtagtttttgttccaaaagctatttatatatctgaaagtaggcttgaaagcatttatgttttccatttaacaaacaagttttttttcaggatgttgactcactttttttctgagtcagttacaaataatatttaattctgatagaattttattttcagttctcagaaaaacactttagttgcaagattttatcatacacttaactatatttaatttgacaatagaaagaccaaagagtggatgtgatttttttgtgtatatgtgtttgtttaggcagaagatgatgaaacaccc

SEQ ID NO: 306537 - DNA, 169 bp, Homo sapiens
tgtgctgctatgtagcattttgtggatcttccacttttaaaataaaaacacttttttaattacagaaagacccaaatgggaccagtagtttgccaactggaagttctcttcttcaagaagttgaagtacagaatgaggagatggcagctttttgtcgatccattacaaa

SEQ ID NO: 306538 - DNA, 845 bp, Homo sapiens
gtgaaatagctgagtcaagagcgacatgtatttttagttataatagttgttacattgctctacaaaagaagctacacctgtgtacacctctctccctaccaataagttatgaaatcgtttcctaacacaggatgttgttttaaattttcatctgataggtgaaaaactgcattcatttttgtttggcttctatttctttgactattagtgagctttaacattttcgtatacattggttggccaaatgtacctttgcccactatatttatagcctttggccattctagttttatagtaaaaattaactctctttagtaacaacctttttttcaccgtttgacaactgggcattttataaattgtatccacagcataacttgtctgaaaaatagatcttcattttcattatgtacttacagtatcacatctctttctataggttgttctccaaagaagtatggaacgagtacagtccttttttcagaaaaataaatgccgtctccctctcaagccaagtctagtggcaaaagaattaaatattaaggtgacacataaaatacttataagttcatattacatttgaaaataataggaagaaggcaaatgggcaggtatgcttaaggcaaatgaaggtaaaacctgcacaggttggttataagcatggatggttgtgattaggatccatatttatcttagcatatttttttacctaaccaccattcctgggaaaaaaaaagtataaaattatttactgccttgggcttcatttttttaaattggtctcacctttttatttatttatttatttatttatttatttatttatttatttatttatttatttt

SEQ ID NO: 306539 - DNA, 384 bp, Homo sapiens
tttccaaatgagaataagaaaaaaatagctctagttttagtgatttgctactaatttatgcttctacttctgattctaatgtaaaattaatagcaatttgcatatgaataattgtgtcagacgaagtgaaaattaacccggccttgccttttcctactttgaaataaactatacaattgaaaagctatgttttttctttgtcatcacaaaagagtagaggatatctgttagggatatctaagatatctagtttctgacttcgtctctggaattggtcctttaaatttcacctacctatttttattttattttttatttttaaagaaccaacaccgagcagtagatcaagtaattaaagctgtaagaaaaatctgtagtgcttta

SEQ ID NO: 306540 - DNA, 476 bp, Homo sapiens
ggatatggtcacctgggctgggagatggaaaaggaatgagggggtttgaggaggaagaggatgctcaagttgagtcttaaatgattaattccttctattcataagggcaggatggataaacgtgatcaggttctaggccctgctctgcttctatcaagcggtgagatattgagcaaactgcttaatacttctggtatccattttccttattcaggattcgactacatatataaagcagtgctgtacatgagaaatatgtgagccaaaaatgggagtcacataggtaggagattttacattatttttttcccctaaatcttttaaatctggtgtatgttacacttggtacatctcaatttggaacagccacatttcaggcacttaatagctccatgtaactagtaactgccatattggacagtatagatctagaggctgggtgcattaatgcatgcccatagtccagtgctttggag

SEQ ID NO: 306541 - DNA, 257 bp, Homo sapiens
gaaatggtactcttttcatcatggtgatgcatatcaaagatcttgtgagtgattacaaagaatgatggttgtagaggaaacccttaccttggtaggaagcattactattaagggactgcttttctttttaggttactgaagatggagctgacccaaatccatatgtcaaaacatacctacttccagataaccacaaaacatccaaacgtaaaaccaaaatttcacgaaaaacgaggaatccgacattcaatgaaatg

SEQ ID NO: 306542 - DNA, 2998 bp, Homo sapiens
gctataaggatcacgcgccccagtcgacgctgagctcctctgctactcagagttgcaacctcagcctcgctatggctcccagcagcccccggcccgcgctgcccgcactcctggtcctgctcggggctctgttcccaggacctggcaatgcccagacatctgtgtccccctcaaaagtcatcctgccccggggaggctccgtgctggtgacatgcagcacctcctgtgaccagcccaagttgttgggcatagagaccccgttgcctaaaaaggagttgctcctgcctgggaacaaccggaaggtgtatgaactgagcaatgtgcaagaagatagccaaccaatgtgctattcaaactgccctgatgggcagtcaacagctaaaaccttcctcaccgtgtactggactccagaacgggtggaactggcacccctcccctcttggcagccagtgggcaagaaccttaccctacgctgccaggtggagggtggggcaccccgggccaacctcaccgtggtgctgctccgtggggagaaggagctgaaacgggagccagctgtgggggagcccgctgaggtcacgaccacggtgctggtgaggagagatcaccatggagccaatttctcgtgccgcactgaactggacctgcggccccaagggctggagctgtttgagaacacctcggccccctaccagctccagacctttgtcctgccagcgactcccccacaacttgtcagcccccgggtcctagaggtggacacgcaggggaccgtggtctgttccctggacgggctgttcccagtctcggaggcccaggtccacctggcactgggggaccagaggttgaaccccacagtcacctatggcaacgactccttctcggccaaggcctcagtcagtgtgaccgcagaggacgagggcacccagcggctgacgtgtgcagtaatactggggaaccagagccaggagacactgcagacagtgaccatctacagctttccggcgcccaacgtgattctgacgaagccagaggtctcagaagggaccgaggtgacagtgaagtgtgaggcccaccctagagccaaggtgacgctgaatggggttccagcccagccactgggcccgagggcccagctcctgctgaaggccaccccagaggacaacgggcgcagcttctcctgctctgcaaccctggaggtggccggccagcttatacacaagaaccagacccgggagcttcgtgtcctgtatggcccccgactggacgagagggattgtccgggaaactggacgtggccagaaaattcccagcagactccaatgtgccaggcttgggggaacccattgcccgagctcaagtgtctaaaggatggcactttcccactgcccatcggggaatcagtgactgtcactcgagatcttgagggcacctacctctgtcgggccaggagcactcaaggggaggtcacccgcgaggtgaccgtgaatgtgctctccccccggtatgagattgtcatcatcactgtggtagcagccgcagtcataatgggcactgcaggcctcagcacgtacctctataaccgccagcggaagatcaagaaatacagactacaacaggcccaaaaagggacccccatgaaaccgaacacacaagccacgcctccctgaacctatcccgggacagggcctcttcctcggccttcccatattggtggcagtggtgccacactgaacagagtggaagacatatgccatgcagctacacctaccggccctgggacgccggaggacagggcattgtcctcagtcagatacaacagcatttggggccatggtacctgcacacctaaaacactaggccacgcatctgatctgtagtcacatgactaagccaagaggaaggagcaagactcaagacatgattgatggatgttaaagtctagcctgatgagaggggaagtggtgggggagacatagccccaccatgaggacatacaactgggaaatactgaaacttgctgcctattgggtatgctgaggccccacagacttacagaagaagtggccctccatagacatgtgtagcatcaaaacacaaaggcccacacttcctgacggatgccagcttgggcactgctgtctactgaccccaacccttgatgatatgtatttattcatttgttattttaccagctatttattgagtgtcttttatgtaggctaaatgaacataggtctctggcctcacggagctcccagtcctaatcacattcaaggtcaccaggtacagttgtacaggttgtacactgcaggagagtgcctggcaaaaagatcaaatggggctgggacttctcattggccaacctgcctttccccagaaggagtgatttttctatcggcacaaaagcactatatggactggtaatggttacaggttcagagattacccagtgaggccttattcctcccttccccccaaaactgacacctttgttagccacctccccacccacatacatttctgccagtgttcacaatgacactcagcggtcatgtctggacatgagtgcccagggaatatgcccaagctatgccttgtcctcttgtcctgtttgcatttcactgggagcttgcactatgcagctccagtttcctgcagtgatcagggtcctgcaagcagtggggaagggggccaaggtattggaggactccctcccagctttggaagcctcatccgcgtgtgtgtgtgtgtgtatgtgtagacaagctctcgctctgtcacccaggctggagtgcagtggtgcaatcatggttcactgcagtcttgaccttttgggctcaagtgatcctcccacctcagcctcctgagtagctgggaccataggctcacaacaccacacctggcaaatttgattttttttttttttccagagacggggtctcgcaacattgcccagacttcctttgtgttagttaataaagctttctcaactgcc

SEQ ID NO: 306543 - DNA, 807 bp, Homo sapiens
gctataaggatcacgcgccccagtcgacgctgagctcctctgctactcagagttgcaacctcagcctcgctatggctcccagcagcccccggcccgcgctgcccgcactcctggtcctgctcggggctctgttcccaggacctggcaatgcccagacatctgtgtccccctcaaaagtcatcctgccccggggaggctccgtgctggtgacatgcagcacctcctgtgaccagcccaagttgttgggcatagagaccccgttgcctaaaaaggagttgctcctgcctgggaacaaccggaaggtgtatgaactgagcaatgtgcaagaagatagccaaccaatgtgctattcaaactgccctgatgggcagtcaacagctaaaaccttcctcaccgtgtactgtgagtaactgagcccggagggctggactaggcagacccggtgggagagacgtgcaggggcacctgcagaggcctgggggaatctttgccacttgctcgtagggtcaaggaggggctccttgcagggcaggtggggacatccttggaaagtccctttgtgaatttctttgggtacaattaaagtatttacaggctgggtgcggtggctcatgcctgtaatcccagcactttgggaggctgagggaggcggatcacttgaggtcaggagttcgagaccagcctgaccaccatggagaaaccccgtctctattaaaaatacaaaaaaaactagccaggcatagtggcacatacctgtaatcccagctactcgggaggctgaggcaggagaatctcttgaaactggga

SEQ ID NO: 306544 - DNA, 3105 bp, Homo sapiens
gctataaggatcacgcgccccagtcgacgctgagctcctctgctactcagagttgcaacctcagcctcgctatggctcccagcagcccccggcccgcgctgcccgcactcctggtcctgctcggggctctgttcccaggacctggcaatgcccagacatctgtgtccccctcaaaagtcatcctgccccggggaggctccgtgctggtgacatgcagcacctcctgtgaccagcccaagttgttgggcatagagaccccgttgcctaaaaaggagttgctcctgcctgggaacaaccggaaggtgtatgaactgagcaatgtgcaagaagatagccaaccaatgtgctattcaaactgccctgatgggcagtcaacagctaaaaccttcctcaccgtgtactggactccagaacgggtggaactggcacccctcccctcttggcagccagtgggcaagaaccttaccctacgctgccaggtggagggtggggcaccccgggccaacctcaccgtggtgctgctccgtggggagaaggagctgaaacgggagccagctgtgggggagcccgctgaggtcacgaccacggtgctggtgaggagagatcaccatggagccaatttctcgtgccgcactgaactggacctgcggccccaagggctggagctgtttgagaacacctcggccccctaccagctccagacctttgtcctgccagcgactcccccacaacttgtcagcccccgggtcctagaggtggacacgcaggggaccgtggtctgttccctggacgggctgttcccagtctcggaggcccaggtccacctggcactgggggaccagaggttgaaccccacagtcacctatggcaacgactccttctcggccaaggcctcagtcagtgtgaccgcagaggacgagggcacccagcggctgacgtgtgcagtaatactggggaaccagagccaggagacactgcagacagtgaccatctacagctttccggcgcccaacgtgattctgacgaagccagaggtctcagaagggaccgaggtgacagtgaagtgtgaggcccaccctagagccaaggtgacgctgaatggggttccagcccagccactgggcccgagggcccagctcctgctgaaggccaccccagaggacaacgggcgcagcttctcctgctctgcaaccctggaggtggccggccagcttatacacaagaaccagacccgggagcttcgtgtcctgtatggcccccgactggacgagagggattgtccgggaaactggacgtggccagaaaattcccagcagactccaatgtgccaggcttgggggaacccattgcccgagctcaagtgtctaaaggatggcactttcccactgcccatcggggaatcagtgactgtcactcgagatcttgagggcacctacctctgtcgggccaggagcactcaaggggaggtcacccgcgaggtgaccgtgaatgtgctctccccccggtatgagattgtcatcatcactgtggtagcagccgcagtcataatgggcactgcaggcctcagcacgtacctctataaccgccagcggaagatcaagaaatacagactacaacaggcccaaaaagggacccccatgaaaccgaacacacaagccacgcctccctgaacctatcccgggacagggcctcttcctcggccttcccatattggtggcagtggtgccacactgaacagagtggaagacatatgccatgcagctacacctaccggccctgggacgccggaggacagggcattgtcctcagtcagatacaacagcatttggggccatggtacctgcacacctaaaacactaggccacgcatctgatctgtagtcacatgactaagccaagaggaaggagcaagactcaagacatgattgatggatgttaaagtctagcctgatgagaggggaagtggtgggggagacatagccccaccatgaggacatacaactgggaaatactgaaacttgctgcctattgggtatgctgaggccccacagacttacagaagaagtggccctccatagacatgtgtagcatcaaaacacaaaggcccacacttcctgacggatgccagcttgggcactgctgtctactgaccccaacccttgatgatatgtatttattcatttgttattttaccagctatttattgagtgtcttttatgtaggctaaatgaacataggtctctggcctcacggagctcccagtcctaatcacattcaaggtcaccaggtacagttgtacaggttgtacactgcaggagagtgcctggcaaaaagatcaaatggggctgggacttctcattggccaacctgcctttccccagaaggagtgatttttctatcggcacaaaagcactatatggactggtaatggttacaggttcagagattacccagtgaggccttattcctcccttccccccaaaactgacacctttgttagccacctccccacccacatacatttctgccagtgttcacaatgacactcagcggtcatgtctggacatgagtgcccagggaatatgcccaagctatgccttgtcctcttgtcctgtttgcatttcactgggagcttgcactatgcagctccagtttcctgcagtgatcagggtcctgcaagcagtggggaagggggccaaggtattggaggactccctcccagctttggaagcctcatccgcgtgtgtgtgtgtgtgtatgtgtagacaagctctcgctctgtcacccaggctggagtgcagtggtgcaatcatggttcactgcagtcttgaccttttgggctcaagtgatcctcccacctcagcctcctgagtagctgggaccataggctcacaacaccacacctggcaaatttgattttttttttttttccagagacggggtctcgcaacattgcccagacttcctttgtgttagttaataaagctttctcaactgccaaaaaaaaaacacaataccacaagcaacaacgatactaacataaaaaaaaaaagggggggcgcccaaaaattccccgggggggcaccaataaaggaccccgtttttg

SEQ ID NO: 306545 - DNA, 3209 bp, Homo sapiens
gctataaggatcacgcgccccagtcgacgctgagctcctctgctactcagagttgcaacctcagcctcgctatggctcccagcagcccccggcccgcgctgcccgcactcctggtcctgctcggggctctgttcccaggacctggcaatgcccagacatctgtgtccccctcaaaagtcatcctgccccggggaggctccgtgctggtgacatgcagcacctcctgtgaccagcccaagttgttgggcatagagaccccgttgcctaaaaaggagttgctcctgcctgggaacaaccggaaggtgtatgaactgagcaatgtgcaagaagatagccaaccaatgtgctattcaaactgccctgatgggcagtcaacagctaaaaccttcctcaccgtgtactggactccagaacgggtggaactggcacccctcccctcttggcagccagtgggcaagaaccttaccctacgctgccaggtggagggtggggcaccccgggccaacctcaccgtggtgctgctccgtggggagaaggagctgaaacgggagccagctgtgggggagcccgctgaggtcacgaccacggtgctggtgaggagagatcaccatggagccaatttctcgtgccgcactgaactggacctgcggccccaagggctggagctgtttgagaacacctcggccccctaccagctccagacctttgtcctgccagcgactcccccacaacttgtcagcccccgggtcctagaggtggacacgcaggggaccgtggtctgttccctggacgggctgttcccagtctcggaggcccaggtccacctggcactgggggaccagaggttgaaccccacagtcacctatggcaacgactccttctcggccaaggcctcagtcagtgtgaccgcagaggacgagggcacccagcggctgacgtgtgcagtaatactggggaaccagagccaggagacactgcagacagtgaccatctacagctttccggcgcccaacgtgattctgacgaagccagaggtctcagaagggaccgaggtgacagtgaagtgtgaggcccaccctagagccaaggtgacgctgaatggggttccagcccagccactgggcccgagggcccagctcctgctgaaggccaccccagaggacaacgggcgcagcttctcctgctctgcaaccctggaggtggccggccagcttatacacaagaaccagacccgggagcttcgtgtcctgtatggcccccgactggacgagagggattgtccgggaaactggacgtggccagaaaattcccagcagactccaatgtgccaggcttgggggaacccattgcccgagctcaagtgtctaaaggatggcactttcccactgcccatcggggaatcagtgactgtcactcgagatcttgagggcacctacctctgtcgggccaggagcactcaaggggaggtcacccgcgaggtgaccgtgaatgtgctctccccccggtatgagattgtcatcatcactgtggtagcagccgcagtcataatgggcactgcaggcctcagcacgtacctctataaccgccagcggaagatcaagaaatacagactacaacaggcccaaaaagggacccccatgaaaccgaacacacaagccacgcctccctgaacctatcccgggacagggcctcttcctcggccttcccatattggtggcagtggtgccacactgaacagagtggaagacatatgccatgcagctacacctaccggccctgggacgccggaggacagggcattgtcctcagtcagatacaacagcatttggggccatggtacctgcacacctaaaacactaggccacgcatctgatctgtagtcacatgactaagccaagaggaaggagcaagactcaagacatgattgatggatgttaaagtctagcctgatgagaggggaagtggtgggggagacatagccccaccatgaggacatacaactgggaaatactgaaacttgctgcctattgggtatgctgaggccccacagacttacagaagaagtggccctccatagacatgtgtagcatcaaaacacaaaggcccacacttcctgacggatgccagcttgggcactgctgtctactgaccccaacccttgatgatatgtatttattcatttgttattttaccagctatttattgagtgtcttttatgtaggctaaatgaacataggtctctggcctcacggagctcccagtcctaatcacattcaaggtcaccaggtacagttgtacaggttgtacactgcaggagagtgcctggcaaaaagatcaaatggggctgggacttctcattggccaacctgcctttccccagaaggagtgatttttctatcggcacaaaagcactatatggactggtaatggttacaggttcagagattacccagtgaggccttattcctcccttccccccaaaactgacacctttgttagccacctccccacccacatacatttctgccagtgttcacaatgacactcagcggtcatgtctggacatgagtgcccagggaatatgcccaagctatgccttgtcctcttgtcctgtttgcatttcactgggagcttgcactatgcagctccagtttcctgcagtgatcagggtcctgcaagcagtggggaagggggccaaggtattggaggactccctcccagctttggaagcctcatccgcgtgtgtgtgtgtgtgtatgtgtagacaagctctcgctctgtcacccaggctggagtgcagtggtgcaatcatggttcactgcagtcttgaccttttgggctcaagtgatcctcccacctcagcctcctgagtagctgggaccataggctcacaacaccacacctggcaaatttgattttttttttttttccagagacggggtctcgcaacattgcccagacttcctttgtgttagttaataaagctttctcaactgccaaaaaaaaaaaaaaaaaaaaaaaaaaaaaaaaaaaaaaaaaaaaaaaaaaaaaaaacaaacaaactaatcacttttccattctccccctcgcccctcctccttaacgttccttcctctacaccaccgtcccaatcaacacttcccctgccttctcctcctccctcccctcaccttttcctttccgacccttcttgttcccactctcccccc

SEQ ID NO: 306546 - DNA, 2976 bp, Homo sapiens
gctataaggatcacgcgccccagtcgacgctgagctcctctgctactcagagttgcaacctcagcctcgctatggctcccagcagcccccggcccgcgctgcccgcactcctggtcctgctcggggctctgttcccaggacctggcaatgcccagacatctgtgtccccctcaaaagtcatcctgccccggggaggctccgtgctggtgacatgcagcacctcctgtgaccagcccaagttgttgggcatagagaccccgttgcctaaaaaggagttgctcctgcctgggaacaaccggaaggtgtatgaactgagcaatgtgcaagaagatagccaaccaatgtgctattcaaactgccctgatgggcagtcaacagctaaaaccttcctcaccgtgtactggactccagaacgggtggaactggcacccctcccctcttggcagccagtgggcaagaaccttaccctacgctgccaggtggagggtggggcaccccgggccaacctcaccgtggtgctgctccgtggggagaaggagctgaaacgggagccagctgtgggggagcccgctgaggtcacgaccacggtgctggtgaggagagatcaccatggagccaatttctcgtgccgcactgaactggacctgcggccccaagggctggagctgtttgagaacacctcggccccctaccagctccagacctttgtcctgccagcgactcccccacaacttgtcagcccccgggtcctagaggtggacacgcaggggaccgtggtctgttccctggacgggctgttcccagtctcggaggcccaggtccacctggcactgggggaccagaggttgaaccccacagtcacctatggcaacgactccttctcggccaaggcctcagtcagtgtgaccgcagaggacgagggcacccagcggctgacgtgtgcagtaatactggggaaccagagccaggagacactgcagacagtgaccatctacagctttccggcgcccaacgtgattctgacgaagccagaggtctcagaagggaccgaggtgacagtgaagtgtgaggcccaccctagagccaaggtgacgctgaatggggttccagcccactcctgctgaaggccaccccagaggacaacgggcgcagcttctcctgctctgcaaccctggaggtggccggccagcttatacacaagaaccagacccgggagcttcgtgtcctgtatggcccccgactggacgagagggattgtccgggaaactggacgtggccagaaaattcccagcagactccaatgtgccaggcttgggggaacccattgcccgagctcaagtgtctaaaggatggcactttcccactgcccatcggggaatcagtgactgtcactcgagatcttgagggcacctacctctgtcgggccaggagcactcaaggggaggtcacccgcgaggtgaccgtgaatgtgctctccccccggtatgagattgtcatcatcactgtggtagcagccgcagtcataatgggcactgcaggcctcagcacgtacctctataaccgccagcggaagatcaagaaatacagactacaacaggcccaaaaagggacccccatgaaaccgaacacacaagccacgcctccctgaacctatcccgggacagggcctcttcctcggccttcccatattggtggcagtggtgccacactgaacagagtggaagacatatgccatgcagctacacctaccggccctgggacgccggaggacagggcattgtcctcagtcagatacaacagcatttggggccatggtacctgcacacctaaaacactaggccacgcatctgatctgtagtcacatgactaagccaagaggaaggagcaagactcaagacatgattgatggatgttaaagtctagcctgatgagaggggaagtggtgggggagacatagccccaccatgaggacatacaactgggaaatactgaaacttgctgcctattgggtatgctgaggccccacagacttacagaagaagtggccctccatagacatgtgtagcatcaaaacacaaaggcccacacttcctgacggatgccagcttgggcactgctgtctactgaccccaacccttgatgatatgtatttattcatttgttattttaccagctatttattgagtgtcttttatgtaggctaaatgaacataggtctctggcctcacggagctcccagtcctaatcacattcaaggtcaccaggtacagttgtacaggttgtacactgcaggagagtgcctggcaaaaagatcaaatggggctgggacttctcattggccaacctgcctttccccagaaggagtgatttttctatcggcacaaaagcactatatggactggtaatggttacaggttcagagattacccagtgaggccttattcctcccttccccccaaaactgacacctttgttagccacctccccacccacatacatttctgccagtgttcacaatgacactcagcggtcatgtctggacatgagtgcccagggaatatgcccaagctatgccttgtcctcttgtcctgtttgcatttcactgggagcttgcactatgcagctccagtttcctgcagtgatcagggtcctgcaagcagtggggaagggggccaaggtattggaggactccctcccagctttggaagcctcatccgcgtgtgtgtgtgtgtgtatgtgtagacaagctctcgctctgtcacccaggctggagtgcagtggtgcaatcatggttcactgcagtcttgaccttttgggctcaagtgatcctcccacctcagcctcctgagtagctgggaccataggctcacaacaccacacctggcaaatttgattttttttttttttccagagacggggtctcgcaacattgcccagacttcctttgtgttagttaataaagctttctcaactgcc

SEQ ID NO: 306547 - DNA, 2824 bp, Homo sapiens
gctataaggatcacgcgccccagtcgacgctgagctcctctgctactcagagttgcaacctcagcctcgctatggctcccagcagcccccggcccgcgctgcccgcactcctggtcctgctcggggctctgttcccaggacctggcaatgcccagacatctgtgtccccctcaaaagtcatcctgccccggggaggctccgtgctggtgacatgcagcacctcctgtgaccagcccaagttgttgggcatagagaccccgttgcctaaaaaggagttgctcctgcctgggaacaaccggaaggtgtatgaactgagcaatgtgcaagaagatagccaaccaatgtgctattcaaactgccctgatgggcagtcaacagctaaaaccttcctcaccgtgtactggactccagaacgggtggaactggcacccctcccctcttggcagccagtgggcaagaaccttaccctacgctgccaggtggagggtggggcaccccgggccaacctcaccgtggtgctgctccgtggggagaaggagctgaaacgggagccagctgtgggggagcccgctgaggtcacgaccacggtgctggtgaggagagatcaccatggagccaatttctcgtgccgcactgaactggacctgcggccccaagggctggagctgtttgagaacacctcggccccctaccagctccagacctttgtcctgccagcgactcccccacaacttgtcagcccccgggtcctagaggtggacacgcaggggaccgtggtctgttccctggacgggctgttcccagtctcggaggcccaggtccacctggcactgggggaccagaggttgaaccccacagtcacctatggcaacgactccttctcggccaaggcctcagtcagtgtgaccgcagaggacgagggcacccagcggctgacgtgtgcagtaatactggggaaccagagccaggagacactgcagacagtgaccatctacagctttccggcgcccaacgtgattctgacgaagccagaggtctcagaagggaccgaggtgacagtgaagtgtgaggcccaccctagagccaaggtgacgctgaatggggttccagcccagccactgggcccgagggcccagctcctgctgaaggccaccccagaggacaacgggcgcagcttctcctgctctgcaaccctggaggtggccggccagcttatacacaagaaccagacccgggagcttcgtgtcctgtatggcccccgactggacgagagggattgtccgggaaactggacgtggccagaaaattcccagcagactccaatgtgccaggcttgggggaacccattgcccgagctcaagtgtctaaaggatggcactttcccactgcccatcggggaatcagtgactgtcactcgagatcttgagggcacctacctctgtcgggccaggagcactcaaggggaggtcacccgcgaggtgaccgtgaatgtgctctccccccggtatgagattgtcatcatcactgtggtagcagccgcagtcataatgggcactgcaggcctcagcacgtacctctataaccgccagcggaagatcaagaaatacagactacaacaggcccaaaaagggacccccatgaaaccgaacacacaagccacgcctccctgaacctatcccgggacagggcctcttcctcggccttcccatattggtggcagtggtgccacactgaacagagtggaagacatatgccatgcagctacacctaccggccctgggacgccggaggacagggcattgtcctcagtcagatacaacagcatttggggccatggtacctgcacacctaaaacactaggccacgcatctgatctgtagtcacatgactaagccaagaggaaggagcaagactcaagacatgattgatggatgttaaagtctagcctgatgagaggggaagtggtgggggagacatagccccaccatgaggacatacaactgggaaatactgaaacttgctgcctattgggtatgctgaggccccacagacttacagaagaagtggccctccatagacatgtgtagcatcaaaacacaaaggcccacacttcctgacggatgccagcttgggcactgctgtctactgaccccaacccttgatgatatgtatttattcatttgttattttaccagctatttattgagtgtcttttatgtaggctaaatgaacataggtctctggcctcacggagctcccagtcctaatcacattcaaggtcaccaggtacagttgtacaggttgtacactgcaggagagtgcctggcaaaaagatcaaatggggctgggacttctcattggccaacctgcctttccccagaaggagtgatttttctatcggcacaaaagcactatatggactggtaatggttacaggttcagagattacccagtgaggccttattcctcccttccccccaaaactgacacctttgttagccacctccccacccacatacatttctgccagtgttcacaatgacactcagcggtcatgtctggacatgagtgcccagggaatatgcccaagctatgccttgtcctcttgtcctgtttgcatttcactgggagcttgcactatgcagctccagtttcctgcagtgatcagggtcctgcaagcagtggggaagggggccaaggtattggaggactccctcccagctttggaagcctcatccgcgtgtgtgtgtgtgtgtatgtgtagacaagctctcgctctgtcaccactgcactctaacctatgtgacagagcgagacccctcaa

SEQ ID NO: 306548 - DNA, 2979 bp, Homo sapiens
gctataaggatcacgcgccccagtcgacgctgagctcctctgctactcagagttgcaacctcagcctcgctatggctcccagcagcccccggcccgcgctgcccgcactcctggtcctgctcggggctctgttcccaggacctggcaatgcccagacatctgtgtccccctcaaaagtcatcctgccccggggaggctccgtgctggtgacatgcagcacctcctgtgaccagcccaagttgttgggcatagagaccccgttgcctaaaaaggagttgctcctgcctgggaacaaccggaaggtgtatgaactgagcaatgtgcaagaagatagccaaccaatgtgctattcaaactgccctgatgggcagtcaacagctaaaaccttcctcaccgtgtactggactccagaacgggtggaactggcacccctcccctcttggcagccagtgggcaagaaccttaccctacgctgccaggtggagggtggggcaccccgggccaacctcaccgtggtgctgctccgtggggagaaggagctgaaacgggagccagctgtgggggagcccgctgaggtcacgaccacggtgctggtgaggagagatcaccatggagccaatttctcgtgccgcactgaactggacctgcggccccaagggctggagctgtttgagaacacctcggccccctaccagctccagacctttgtcctgccagcgactcccccacaacttgtcagcccccgggtcctagaggtggacacgcaggggaccgtggtctgttccctggacgggctgttcccagtctcggaggcccaggtccacctggcactgggggaccagaggttgaaccccacagtcacctatggcaacgactccttctcggccaaggcctcagtcagtgtgaccgcagaggacgagggcacccagcggctgacgtgtgcagtaatactggggaaccagagccaggagacactgcagacagtgaccatctacagctttccggcgcccaacgtgattctgacgaagccagaggtctcagaagggaccgaggtgacagtgaagtgtgaggcccaccctagagccaaggtgacgctgaatggggttccagcccagccactgggcccgagggcccagctcctgctgaaggccaccccagaggacaacgggcgcagcttctcctgctctgcaaccctggaggtggccggccagcttatacacaagaaccagacccgggagcttcgtgtcctgtatggcccccgactggacgagagggattgtccgggaaactggacgtggccagaaaattcccagcagactccaatgtgccaggcttgggggaacccattgcccgagctcaagtgtctaaaggatggcactttcccactgcccatcggggaatcagtgactgtcactcgagatcttgagggcacctacctctgtcgggccaggagcactcaaggggaggtcacccgcgagccccccggtatgagattgtcatcatcactgtggtagcagccgcagtcataatgggcactgcaggcctcagcacgtacctctataaccgccagcggaagatcaagaaatacagactacaacaggcccaaaaagggacccccatgaaaccgaacacacaagccacgcctccctgaacctatcccgggacagggcctcttcctcggccttcccatattggtggcagtggtgccacactgaacagagtggaagacatatgccatgcagctacacctaccggccctgggacgccggaggacagggcattgtcctcagtcagatacaacagcatttggggccatggtacctgcacacctaaaacactaggccacgcatctgatctgtagtcacatgactaagccaagaggaaggagcaagactcaagacatgattgatggatgttaaagtctagcctgatgagaggggaagtggtgggggagacatagccccaccatgaggacatacaactgggaaatactgaaacttgctgcctattgggtatgctgaggccccacagacttacagaagaagtggccctccatagacatgtgtagcatcaaaacacaaaggcccacacttcctgacggatgccagcttgggcactgctgtctactgaccccaacccttgatgatatgtatttattcatttgttattttaccagctatttattgagtgtcttttatgtaggctaaatgaacataggtctctggcctcacggagctcccagtcctaatcacattcaaggtcaccaggtacagttgtacaggttgtacactgcaggagagtgcctggcaaaaagatcaaatggggctgggacttctcattggccaacctgcctttccccagaaggagtgatttttctatcggcacaaaagcactatatggactggtaatggttacaggttcagagattacccagtgaggccttattcctcccttccccccaaaactgacacctttgttagccacctccccacccacatacatttctgccagtgttcacaatgacactcagcggtcatgtctggacatgagtgcccagggaatatgcccaagctatgccttgtcctcttgtcctgtttgcatttcactgggagcttgcactatgcagctccagtttcctgcagtgatcagggtcctgcaagcagtggggaagggggccaaggtattggaggactccctcccagctttggaagcctcatccgcgtgtgtgtgtgtgtgtatgtgtagacaagctctcgctctgtcacccaggctggagtgcagtggtgcaatcatggttcactgcagtcttgaccttttgggctcaagtgatcctcccacctcagcctcctgagtagctgggaccataggctcacaacaccacacctggcaaatttgattttttttttttttccagagacggggtctcgcaacattgcccagacttcctttgtgttagttaataaagctttctcaactgcc

SEQ ID NO: 306549 - DNA, 3186 bp, Homo sapiens
caaatagctaggactacaggcacgtcccaccatgcccagctaatttttgtatttttggtggagacggggctttgtcatgttggccaggctgatctcaaattcctgacctcaagtgatctgcccgccttggcctcccaaagtgctgggattacaggcgtgagccaccacacccggcctgctcatgaattttctctttaacttccacatcgaaggcaaagtattgtcttgttaaggctgtgcctccagcacccagcacaggctgggcgcacattcccttgatgaacctgatttgtaatgcctgtcgcctcttccctcgtttcttctaggacctggcaatgcccagacatctgtgtccccctcaaaagtcatcctgccccggggaggctccgtgctggtgacatgcagcacctcctgtgaccagcccaagttgttgggcatagagaccccgttgcctaaaaaggagttgctcctgcctgggaacaaccggaaggtgtatgaactgagcaatgtgcaagaagatagccaaccaatgtgctattcaaactgccctgatgggcagtcaacagctaaaaccttcctcaccgtgtactggactccagaacgggtggaactggcacccctcccctcttggcagccagtgggcaagaaccttaccctacgctgccaggtggagggtggggcaccccgggccaacctcaccgtggtgctgctccgtggggagaaggagctgaaacgggagccagctgtgggggagcccgctgaggtcacgaccacggtgctggtgaggagagatcaccatggagccaatttctcgtgccgcactgaactggacctgcggccccaagggctggagctgtttgagaacacctcggccccctaccagctccagacctttgtcctgccagcgactcccccacaacttgtcagcccccgggtcctagaggtggacacgcaggggaccgtggtctgttccctggacgggctgttcccagtctcggaggcccaggtccacctggcactgggggaccagaggttgaaccccacagtcacctatggcaacgactccttctcggccaaggcctcagtcagtgtgaccgcagaggacgagggcacccagcggctgacgtgtgcagtaatactggggaaccagagccaggagacactgcagacagtgaccatctacagctttccggcgcccaacgtgattctgacgaagccagaggtctcagaagggaccgaggtgacagtgaagtgtgaggcccaccctagagccaaggtgacgctgaatggggttccagcccagccactgggcccgagggcccagctcctgctgaaggccaccccagaggacaacgggcgcagcttctcctgctctgcaaccctggaggtggccggccagcttatacacaagaaccagacccgggagcttcgtgtcctgtatggcccccgactggacgagagggattgtccgggaaactggacgtggccagaaaattcccagcagactccaatgtgccaggcttgggggaacccattgcccgagctcaagtgtctaaaggatggcactttcccactgcccatcggggaatcagtgactgtcactcgagatcttgagggcacctacctctgtcgggccaggagcactcaaggggaggtcacccgcgaggtgaccgtgaatgtgctctccccccggtatgagattgtcatcatcactgtggtagcagccgcagtcataatgggcactgcaggcctcagcacgtacctctataaccgccagcggaagatcaagaaatacagactacaacaggcccaaaaagggacccccatgaaaccgaacacacaagccacgcctccctgaacctatcccgggacagggcctcttcctcggccttcccatattggtggcagtggtgccacactgaacagagtggaagacatatgccatgcagctacacctaccggccctgggacgccggaggacagggcattgtcctcagtcagatacaacagcatttggggccatggtacctgcacacctaaaacactaggccacgcatctgatctgtagtcacatgactaagccaagaggaaggagcaagactcaagacatgattgatggatgttaaagtctagcctgatgagaggggaagtggtgggggagacatagccccaccatgaggacatacaactgggaaatactgaaacttgctgcctattgggtatgctgaggccccacagacttacagaagaagtggccctccatagacatgtgtagcatcaaaacacaaaggcccacacttcctgacggatgccagcttgggcactgctgtctactgaccccaacccttgatgatatgtatttattcatttgttattttaccagctatttattgagtgtcttttatgtaggctaaatgaacataggtctctggcctcacggagctcccagtcctaatcacattcaaggtcaccaggtacagttgtacaggttgtacactgcaggagagtgcctggcaaaaagatcaaatggggctgggacttctcattggccaacctgcctttccccagaaggagtgatttttctatcggcacaaaagcactatatggactggtaatggttacaggttcagagattacccagtgaggccttattcctcccttccccccaaaactgacacctttgttagccacctccccacccacatacatttctgccagtgttcacaatgacactcagcggtcatgtctggacatgagtgcccagggaatatgcccaagctatgccttgtcctcttgtcctgtttgcatttcactgggagcttgcactatgcagctccagtttcctgcagtgatcagggtcctgcaagcagtggggaagggggccaaggtattggaggactccctcccagctttggaagcctcatccgcgtgtgtgtgtgtgtgtatgtgtagacaagctctcgctctgtcacccaggctggagtgcagtggtgcaatcatggttcactgcagtcttgaccttttgggctcaagtgatcctcccacctcagcctcctgagtagctgggaccataggctcacaacaccacacctggcaaatttgattttttttttttttccagagacggggtctcgcaacattgcccagacttcctttgtgttagttaataaagctttctcaactgcc

SEQ ID NO: 306550 - DNA, 2964 bp, Homo sapiens
agatagtatagtcgagctggtgtaattcaggcagaggctggctcgtatagtacaggacccgcggcaggctgaccgactctggtctgctcgggctctgttcccaggacctggcaatgcccagacatctgtgtccccctcaaaagtcatcctgccccggggaggctccgtgctggtgacatgcagcacctcctgtgaccagcccaagttgttgggcatagagaccccgttgcctaaaaaggagttgctcctgcctgggaacaaccggaaggtgtatgaactgagcaatgtgcaagaagatagccaaccaatgtgctattcaaactgccctgatgggcagtcaacagctaaaaccttcctcaccgtgtactggactccagaacgggtggaactggcacccctcccctcttggcagccagtgggcaagaaccttaccctacgctgccaggtggagggtggggcaccccgggccaacctcaccgtggtgctgctccgtggggagaaggagctgaaacgggagccagctgtgggggagcccgctgaggtcacgaccacggtgctggtgaggagagatcaccatggagccaatttctcgtgccgcactgaactggacctgcggccccaagggctggagctgtttgagaacacctcggccccctaccagctccagacctttgtcctgccagcgactcccccacaacttgtcagcccccgggtcctagaggtggacacgcaggggaccgtggtctgttccctggacgggctgttcccagtctcggaggcccaggtccacctggcactgggggaccagaggttgaaccccacagtcacctatggcaacgactccttctcggccaaggcctcagtcagtgtgaccgcagaggacgagggcacccagcggctgacgtgtgcagtaatactggggaaccagagccaggagacactgcagacagtgaccatctacagctttccggcgcccaacgtgattctgacgaagccagaggtctcagaagggaccgaggtgacagtgaagtgtgaggcccaccctagagccaaggtgacgctgaatggggttccagcccagccactgggcccgagggcccagctcctgctgaaggccaccccagaggacaacgggcgcagcttctcctgctctgcaaccctggaggtggccggccagcttatacacaagaaccagacccgggagcttcgtgtcctgtatggcccccgactggacgagagggattgtccgggaaactggacgtggccagaaaattcccagcagactccaatgtgccaggcttgggggaacccattgcccgagctcaagtgtctaaaggatggcactttcccactgcccatcggggaatcagtgactgtcactcgagatcttgagggcacctacctctgtcgggccaggagcactcaaggggaggtcacccgcgaggtgaccgtgaatgtgctctccccccggtatgagattgtcatcatcactgtggtagcagccgcagtcataatgggcactgcaggcctcagcacgtacctctataaccgccagcggaagatcaagaaatacagactacaacaggcccaaaaagggacccccatgaaaccgaacacacaagccacgcctccctgaacctatcccgggacagggcctcttcctcggccttcccatattggtggcagtggtgccacactgaacagagtggaagacatatgccatgcagctacacctaccggccctgggacgccggaggacagggcattgtcctcagtcagatacaacagcatttggggccatggtacctgcacacctaaaacactaggccacgcatctgatctgtagtcacatgactaagccaagaggaaggagcaagactcaagacatgattgatggatgttaaagtctagcctgatgagaggggaagtggtgggggagacatagccccaccatgaggacatacaactgggaaatactgaaacttgctgcctattgggtatgctgaggccccacagacttacagaagaagtggccctccatagacatgtgtagcatcaaaacacaaaggcccacacttcctgacggatgccagcttgggcactgctgtctactgaccccaacccttgatgatatgtatttattcatttgttattttaccagctatttattgagtgtcttttatgtaggctaaatgaacataggtctctggcctcacggagctcccagtcctaatcacattcaaggtcaccaggtacagttgtacaggttgtacactgcaggagagtgcctggcaaaaagatcaaatggggctgggacttctcattggccaacctgcctttccccagaaggagtgatttttctatcggcacaaaagcactatatggactggtaatggttacaggttcagagattacccagtgaggccttattcctcccttccccccaaaactgacacctttgttagccacctccccacccacatacatttctgccagtgttcacaatgacactcagcggtcatgtctggacatgagtgcccagggaatatgcccaagctatgccttgtcctcttgtcctgtttgcatttcactgggagcttgcactatgcagctccagtttcctgcagtgatcagggtcctgcaagcagtggggaagggggccaaggtattggaggactccctcccagctttggaagcctcatccgcgtgtgtgtgtgtgtgtatgtgtagacaagctctcgctctgtcacccaggctggagtgcagtggtgcaatcatggttcactgcagtcttgaccttttgggctcaagtgatcctcccacctcagcctcctgagtagctgggaccataggctcacaacaccacacctggcaaatttgattttttttttttttccagagacggggtctcgcaacattgcccagacttcctttgtgttagttaataaagctttctcaactgcc

SEQ ID NO: 306551 - DNA, 2841 bp, Homo sapiens
gctataaggatcacgcgccccagtcgacgctgagctcctctgctactcagagttgcaacctcagcctcgctatggctcccagcagcccccggcccgcgctgcccgcactcctggtcctgctcggggctctgttcccaggacctggcaatgcccagacatctgtgtccccctcaaaagtcatcctgccccggggaggctccgtgctgatgggcagtcaacagctaaaaccttcctcaccgtgtactggactccagaacgggtggaactggcacccctcccctcttggcagccagtgggcaagaaccttaccctacgctgccaggtggagggtggggcaccccgggccaacctcaccgtggtgctgctccgtggggagaaggagctgaaacgggagccagctgtgggggagcccgctgaggtcacgaccacggtgctggtgaggagagatcaccatggagccaatttctcgtgccgcactgaactggacctgcggccccaagggctggagctgtttgagaacacctcggccccctaccagctccagacctttgtcctgccagcgactcccccacaacttgtcagcccccgggtcctagaggtggacacgcaggggaccgtggtctgttccctggacgggctgttcccagtctcggaggcccaggtccacctggcactgggggaccagaggttgaaccccacagtcacctatggcaacgactccttctcggccaaggcctcagtcagtgtgaccgcagaggacgagggcacccagcggctgacgtgtgcagtaatactggggaaccagagccaggagacactgcagacagtgaccatctacagctttccggcgcccaacgtgattctgacgaagccagaggtctcagaagggaccgaggtgacagtgaagtgtgaggcccaccctagagccaaggtgacgctgaatggggttccagcccagccactgggcccgagggcccagctcctgctgaaggccaccccagaggacaacgggcgcagcttctcctgctctgcaaccctggaggtggccggccagcttatacacaagaaccagacccgggagcttcgtgtcctgtatggcccccgactggacgagagggattgtccgggaaactggacgtggccagaaaattcccagcagactccaatgtgccaggcttgggggaacccattgcccgagctcaagtgtctaaaggatggcactttcccactgcccatcggggaatcagtgactgtcactcgagatcttgagggcacctacctctgtcgggccaggagcactcaaggggaggtcacccgcgaggtgaccgtgaatgtgctctccccccggtatgagattgtcatcatcactgtggtagcagccgcagtcataatgggcactgcaggcctcagcacgtacctctataaccgccagcggaagatcaagaaatacagactacaacaggcccaaaaagggacccccatgaaaccgaacacacaagccacgcctccctgaacctatcccgggacagggcctcttcctcggccttcccatattggtggcagtggtgccacactgaacagagtggaagacatatgccatgcagctacacctaccggccctgggacgccggaggacagggcattgtcctcagtcagatacaacagcatttggggccatggtacctgcacacctaaaacactaggccacgcatctgatctgtagtcacatgactaagccaagaggaaggagcaagactcaagacatgattgatggatgttaaagtctagcctgatgagaggggaagtggtgggggagacatagccccaccatgaggacatacaactgggaaatactgaaacttgctgcctattgggtatgctgaggccccacagacttacagaagaagtggccctccatagacatgtgtagcatcaaaacacaaaggcccacacttcctgacggatgccagcttgggcactgctgtctactgaccccaacccttgatgatatgtatttattcatttgttattttaccagctatttattgagtgtcttttatgtaggctaaatgaacataggtctctggcctcacggagctcccagtcctaatcacattcaaggtcaccaggtacagttgtacaggttgtacactgcaggagagtgcctggcaaaaagatcaaatggggctgggacttctcattggccaacctgcctttccccagaaggagtgatttttctatcggcacaaaagcactatatggactggtaatggttacaggttcagagattacccagtgaggccttattcctcccttccccccaaaactgacacctttgttagccacctccccacccacatacatttctgccagtgttcacaatgacactcagcggtcatgtctggacatgagtgcccagggaatatgcccaagctatgccttgtcctcttgtcctgtttgcatttcactgggagcttgcactatgcagctccagtttcctgcagtgatcagggtcctgcaagcagtggggaagggggccaaggtattggaggactccctcccagctttggaagcctcatccgcgtgtgtgtgtgtgtgtatgtgtagacaagctctcgctctgtcacccaggctggagtgcagtggtgcaatcatggttcactgcagtcttgaccttttgggctcaagtgatcctcccacctcagcctcctgagtagctgggaccataggctcacaacaccacacctggcaaatttgattttttttttttttccagagacggggtctcgcaacattgcccagacttcctttgtgttagttaataaagctttctcaactgcc

SEQ ID NO: 306552 - DNA, 1383 bp, Homo sapiens
  misc_feature (8)..(8): n is a, c, g, or t
  misc_feature (17)..(17): n is a, c, g, or t
gctgttcnagaggatcngacacttgaaacgtaagacacaagccacgcctccctgaacctatcccgggacagggcctcttcctcggccttcccatattggtggcagtggtgccacactgaacagagtggaagacatatgccatgcagctacacctaccggccctgggacgccggaggacagggcattgtcctcagtcagatacaacagcatttggggccatggtacctgcacacctaaaacactaggccacgcatctgatctgtagtcacatgactaagccaagaggaaggagcaagactcaagacatgattgatggatgttaaagtctagcctgatgagaggggaagtggtgggggagacatagccccaccatgaggacatacaactgggaaatactgaaacttgctgcctattgggtatgctgaggccccacagacttacagaagaagtggccctccatagacatgtgtagcatcaaaacacaaaggcccacacttcctgacggatgccagcttgggcactgctgtctactgaccccaacccttgatgatatgtatttattcatttgttattttaccagctatttattgagtgtcttttatgtaggctaaatgaacataggtctctggcctcacggagctcccagtcctaatcacattcaaggtcaccaggtacagttgtacaggttgtacactgcaggagagtgcctggcaaaaagatcaaatggggctgggacttctcattggccaacctgcctttccccagaaggagtgatttttctatcggcacaaaagcactatatggactggtaatggttacaggttcagagattacccagtgaggccttattcctcccttccccccaaaactgacacctttgttagccacctccccacccacatacatttctgccagtgttcacaatgacactcagcggtcatgtctggacatgagtgcccagggaatatgcccaagctatgccttgtcctcttgtcctgtttgcatttcactgggagcttgcactatgcagctccagtttcctgcagtgatcagggtcctgcaagcagtggggaagggggccaaggtattggaggactccctcccagctttggaagcctcatccgcgtgtgtgtgtgtgtgtatgtgtagacaagctctcgctctgtcacccaggctggagtgcagtggtgcaatcatggttcactgcagtcttgaccttttgggctcaagtgatcctcccacctcagcctcctgagtagctgggaccataggctcacaacaccacacctggcaaatttgattttttttttttttccagagacggggtctcgcaacattgcccagacttcctttgtgttagttaataaagctttctcaactgcc

SEQ ID NO: 306553 - DNA, 631 bp, Homo sapiens
gagatgctaggggtaggattagcttgaatctttattcttacattttctcctgtctgctccctgcttagccctcagagattacccagtgaggccttattcctcccttccccccaaaactgacacctttgttagccacctccccacccacatacatttctgccagtgttcacaatgacactcagcggtcatgtctggacatgagtgcccagggaatatgcccaagctatgccttgtcctcttgtcctgtttgcatttcactgggagcttgcactatgcagctccagtttcctgcagtgatcagggtcctgcaagcagtggggaagggggccaaggtattggaggactccctcccagctttggaagcctcatccgcgtgtgtgtgtgtgtgtatgtgtagacaagctctcgctctgtcacccaggctggagtgcagtggtgcaatcatggttcactgcagtcttgaccttttgggctcaagtgatcctcccacctcagcctcctgagtagctgggaccataggctcacaacaccacacctggcaaatttgattttttttttttttccagagacggggtctcgcaacattgcccagacttcctttgtgttagttaataaagctttctcaactgcc

SEQ ID NO: 306554 - DNA, 315 bp, Homo sapiens
tgacagtgaagtgtgaggcccaccctagagccaaggtgacgctgaatggggttccagcccagccactgggcccgagggcccagctcctgctgaaggccaccccagaggacaacgggcgcagcttctcctgctctgcaaccctggaggtggccggccagcttatacacaagaaccagacccgggagcttcgtgtcctgtgtgagtggggctgctggtcaatggcccctatcccccaaggcccaatctccctgaaggtcccataaggtcttgcctccaagtcctgcccccacccacctccatgtcatctcatcgtgt

SEQ ID NO: 306555 - DNA, 1266 bp, Homo sapiens
gagcgattagcgccaacagctcagagaaaacgtgacgaaaaccagtctgtaaaacccgagcctgggagaggggcttcggtgcgcggggggaatttgcagacgctccctgctggcggagatttcctgacctgtccttcggcgcgggactttcggcgggtcccggccgggcagacccaagtgccggcggcggagactgcagtggagccagtaccggctgtagtggccggggccgtggcgggagagtcatgtcagagccgcagccgcggggcgcagagcgcgatctctaccgggacacgtgggtgcgatacctgggctatgccaatgaggtgggcgaggctttccgctctcttgtgccagcggcggtggtgtggctgagctatggcgtggccagctcctacgtgctggcggatgccattgacaaaggcaagaaggctggagaggtgcccagccctgaagcaggccgcagcgccagggtgactgtggctgtggtggacacctttgtatggcaggctctagcctctgtggccattccgggcttcaccatcaaccgcgtgtgtgctgcctctctctatgtcctgggcactgccacccgctggcccctggctgtccgcaagtggaccaccaccgcgcttgggctgttgaccatccccatcattatccaccccattgacaggtcggtggatttcctcctggactccagcctgcgcaagctctacccaacagtggggaagcccagctcctcctgatcatactctggtacctggcctgtgcatcggcctcctgcttcatgtcaacctcctactcctgccagggaatgtggacacctggctccctggtgtccaaagaccctggcacctgggtgggtttgagctggacagaagcttagagacaaaggcttcaagaagcagtggctgcagggagtcacagaagggcaggacctgaacgctgtctgcttccctggaatccaagatgctgagtggaagtggaccctgggtgggcccggccctgtctttttcaggaaaattacatcctcccatggaggatgagagactgaggctcagggagggcaaggaataggcccaagatcacttggcaagctgggcacccaggacccccaggtgcttgacagagtcaccccatggtggtatggctgaacaaggagcggcagacaactcagggagaaactcaggagtgcagtaccagggacacctcaggacagattctctggccaggcccttccctgacccaataaatcctgaagaggtt

SEQ ID NO: 306556 - DNA, 1176 bp, Homo sapiens
accataacgggcctaggtacgaggctggatttcctgacctgtccttcggcgcgggactttcggcgggtcccggccgggcagacccaagtgccggcggcggagactgcagtggagccagtaccggctgtagtggccggggccgtggcgggagagtcatgtcagagccgcagccgcggggcgcagagcgcgatctctaccgggacacgtgggtgcgatacctgggctatgccaatgaggtgggcgaggctttccgctctcttgtgccagcggcggtggtgtggctgagctatggcgtggccagctcctacgtgctggcggatgccattgacaaaggcaagaaggctggagaggtgcccagccctgaagcaggccgcagcgccagggtgactgtggctgtggtggacacctttgtatggcaggctctagcctctgtggccattccgggcttcaccatcaaccgcgtgtgtgctgcctctctctatgtcctgggcactgccacccgctggcccctggctgtccgcaagtggaccaccaccgcgcttgggctgttgaccatccccatcattatccaccccattgacaggtcggtggatttcctcctggactccagcctgcgcaagctctacccaacagtggggaagcccagctcctcctgatcatactctggtacctggcctgtgcatcggcctcctgcttcatgtcaacctcctactcctgccagggaatgtggacacctggctccctggtgtccaaagaccctggcacctgggtgggtttgagctggacagaagcttagagacaaaggcttcaagaagcagtggctgcagggagtcacagaagggcaggacctgaacgctgtctgcttccctggaatccaagatgctgagtggaagtggaccctgggtgggcccggccctgtctttttcaggaaaattacatcctcccatggaggatgagagactgaggctcagggagggcaaggaataggcccaagatcacttggcaagctgggcacccaggacccccaggtgcttgacagagtcaccccatggtggtatggctgaacaaggagcggcagacaactcagggagaaactcaggagtgcagtaccagggacacctcaggacagattctctggccaggcccttccctgacccaataaatcctgaagaggtt

SEQ ID NO: 306557 - DNA, 1375 bp, Homo sapiens
gagcgattagcgccaacagctcagagaaaacgtgacgaaaaccagtctgtaaaacccgagcctgggagaggggcttcggtgcgcggggggaatttgcagacgctccctgctggcggagatttcctgacctgtccttcggcgcgggactttcggcgggtcccggccgggcagacccaagtgccggcggcggagactgcagtggagccagtaccggctgtagtggccggggccgtggcgggagagtcatgtcagagccgcagccgcggggcgcagagcgcgatctctaccgggacacgtgggtgcgatacctgggctatgccaatgaggtgggcgaggctttccgctctcttgtgccagcggcggtggtgtggctgagctatggcgtggccagctcctacgtgctggcggatgccattgacaaaggcaagaaggctggagaggtgcccagccctgaagcaggccgcagcgccagggtgactgtggctgtggtggacacctttgtatggcaggctctagcctctgtggccattccgggcttcaccatcaaccgcgtgtgtgctgcctctctctatgtcctgggcactgccacccgctggcccctggctgtccgcaagtggaccaccaccgcgcttgggctgttgaccatccccatcattatccaccccattgacaggtcggtggatttcctcctggactccagcctgcgcaagctctacccaacagtggggaagcccagctcctcctgatcatactctggtacctggcctgtgcatcggcctcctgcttcatgtcaacctcctactcctgccagggaatgtggacacctggctccctggtgtccaaagaccctggcacctgggtgggtttgagctggacagaagcttagagacaaaggcttcaagaagcagtggctgcagggagtcacagaagggcaggacctgaacgctgtctgcttccctggaatccaagatgctgagtggaagtggaccctgggtgggcccggccctgtctttttcaggaaaattacatcctcccatggaggatgagagactgaggctcagggagggcaaggaataggcccaagatcacttggcaagctgggcacccaggacccccaggtgcttgacagagtcaccccatggtggtatggctgaacaaggagcggcagacaactcagggagaaactcaggagtgcagtaccagggacacctcaggcagaatttcctcttgggccagggccccttttccttgaaccccaaattaaaattcctttgacggacgggttaccccaacaggagacctcaataaacaaacaaataaaagggaacaaaaagtgaatagcacaagggcgggggggcgaaaataaaataatccg

SEQ ID NO: 306558 - DNA, 1151 bp, Homo sapiens
gagcgattagcgccaacagctcagagaaaacgtgacgaaaaccagtctgtaaaacccgagcctgggagaggggcttcggtgcgcggggggaatttgcagacgctccctgctggcggagatttcctgacctgtccttcggcgcgggactttcggcgggtcccggccgggcagacccaagtgccggcggcggagactgcagtggagccagtaccggctgtagtggccggggccgtggcgggagagtcatgtcagagccgcagccgcggggcgcagagcgcgatctctaccgggacacgtgggtgcgatacctgggctatgccaatgaggtgggcgaggctttccgctctcttgtgccagcggcggtggtgtggctgagctatggcgtggccagctcctacgtgctggcggatgccattgacaaaggcaagaaggctggagaggtgcccagccctgaagcaggccgcagcgccagggtgactgtggctgtggtggacacctttgtatggcaggctctagcctctgtggccattccgggcttcaccatcaaccgcgtgtgtgctgcctctctctatgtcctgggcactgccacccgctggcccctggctgtccgcaagtggaccaccaccgcgcttgggctgttgaccatccccatcattatccaccccattgacaggtcggtggatttcctcctggactccagcctgcgcaagctctacccaacagtggggaagcccagctcctcctgatcatactctggtacctggcctgtgcatcggcctcctgcttcatgtcaacctcctactcctgccagggaatgtggacacctggctccctggtgtccaaagaccctggcacctgggtgggtttgagctggacagaagcttagagacaaaggcttcaagaagcagtggctgcagggagtcacagaagggcaggacctgaacgctgtctgcttccctggaatccaagatgctgagtggaagtggaccctgggtgggcccggccctgtctttttcaggaaaattacatcctcccatggaggatgagagactgagaactcagggagaaactcaggagtgcagtaccagggacacctcaggacagattctctggccaggcccttccctgacccaataaatcctgaagaggtt

SEQ ID NO: 306559 - DNA, 1219 bp, Homo sapiens
accttcgtgctatggtatgaggcctggtgtgtgtgacttccgtgtccttcgtcgcggccgtgtttctgtgcgggtcccggctcggggttagaaccgctgtgtgccaggggttcggtctatctgtgaggtgcgacgccacgttacccggcgtgtttgtgcgccagcgggtgccgctgcgcggtgtgaagaacgtcagtgctccatgagccgcagccgcggggcgcagagcgcgatctctaccgggacacgtgggtgcgatacctgggctatgccaatgaggtgggcgaggctttccgctctcttgtgccagcggcggtggtgtggctgagctatggcgtggccagctcctacgtgctggcggatgccattgacaaaggcaagaaggctggagaggtgcccagccctgaagcaggccgcagcgccagggtgactgtggctgtggtggacacctttgtatggcaggctctagcctctgtggccattccgggcttcaccatcaaccgcgtgtgtgctgcctctctctatgtcctgggcactgccacccgctggcccctggctgtccgcaagtggaccaccaccgcgcttgggctgttgaccatccccatcattatccaccccattgacaggtcggtggatttcctcctggactccagcctgcgcaagctctacccaacagtggggaagcccagctcctcctgatcatactctggtacctggcctgtgcatcggcctcctgcttcatgtcaacctcctactcctgccagggaatgtggacacctggctccctggtgtccaaagaccctggcacctgggtgggtttgagctggacagaagcttagagacaaaggcttcaagaagcagtggctgcagggagtcacagaagggcaggacctgaacgctgtctgcttccctggaatccaagatgctgagtggaagtggaccctgggtgggcccggccctgtctttttcaggaaaattacatcctcccatggaggatgagagactgaggctcagggagggcaaggaataggcccaagatcacttggcaagctgggcacccaggacccccaggtgcttgacagagtcaccccatggtggtatggctgaacaaggagcggcagacaactcagggagaaactcaggagtgcagtaccagggacacctcaggacagattctctggccaggcccttccctgacccaataaatcctgaagaggtt

SEQ ID NO: 306560 - DNA, 1090 bp, Homo sapiens
gagcgattagcgccaacagctcagagaaaacgtgacgaaaaccagtctgtaaaacccgagcctgggagaggggcttcggtgcgcggggggaatttgcagacgctccctgctggcggagatttcctgacctgtccttcggcgcgggactttcggcgggtcccggccgggcagacccaagtgccggcggcggagactgcagtggagccagtaccggctgtagtggccggggccgtggcgggagagtcatgtcagagccgcagccgcggggcgcagagcgcgatctctaccgggacacgtgggtgcgatacctgggctatgccaatgaggtgggcgaggctttccgctctcttgtgccagcggcggtggtgtggctgagctatggcgtggccagctcctacgtgctggcggatgccattgacaaaggcaagaaggctggagaggtgcccagccctgaagcaggccgcagcgccagggtgactgtggctgtggtggacacctttgtatggcaggctctagcctctgtggccattccgggcttcaccatcaaccgcgtgtgtgctgcctctctctatgtcctgggcactgccacccgctggcccctggctgtccgcaagtggaccaccaccgcgcttgggctgttgaccatccccatcattatccaccccattgacaggtcggtggatttcctcctggactccagcctgcgcaagctctacccaacagtggggaagcccagctcctcctgatcatactctggtacctggcctgtgcatcggcctcctgcttcatgtcaacctcctactcctgccagggaatgtggacacctggctccctggtgtccaaagaccctggcacctgggtgggtttgagctggacagaagcttagagacaaaggcttcaagaagcagtggctgcagggagtcacagaagggcaggacctgaacgctgtctgcttccctggaatccaagatgctgagtggaagtggaccctgggtgggcccggccctgtctttgagtgcagtaccagggacacctcaggacagattctctggccaggcccttccctgacccaataaatcctgaagaggtt

SEQ ID NO: 306561 - DNA, 1064 bp, Homo sapiens
gagcgattagcgccaacagctcagagaaaacgtgacgaaaaccagtctgtaaaacccgagcctgggagaggggcttcggtgcgcggggggaatttgcagacgctccctgctggcggagatttcctgacctgtccttcggcgcgggactttcggcgggtcccggccgggcagacccaagtgccggcggcggagactgcagtggagccagtaccggctgtagtggccggggccgtggcgggagagtcatgtcagagccgcagccgcggggcgcagagcgcgatctctaccgggacacgtgggtgcgatacctgggctatgccaatgaggtgggcgaggctttccgctctcttgtgccagcggcggtggtgtggctgagctatggcgtggccagctcctacgtgctggcggatgccattgacaaaggcaagaaggctggagaggtgcccagccctgaagcaggccgcagcgccagggtgactgtggctgtggtggacacctttgtatggcaggctctagcctctgtggccattccgggcttcaccatcaaccgcgtgtgtgctgcctctctctatgtcctgggcactgccacccgctggcccctggctgtccgcaagtggaccaccaccgcgcttgggctgttgaccatccccatcattatccaccccattgacaggtcggtggatttcctcctggactccagcctgcgcaagctctacccaacagtggggaagcccagctcctcctgatcatactctggtacctggcctgtgcatcggcctcctgcttcatgtcaacctcctactcctgccagggaatgtggacacctggctccctggtgtccaaagaccctggcacctgggtgggtttgagctggacagaagcttagagacaaaggcttcaagaagcagtggctgcagggagtcacagaagggcaggacctgaacgctgtctgcttccctggaatccaagatgctgagtggaagtggaccctgggtgggcccggccctgtctttacagattctctggccaggcccttccctgacccaataaatcctgaagaggtt

SEQ ID NO: 306562 - DNA, 1197 bp, Homo sapiens
gagcgattagcgccaacagctcagagaaaacgtgacgaaaaccagtctgtaaaacccgagcctgggagaggggcttcggtgcgcggggggaatttgcagacgctccctgctggcggagatttcctgacctgtccttcggcgcgggactttcggcgggtcccggccgggcagacccaagtgccggcggcggagactgcagtggagccagtaccggctgtagtggccggggccgtggcgggagagtcatgtcagagccgcagccgcggggcgcagagcgcgatctctaccgggacacgtgggtgcgatacctgggctatgccaatgaggtgggcgaggctttccgctctcttgtgccagcggcggtggtgtggctgagctatggcgtggccagctcctacgtgctggcggatgccattgacaaaggcaagaaggctggagaggctctagcctctgtggccattccgggcttcaccatcaaccgcgtgtgtgctgcctctctctatgtcctgggcactgccacccgctggcccctggctgtccgcaagtggaccaccaccgcgcttgggctgttgaccatccccatcattatccaccccattgacaggtcggtggatttcctcctggactccagcctgcgcaagctctacccaacagtggggaagcccagctcctcctgatcatactctggtacctggcctgtgcatcggcctcctgcttcatgtcaacctcctactcctgccagggaatgtggacacctggctccctggtgtccaaagaccctggcacctgggtgggtttgagctggacagaagcttagagacaaaggcttcaagaagcagtggctgcagggagtcacagaagggcaggacctgaacgctgtctgcttccctggaatccaagatgctgagtggaagtggaccctgggtgggcccggccctgtctttttcaggaaaattacatcctcccatggaggatgagagactgaggctcagggagggcaaggaataggcccaagatcacttggcaagctgggcacccaggacccccaggtgcttgacagagtcaccccatggtggtatggctgaacaaggagcggcagacaactcagggagaaactcaggagtgcagtaccagggacacctcaggacagattctctggccaggcccttccctgacccaataaatcctgaagaggtt

SEQ ID NO: 306563 - DNA, 1604 bp, Homo sapiens
tcagtggcgctgccctcgatcactctgcccctctgggtgcctgtcacctcattagtgcagttactcctgggaccaagaccaggaaatctaaccaataagcaatggtaacagtgactcagtgctcagtccgccctcagtggcccgagtccgaggtgggcatcatggcaccagtttacatctcggaaagggaggctcagagaggtcaagtcacttgcctaaggtcacccagggactgcttagctggctaggatgagaaccagcctgctccaacgccccctcgtggaacagttgcgagcctaggaattaaatgttccctcccccaggctatgccaatgaggtgggcgaggctttccgctctcttgtgccagcggcggtggtgtggctgagctatggcgtggccagctcctacgtgctggcggatgccattgacaaaggcaagaaggctggagaggtgagtgttagcctattttccaacccccaaccctagctctcttcttgtgtggttcagtccacagccttgcatgtgataaagtccctgtgggacactccagtccctacaaccttgcctagtgcagtccatagacagtcctgtttgtaggacagtgtacccctgcccccacactcccactccccgaactggatgtggcagactgtaccccactcctgggtgcggacaagtccactggccacttgcccctcccggtctagcctcgtgccccttgtcgcaggattttctgcctctgccccagctggattaagtgtctctgcgcccaccagggtgcccagccctgaagcaggccgcagcgccagggtgactgtggctgtggtggacacctttgtatggcaggctctagcctctgtggccattccgggcttcaccatcaaccgcgtgtgtgctgcctctctctatgtcctgggcactgccacccgctggcccctggctgtccgcaagtggaccaccaccgcgcttgggctgttgaccatccccatcattatccaccccattgacaggtcggtggatttcctcctggactccagcctgcgcaagctctacccaacagtggggaagcccagctcctcctgatcatactctggtacctggcctgtgcatcggcctcctgcttcatgtcaacctcctactcctgccagggaatgtggacacctggctccctggtgtccaaagaccctggcacctgggtgggtttgagctggacagaagcttagagacaaaggcttcaagaagcagtggctgcagggagtcacagaagggcaggacctgaacgctgtctgcttccctggaatccaagatgctgagtggaagtggaccctgggtgggcccggccctgtctttttcaggaaaattacatcctcccatggaggatgagagactgaggctcagggagggcaaggaataggcccaagatcacttggcaagctgggcacccaggacccccaggtgcttgacagagtcaccccatggtggtatggctgaacaaggagcggcagacaactcagggagaaactcaggagtgcagtaccagggacacctcaggacagattctctggccaggcccttccctgacccaataaatcctgaagaggtt

SEQ ID NO: 306564 - DNA, 1033 bp, Homo sapiens
gagcgattagcgccaacagctcagagaaaacgtgacgaaaaccagtctgtaaaacccgagcctgggagaggggcttcggtgcgcggggggaatttgcagacgctccctgctggcggagatttcctgacctgtccttcggcgcgggactttcggcgggtcccggccgggcagacccaagtgccggcggcggagactgcagtggagccagtaccggctgtagtggccggggccgtggcgggagagtcatgtcagagccgcagccgcggggcgcagagcgcgatctctaccgggacacgtgggtgcgatacctgggctatgccaatgaggtgggcgaggctttccgctctcttgtgccagcggcggtggtgtggctgagctatggcgtggccagctcctacgtgctggcggatgccattgacaaaggcaagaaggctggagaggtcggtggatttcctcctggactccagcctgcgcaagctctacccaacagtggggaagcccagctcctcctgatcatactctggtacctggcctgtgcatcggcctcctgcttcatgtcaacctcctactcctgccagggaatgtggacacctggctccctggtgtccaaagaccctggcacctgggtgggtttgagctggacagaagcttagagacaaaggcttcaagaagcagtggctgcagggagtcacagaagggcaggacctgaacgctgtctgcttccctggaatccaagatgctgagtggaagtggaccctgggtgggcccggccctgtctttttcaggaaaattacatcctcccatggaggatgagagactgaggctcagggagggcaaggaataggcccaagatcacttggcaagctgggcacccaggacccccaggtgcttgacagagtcaccccatggtggtatggctgaacaaggagcggcagacaactcagggagaaactcaggagtgcagtaccagggacacctcaggacagattctctggccaggcccttccctgacccaataaatcctgaagaggtt

SEQ ID NO: 306565 - DNA, 1031 bp, Homo sapiens
tcagtggcgctgccctcgatcactctgcccctctgggtgcctgtcacctcattagtgcagttactcctgggaccaagaccaggaaatctaaccaataagcaatggtaacagtgactcagtgctcagtccgccctcagtggcccgagtccgaggtgggcatcatggcaccagtttacatctcggaaagggaggctcagagaggtcaagtcacttgcctaaggtcacccagggactgcttagctggctaggatgagaaccagcctgctccaacgccccctcgtggaacagttgcgagcctaggaattaaatgttccctcccccaggctatgccaatgaggtgggcgaggctttccgctctcttgtgccagcggcggtggtgtggctgagctatggcgtggccagctcctacgtgctggcggatgccattgacaaaggcaagaaggctggagaggtgagtgttagcctattttccaacccccaaccctagctctcttcttgtgtggttcagtccacagccttgcatgtgataaagtccctgtgggacactccagtccctacaaccttgcctagtgcagtccatagacagtcctgtttgtaggacagtgtacccctgcccccacactcccactccccgaactggatgtggcagactgtaccccactcctgggtgcggacaagtccactggccacttgcccctcccggtctagcctcgtgccccttgtcgcaggattttctgcctctgccccagctggattaagtgtctctgcgcccaccaggttcaggaaaattacatcctcccatggaggatgagagactgaggctcagggagggcaaggaataggcccaagatcacttggcaagctgggcacccaggacccccaggtgcttgacagagtcaccccatggtggtatggctgaacaaggagcggcagacaactcagggagaaactcaggagtgcagtaccagggacacctcaggacagattctctggccaggcccttccctgacccaataaatcctgaagaggtt

SEQ ID NO: 306566 - DNA, 844 bp, Homo sapiens
gagcgattagcgccaacagctcagagaaaacgtgacgaaaaccagtctgtaaaacccgagcctgggagaggggcttcggtgcgcggggggaatttgcagacgctccctgctggcggagatttcctgacctgtccttcggcgcgggactttcggcgggtcccggccgggcagacccaagtgccggcggcggagactgcagtggagccagtaccggctgtagtggccggggccgtggcgggagagtcatgtcagagccgcagccgcggggcgcagagcgcgatctctaccgggacacgtgggtgcgatacctgggctatgccaatgaggtgggcgaggctttccgctctcttgtgccagcggcggtggtgtggctgagctatggcgtggccagctcctacgtgctggcggatgccattgacaaaggcaagaaggctggagaggtgcccagccctgaagcaggccgcagcgccagggtgactgtggctgtggtggacacctttgtatggcaggctctagcctctgtggccattccgggcttcaccatcaaccgcgtgtgtgctgcctctctctatgtcctgggcactgccacccgctggcccctggctgtccgcaagtggaccaccaccgcgcttgggctgttgaccatcccctcccgtgggaagtgacttcccacgggagccactcagtgtgacctggagcgaaagcggacagggcgtgaccgccagaaacttcccacccagccaggatgcctccggggacctgtacaccacgagcagccagctgaccctgccggccacacagtgcctagccggcaagtccgtgacatgccacgtgaagcactaca

SEQ ID NO: 306567 - DNA, 482 bp, Homo sapiens
ctgacattctccttaatggagaaagatggagtgttttcctcttaagatccggaacaaggcaagcatgtttgcttttgtttttgccacttttatataacattgtacttgatattctagccagggcaatcactcaagaaaaataaggggtatccagattagaaagtaggaagtaaaaatacctctatttgtcaatgacgtgatatcttgtatacagaaaatcctaaggaatcctccgaaaaacagaactaagcaagttcagcaatgtggcaggatataaaattgatatcctggctaacacggtgaaaccccgtctctactaaaaatacaaaaaattagctgggtgtggtggcaggtgcttgtagtcccagctactcaggaggctgaggcaggagaacggcgtgaacccgggaggcagagcttgcagtgagctgagattgcaccactgcactccagcctgggcaacagagcgagactccatctca

SEQ ID NO: 306568 - DNA, 3586 bp, Homo sapiens
tcttgcgaagtttttcttgattccgccaatccacacagtttcctttataaaatggaaaagcatgaactaaaaaacccagaaatagctatctggcttagatttacaggataaaatctccatgtctgtaaaaactttaaggcagaaatttgggatttatggtacaaaccctttaagggactgtgagtcagtaatacccacagcactcaacattgtgagtttccacacatccctggacttgagtgagtctttccaagtgtttgttaatggtacaaatgatgacaaaattagtggttcaaaaatattaaagtgcacatgctttttgctttctctatgtatacagagattacatatatgtatactttctagcgtctagcaagtatggtatggctagggataattatgtttttctgattattttgtttcccatcaaacaccccacgaattttacagcagaccgccttcttgtcaccatttgaaagaatgtggtcagaaaagtaatgcaaaaactgccactttggttttgtctgtaccttccaggtcatatctccgtacctcacttcctgacacaaacaagttttcactgttgtcagcaacaaagccctaatatagctgcggaagagaaaaactgcattgcattttgcctcctgcaagcatcatcaacagttactggaggaacgtaattccagaaagcttgaaagccgtggtgatggtaattatgtatcaaatgcctggttctatttctgttattattgttttgtcatttctgttttcccagcgatctgactgaactcgcagagggacaaatccagtttttctttttgacttttgtcaaactaaatcaggcctgatagaaaactcattgctctccggggaaacaaagtaggagccacgaaatgtcattttaacagagcgtgggtttggtgactgtaggaaaggatttgaggacgctccttctgttcggcttcctatgtcatgagcacaggctccacgcacgcacagacaccacggctcccggatgctgtggctccccgatcggggctcctgcagcgccagaagcccctccgggatgcttcgaggggctcccggtgggtggaggtacggacgccgctgcggccgccgccgccagtcctgctgctgttgttgctgctgcagtcacgtgggagcccctttaagtttccatagagaggcctctctggtgtcacatgatggacatgatataatgaaacaacattgtggagaggaaagcattaggggagcccacggctacaaaaacaagtgagtgagaagaggtgggaggaagagaaactacgccacctcccctgcagccgagtgcacgcagcagcctggcgtgacaagtgggcgacgccggggggcagggagccggggtccttggccctggccggggaccccaccgcccaccgcgcggaggacaacttttagccggcagcccagaccagcgcggcacctgtctccggagtctccaccgctcctcccgattcatcccagggaaattctcaagaatacgctctacaaatctacgtgcgcatcattttcacctcgcgtcgcgcccgggaggaaggaacgaggcaaggagctaaagcagcgtgcgttcagccctggggcattttattaatgcttttacgagttagaagagttgggataatttgccatctggagtttctctgccttgctgatctgagctcagacctgccaatttaccagagataattgataacaccctgtaacagctgagaggaaaatggaagaaacggagatacttttagtgaagcagaataaaccactgaacagatggagtctcactctgttgcccagactggaatgcagtggtgtgatctcaactgactgcaacctccgtatcctgggttcaagcaactctcctgctgcagccacgaaaaatgaggaagctgtgagtaccagtggaaggaacgagccaggaagagggactggaaccatctcagaagccatgcccctcaggctggaacttgccctgtctcctcgcagatgaggtaggaggctcagcacgggctggtgggagcagcccacagcagcagtgagggtcagtgggcctgtgagttaagaagaaggtggcacagagcgagggtctctggatcctgactgtttgacttttccatgattaggataagtagccagggcttggctagttggagagttactcgaacctcaggtgacagttgtaaggcagcacatagtgaaaaagagtcctagcctgggaaagtccaaaaccttgggtctggtttcagttcactcacctatctctgtgacatagcaaagtctgttaatttctctaattttctgattagtagtatagttgcaggaatgaaataaaaatggtcctgattactcagagattcatttactgattactctttttgtgacctgaataaagagtacaacatctctcaaaaggtaacaatatgatgtttcaggaaattagagaagttaagagactttgctgtatttactatacagatagttgactgacagctgagcccggacccaagattcatttataaaatgaaggagttgagaagtacatactctgaggtttatcctaaataaactaaagtctaggcaagtggctgagctaggtttgccatgaatcaatctgctgagtatatttcttggtaactagttcatctttccttaattcagtcaacaaatatgatatcaagtttagtaagatgatgacagatgtcatgtaatactccatctggaagattgtatgcttctcagcttccctaacttttcttaatctaccttaagcttcctttctgaaaggtttctgtctttcctaacagtctcttctttccgccagctacctcttgtgtttaagaattgagggaagatgagctaggaatcaagaaatacgcagaactgattcctgtcactggcgccaccctgccacttgcccagagctgtggtataaatttttttaataggctgaaataaaaatatgaatagcattttggtattaagcattaaattgataaaggctatgagatacacctgctctcaaccatgttaattttttattattggtattaataaattattacttactaacatattaacaagaattgcattgagaaacaaagcatccacaggccaaatcttctgaatttcaaatgtttatattaatgcgttgtattctagaaaagtagaattgtcttaagtagctttgtaatataaagtcatctatcagcccattacacctattagaatgttttaacctttatttcccacttttttgtttctagactgagtgtacttggtctggtatttgtggcataacttacggaacacataagaatgatacagatactatttaatgatgacctaatacaagcttagatagctaaggtgaaagcttctatggccttaacattttcctcttgaagaatgtattttctgtaataaaatacagtggctacttgaaatctataaacttatgtgaggtctggataaatctgagcaactttcttctttgtgctccaggaacctacgcactatatatataaataaagcttaagtaaacatcaaaaaa

SEQ ID NO: 306569 - DNA, 3140 bp, Homo sapiens
acgctggggcttggcagcagaagggatgggaccagagagaagggtgtggaggagaccccagtgagggccaggacatttcaggtaaagagaggtcatatctccgtacctcacttcctgacacaaacaagttttcactgttgtcagcaacaaagccctaatatagctgcggaagagaaaaactgcattgcattttgcctcctgcaagcatcatcaacagttactggaggaacgtaattccagaaagcttgaaagccgtggtgatggtaattatgtatcaaatgcctggttctatttctgttattattgttttgtcatttctgttttcccagcgatctgactgaactcgcagagggacaaatccagtttttctttttgacttttgtcaaactaaatcaggcctgatagaaaactcattgctctccggggaaacaaagtaggagccacgaaatgtcattttaacagagcgtgggtttggtgactgtaggaaaggatttgaggacgctccttctgttcggcttcctatgtcatgagcacaggctccacgcacgcacagacaccacggctcccggatgctgtggctccccgatcggggctcctgcagcgccagaagcccctccgggatgcttcgaggggctcccggtgggtggaggtacggacgccgctgcggccgccgccgccagtcctgctgctgttgttgctgctgcagtcacgtgggagcccctttaagtttccatagagaggcctctctggtgtcacatgatggacatgatataatgaaacaacattgtggagaggaaagcattaggggagcccacggctacaaaaacaagtgagtgagaagaggtgggaggaagagaaactacgccacctcccctgcagccgagtgcacgcagcagcctggcgtgacaagtgggcgacgccggggggcagggagccggggtccttggccctggccggggaccccaccgcccaccgcgcggaggacaacttttagccggcagcccagaccagcgcggcacctgtctccggagtctccaccgctcctcccgattcatcccagggaaattctcaagaatacgctctacaaatctacgtgcgcatcattttcacctcgcgtcgcgcccgggaggaaggaacgaggcaaggagctaaagcagcgtgcgttcagccctggggcattttattaatgcttttacgagttagaagagttgggataatttgccatctggagtttctctgccttgctgatctgagctcagacctgccaatttaccagagataattgataacaccctgtaacagctgagaggaaaatggaagaaacggagatacttttagtgaagcagaataaaccactgaacagatggagtctcactctgttgcccagactggaatgcagtggtgtgatctcaactgactgcaacctccgtatcctgggttcaagcaactctcctgctgcagccacgaaaaatgaggaagctgtgagtaccagtggaaggaacgagccaggaagagggactggaaccatctcagaagccatgcccctcaggctggaacttgccctgtctcctcgcagatgaggtaggaggctcagcacgggctggtgggagcagcccacagcagcagtgagggtcagtgggcctgtgagttaagaagaaggtggcacagagcgagggtctctggatcctgactgtttgacttttccatgattaggataagtagccagggcttggctagttggagagttactcgaacctcaggtgacagttgtaaggcagcacatagtgaaaaagagtcctagcctgggaaagtccaaaaccttgggtctggtttcagttcactcacctatctctgtgacatagcaaagtctgttaatttctctaattttctgattagtagtatagttgcaggaatgaaataaaaatggtcctgattactcagagattcatttactgattactctttttgtgacctgaataaagagtacaacatctctcaaaaggtaacaatatgatgtttcaggaaattagagaagttaagagactttgctgtatttactatacagatagttgactgacagctgagcccggacccaagattcatttataaaatgaaggagttgagaagtacatactctgaggtttatcctaaataaactaaagtctaggcaagtggctgagctaggtttgccatgaatcaatctgctgagtatatttcttggtaactagttcatctttccttaattcagtcaacaaatatgatatcaagtttagtaagatgatgacagatgtcatgtaatactccatctggaagattgtatgcttctcagcttccctaacttttcttaatctaccttaagcttcctttctgaaaggtttctgtctttcctaacagtctcttctttccgccagctacctcttgtgtttaagaattgagggaagatgagctaggaatcaagaaatacgcagaactgattcctgtcactggcgccaccctgccacttgcccagagctgtggtataaatttttttaataggctgaaataaaaatatgaatagcattttggtattaagcattaaattgataaaggctatgagatacacctgctctcaaccatgttaattttttattattggtattaataaattattacttactaacatattaacaagaattgcattgagaaacaaagcatccacaggccaaatcttctgaatttcaaatgtttatattaatgcgttgtattctagaaaagtagaattgtcttaagtagctttgtaatataaagtcatctatcagcccattacacctattagaatgttttaacctttatttcccacttttttgtttctagactgagtgtacttggtctggtatttgtggcataacttacggaacacataagaatgatacagatactatttaatgatgacctaatacaagcttagatagctaaggtgaaagcttctatggccttaacattttcctcttgaagaatgtattttctgtaataaaatacagtggctacttgaaatctataaacttatgtgaggtctggataaatctgagcaactttcttctttgtgctccaggaacctacgcactatatatataaataaagcttaagtaaacatcaaaaaa

SEQ ID NO: 306570 - DNA, 3533 bp, Homo sapiens
tcttgcgaagtttttcttgattccgccaatccacacagtttcctttataaaatggaaaagcatgaactaaaaaacccagaaatagctatctggcttagatttacaggataaaatctccatgtctgtaaaaactttaaggcagaaatttgggatttatggtacaaaccctttaagggactgtgagtcagtaatacccacagcactcaacattgtgagtttccacacatccctggacttgagtgagtctttccaagtgtttgttaatggtacaaatgatgacaaaattagtggttcaaaaatattaaagtgcacatgctttttgctttctctatgtatacagagattacatatatgtatactttctagcgtctagcaagtatggtatggctagggataattatgtttttctgattattttgtttcccatcaaacaccccacgaattttacagcagaccgccttcttgtcaccatttgaaagaatgtggtcagaaaagtaatgcaaaaactgccactttggttttgtctgtaccttccaggtcatatctccgtacctcacttcctgacacaaacaagttttcactgttgtcagcaacaaagccctaatatagctgcggaagagaaaaactgcattgcattttgcctcctgcaagcatcatcaacagttactggaggaacgtaattccagaaagcttgaaagccgtggtgatggtaattatgtatcaaatgcctggttctatttctgttattattgttttgtcatttctgttttcccagcgatctgactgaactcgcagagggacaaatccagtttttctttttgacttttgtcaaactaaatcaggcctgatagaaaactcattgctctccggggaaacaaagtaggagccacgaaatgtcattttaacagagcgtgggtttggtgactgtaggaaaggatttgaggacgctccttctgttcggcttcctatgtcatgagcacaggctccacgcacgcacagacaccacggctcccggatgctgtggctccccgatcggggctcctgcagcgccagaagcccctccgggatgcttcgaggggctcccggtgggtggaggtacggacgccgctgcggccgccgccgccagtcctgctgctgttgttgctgctgcagtcacgtgggagcccctttaagtttccatagagaggcctctctggtgtcacatgatggacatgatataatgaaacaacattgtggagaggaaagcattaggggagcccacggctacaaaaacaagtgagtgagaagaggtgggaggaagagaaactacgccacctcccctgcagccgagtgcacgcagcagcctggcgtgacaagtgggcgacgccggggggcagggagccggggtccttggccctggccggggaccccaccgcccaccgcgcggaggacaacttttagccggcagcccagaccagcgcggcacctgtctccggagtctccaccgctcctcccgattcatcccagggaaattctcaagaatacgctctacaaatctacgtgcgcatcattttcacctcgcgtcgcgcccgggaggaaggaacgaggcaaggagctaaagcagcgtgcgttcagccctggggcattttattaatgcttttacgagttagaagagttgggataatttgccatctggagtttctctgccttgctgatctgagctcagacctgccaatttaccagagataattgataacaccctgtaacagctgagaggaaaatggaagaaacggagatacttttagtgaagcagaataaaccactgaacagatggagtctcactctgttgcccagactggaatgcagtggtgtgatctcaactgactgcaacctccgtatcctgggttcaagcaactctcctgctgcagccacgaaaaatgaggaagctgtgagtaccagtggaaggaacgagccaggaagagggactggaaccatctcagaagccatgcccctcaggctggaacttgccctgtctcctcgcagatgaggtaggaggctcagcacgggctggtgggagcagcccacagcagcagtgagggtcagtgggcctgtgagttaagaagaaggtggcacagagcgagggtctctggatcctgactgtttgacttttccatgattaggataagtagccagggcttggctagttggagagttactcgaacctcaggtgacagttgtaaggcagcacatagtgaaaaagagtcctagcctgggaaagtccaaaaccttgggtctggtttcagttcactcacctatctctgtgacatagcaaagtctgttaatttctctaattttctgattagtagtatagttgcaggaatgaaataaaaatggtcctgattactcagagattcatttactgattactctttttgtgacctgaataaagagtacaacatctctcaaaaggtaacaatatgatgtttcaggaaattagagaagttaagagactttgctgtatttactatacagatagttgactgacagctgagcccggacccaagattcatttataaaatgaaggagttgagaagtacatactctgaggtttatcctaaataaactaaagtctaggcaagtggctgagctaggtttgccatgaatcaatctgctgagtatatttcttggtaactagttcatctttccttaattcagtcaacaaatatgatatcaagtttagtaagatgatgacagatgtcatgtaatactccatctggaagattgtatgcttctcagcttccctaacttttcttaatctaccttaagcttcctttctgaaaggtttctgtctttcctaacagtctcttctttccgccagctacctcttgtgtttaagaattgagggaagatgagctaggaatcaagaaatacgcagaactgattcctgtcactggcgccaccctgccacttgcccagagctgtggtataaatttttttaataggctgaaatatacacctgctctcaaccatgttaattttttattattggtattaataaattattacttactaacatattaacaagaattgcattgagaaacaaagcatccacaggccaaatcttctgaatttcaaatgtttatattaatgcgttgtattctagaaaagtagaattgtcttaagtagctttgtaatataaagtcatctatcagcccattacacctattagaatgttttaacctttatttcccacttttttgtttctagactgagtgtacttggtctggtatttgtggcataacttacggaacacataagaatgatacagatactatttaatgatgacctaatacaagcttagatagctaaggtgaaagcttctatggccttaacattttcctcttgaagaatgtattttctgtaataaaatacagtggctacttgaaatctataaacttatgtgaggtctggataaatctgagcaactttcttctttgtgctccaggaacctacgcactatatatataaataaagcttaagtaaacatcaaaaaa

SEQ ID NO: 306571 - DNA, 2756 bp, Homo sapiens
tcttgcgaagtttttcttgattccgccaatccacacagtttcctttataaaatggaaaagcatgaactaaaaaacccagaaatagctatctggcttagatttacaggataaaatctccatgtctgtaaaaactttaaggcagaaatttgggatttatggtacaaaccctttaagggactgtgagtcagtaatacccacagcactcaacattgtgagtttccacacatccctggacttgagtgagtctttccaagtgtttgttaatggtacaaatgatgacaaaattagtggttcaaaaatattaaagtgcacatgctttttgctttctctatgtatacagagattacatatatgtatactttctagcgtctagcaagtatggtatggctagggataattatgtttttctgattattttgtttcccatcaaacaccccacgaattttacagcagaccgccttcttgtcaccatttgaaagaatgtggtcagaaaagtaatgcaaaaactgccactttggttttgtctgtaccttccaggtcatatctccgtacctcacttcctgacacaaacaagttttcactgttgtcagcaacaaagccctaatatagctgcggaagagaaaaactgcattgcattttgcctcctgcaagcatcatcaacagttactggaggaacgtaattccagaaagcttgaaagccgtggtgatggtaattatgtatcaaatgcctggttctatttctgttattattgttttgtcatttctgttttcccagcgatctgactgaactcgcagagggacaaatccagtttttctttttgacttttgtcaaactaaatcaggcctgatagaaaactcattgctctccggggaaacaaagtaggagccacgaaatgtcattttaacagagcgtgggtttggtgactgtaggaaaggatttgaggacgctccttctgttcggcttcctatgtcatgagcacaggctccacgcacgcacagacaccacggctcccggatgctgtggctccccgatcggggctcctgcagcgccagaagcccctccgggatgcttcgaggggctcccggtgggtggaggtacggacgccgctgcggccgccgccgccagtcctgctgctgttgttgctgctgcagtcacgtgggagcccctttaagtttccatagagaggcctctctggtgtcacatgatggacatgatataatgaaacaacattgtggagaggaaagcattaggggagcccacggctacaaaaacaagtgagtgagaagaggtgggaggaagagaaactacgccacctcccctgcagccgagtgcacgcagcagcctggcgtgacaagtgggcgacgccggggggcagggagccggggtccttggccctggccggggaccccaccgcccaccgcgcggaggacaacttttagccggcagcccagaccagcgcggcacctgtctccggagtctccaccgctcctcccgattcatcccagggaaattctcaagaatacgctctacaaatctacgtgcgcatcattttcacctcgcgtcgcgcccgggaggaaggaacgaggcaaggagctaaagcagcgtgcgttcagccctggggcattttattaatgcttttacgagttagaagagttgggataatttgccatctggagtttctctgccttgctgatctgagctcagacctgccaatttaccagagataattgataacaccctgtaacagctgagaggaaaatggaagaaacggagatacttttagtgaagcagaataaaccactgaacagatggagtctcactctgttgcccagactggaatgcagtggtgtgatctcaactgactgcaacctccgtatcctgggttcaagcaactctcctgctgcagccacgaaaaatgaggaagctgtgagtaccagtggaaggaacgagccaggaagagggactggaaccatctcagaagccatgcccctcaggctggaacttgccctgtctcctcgcagatgagctacctcttgtgtttaagaattgagggaagatgagctaggaatcaagaaatacgcagaactgattcctgtcactggcgccaccctgccacttgcccagagctgtggtataaatttttttaataggctgaaataaaaatatgaatagcattttggtattaagcattaaattgataaaggctatgagatacacctgctctcaaccatgttaattttttattattggtattaataaattattacttactaacatattaacaagaattgcattgagaaacaaagcatccacaggccaaatcttctgaatttcaaatgtttatattaatgcgttgtattctagaaaagtagaattgtcttaagtagctttgtaatataaagtcatctatcagcccattacacctattagaatgttttaacctttatttcccacttttttgtttctagactgagtgtacttggtctggtatttgtggcataacttacggaacacataagaatgatacagatactatttaatgatgacctaatacaagcttagatagctaaggtgaaagcttctatggccttaacattttcctcttgaagaatgtattttctgtaataaaatacagtggctacttgaaatctataaacttatgtgaggtctggataaatctgagcaactttcttctttgtgctccaggaacctacgcactatatatataaataaagcttaagtaaacatcaaaaaa

SEQ ID NO: 306572 - DNA, 2600 bp, Homo sapiens
tcttgcgaagtttttcttgattccgccaatccacacagtttcctttataaaatggaaaagcatgaactaaaaaacccagaaatagctatctggcttagatttacaggataaaatctccatgtctgtaaaaactttaaggcagaaatttgggatttatggtacaaaccctttaagggactgtgagtcagtaatacccacagcactcaacattgtgagtttccacacatccctggacttgagtgagtctttccaagtgtttgttaatggtacaaatgatgacaaaattagtggttcaaaaatattaaagtgcacatgctttttgctttctctatgtatacagagattacatatatgtatactttctagcgtctagcaagtatggtatggctagggataattatgtttttctgattattttgtttcccatcaaacaccccacgaattttacagcagaccgccttcttgtcaccatttgaaagaatgtggtcagaaaagtaatgcaaaaactgccactttggttttgtctgtaccttccaggtcatatctccgtacctcacttcctgacacaaacaagttttcactgttgtcagcaacaaagccctaatatagctgcggaagagaaaaactgcattgcattttgcctcctgcaagcatcatcaacagttactggaggaacgtaattccagaaagcttgaaagccgtggtgatggtaattatgtatcaaatgcctggttctatttctgttattattgttttgtcatttctgttttcccagcgatctgactgaactcgcagagggacaaatccagtttttctttttgacttttgtcaaactaaatcaggcctgatagaaaactcattgctctccggggaaacaaagtaggagccacgaaatgtcattttaacagagcgtgggtttggtgactgtaggaaaggatttgaggacgctccttctgttcggcttcctatgtcatgagcacaggctccacgcacgcacagacaccacggctcccggatgctgtggctccccgatcggggctcctgcagcgccagaagcccctccgggatgcttcgaggggctcccggtgggtggaggtacggacgccgctgcggccgccgccgccagtcctgctgctgttgttgctgctgcagtcacgtgggagcccctttaagtttccatagagaggcctctctggtgtcacatgatggacatgatataatgaaacaacattgtggagaggaaagcattaggggagcccacggctacaaaaacaagtgagtgagaagaggtgggaggaagagaaactacgccacctcccctgcagccgagtgcacgcagcagcctggcgtgacaagtgggcgacgccggggggcagggagccggggtccttggccctggccggggaccccaccgcccaccgcgcggaggacaacttttagccggcagcccagaccagcgcggcacctgtctccggagtctccaccgctcctcccgattcatcccagggaaattctcaagaatacgctctacaaatctacgtgcgcatcattttcacctcgcgtcgcgcccgggaggaaggaacgaggcaaggagctaaagcagcgtgcgttcagccctggggcattttattaatgcttttacgagttagaagagttgggataatttgccatctggagtttctctgccttgctgatctgagctcagacctgccaatttaccagagataattgataacaccctgtaacagctgagaggaaaatggaagaaacggagatacttttagtgaagcagaataaaccactgaacagtggaaccatctcagaagccatgcccctcaggctggaacttgccctgtctcctcgcagatgagctacctcttgtgtttaagaattgagggaagatgagctaggaatcaagaaatacgcagaactgattcctgtcactggcgccaccctgccacttgcccagagctgtggtataaatttttttaataggctgaaataaaaatatgaatagcattttggtattaagcattaaattgataaaggctatgagatacacctgctctcaaccatgttaattttttattattggtattaataaattattacttactaacatattaacaagaattgcattgagaaacaaagcatccacaggccaaatcttctgaatttcaaatgtttatattaatgcgttgtattctagaaaagtagaattgtcttaagtagctttgtaatataaagtcatctatcagcccattacacctattagaatgttttaacctttatttcccacttttttgtttctagactgagtgtacttggtctggtatttgtggcataacttacggaacacataagaatgatacagatactatttaatgatgacctaatacaagcttagatagctaaggtgaaagcttctatggccttaacattttcctcttgaagaatgtattttctgtaataaaatacagtggctacttgaaatctataaacttatgtgaggtctggataaatctgagcaactttcttctttgtgctccaggaacctacgcactatatatataaataaagcttaagtaaacatcaaaaaa

SEQ ID NO: 306573 - DNA, 3483 bp, Homo sapiens
tcttgcgaagtttttcttgattccgccaatccacacagtttcctttataaaatggaaaagcatgaactaaaaaacccagaaatagctatctggcttagatttacaggataaaatctccatgtctgtaaaaactttaaggcagaaatttgggatttatggtacaaaccctttaagggactgtgagtcagtaatacccacagcactcaacattgtgagtttccacacatccctggacttgagtgagtctttccaagtgtttgttaatggtacaaatgatgacaaaattagtggttcaaaaatattaaagtgcacatgctttttgctttctctatgtatacagagattacatatatgtatactttctagcgtctagcaagtatggtatggctagggataattatgtttttctgattattttgtttcccatcaaacaccccacgaattttacagcagaccgccttcttgtcaccatttgaaagaatgtggtcagaaaagtaatgcaaaaactgccactttggttttgtctgtaccttccaggtcatatctccgtacctcacttcctgacacaaacaagttttcactgttgtcagcaacaaagccctaatatagctgcggaagagaaaaactgcattgcattttgcctcctgcaagcatcatcaacagttactggaggaacgtaattccagaaagcttgaaagccgtggtgatggtaattatgtatcaaatgcctggttctatttctgttattattgttttgtcatttctgttttcccagcgatctgactgaactcgcagagggacaaatccagtttttctttttgacttttgtcaaactaaatcaggcctgatagaaaactcattgctctccggggaaacaaagtaggagccacgaaatgtcattttaacagagcgtgggtttggtgactgtaggaaaggatttgaggacgctccttctgttcggcttcctatgtcatgagcacaggctccacgcacgcacagacaccacggctcccggatgctgtggctccccgatcggggctcctgcagcgccagaagcccctccgggatgcttcgaggggctcccggtgggtggaggtacggacgccgctgcggccgccgccgccagtcctgctgctgttgttgctgctgcagtcacgtgggagcccctttaagtttccatagagaggcctctctggtgtcacatgatggacatgatataatgaaacaacattgtggagaggaaagcattaggggagcccacggctacaaaaacaagtgagtgagaagaggtgggaggaagagaaactacgccacctcccctgcagccgagtgcacgcagcagcctggcgtgacaagtgggcgacgccggggggcagggagccggggtccttggccctggccggggaccccaccgcccaccgcgcggaggacaacttttagccggcagcccagaccagcgcggcacctgtctccggagtctccaccgctcctcccgattcatcccagggaaattctcaagaatacgctctacaaatctacgtgcgcatcattttcacctcgcgtcgcgcccgggaggaaggaacgaggcaaggagctaaagcagcgtgcgttcagccctggggcattttattaatgcttttacgagttagaagagttgggataatttgccatctggagtttctctgccttgctgatctgagctcagacctgccaatttaccagagataattgataacaccctgtaacagctgagaggaaaatggaagaaacggagatacttttagtgaagcagaataaaccactgaacagatggagtctcactctgttgcccagactggaatgcagtggtgtgatctcaactgactgcaacctccgtatcctgggttcaagcaactctcctgctgcagccacgaaaaatgaggaagctgtgagtaccagtggaaggaacgagccaggaagagggactggaaccatctcagaagccatgcccctcaggctggaacttgccctgtctcctcgcagatgaggtaggaggctcagcacgggctggtgggagcagcccacagcagcagtgagggtcagtgggcctgtgagttaagaagaaggtggcacagagcgagggtctctggatcctgactgtttgacttttccatgattaggataagtagccagggcttggctagttggagagttactcgaacctcaggtgacagttgtaaggcagcacatagtgaaaaagagtcctagcctgggaaagtccaaaaccttgggtctggtttcagttcactcacctatctctgtgacatagcaaagtctgttaatttctctaattttctgattagtagtatagttgcaggaatgaaataaaaatggtcctgattactcagagattcatttactgattactctttttgtgacctgaataaagagtacaacatctctcaaaaggtaacaatatgatgtttcaggaaattagagaagttaagagactttgctgtatttactatacagatagttgactgacagctgagcccggacccaagattcatttataaaatgaaggagttgagaagtacatactctgaggtttatcctaaataaactaaagtctaggcaagtggctgagctaggtttgccatgaatcaatctgctgagtatatttcttggtaactagttcatctttccttaattcagtcaacaaatatgatatcaagtttagtaagatgatgacagatgtcatgtaatactccatctggaagattgtatgcttctcagcttccctaacttttcttaatctaccttaagcttcctttctgaaaggtttctgtctttcctaacagtctcttctttccgccagctacctcttgtgtttaagaattgagggaagatgagctaggaatcaagaaatacgcagaactgattcctgtcactggcgccaccctgccacttgcccagagctgtggtataaatttttttaataggctgaaataaaaatatgaatagcattttggtattaagcattaaattgataaaggctatgagatacacctgctctcaaccatgttaattttttattattggtattaataaattattacttactaacatattaacaagaattgcattgagaaacaaagcatccacaggccaaatcttctgaatttcaaatgtttatattaatgcgttgtattctagaaaagtagaattgtcttaagtagctttgtaatataaagtcatctatcagcccattacacctattagaatgttttaacctttatttcccacttttttgtttctagactgagtgtacttggtctggtatttgtggcataacttacggaacacataagaatgatacagatactatttaatgatgacctaatacaagcttagatagctaaggtgaaagcttctatggccttaacattttcctcttgaagaatgtattttctgtaataaaatacagtggctacttgaaatcta

SEQ ID NO: 306574 - DNA, 2305 bp, Homo sapiens
tcttgcgaagtttttcttgattccgccaatccacacagtttcctttataaaatggaaaagcatgaactaaaaaacccagaaatagctatctggcttagatttacaggataaaatctccatgtctgtaaaaactttaaggcagaaatttgggatttatggtacaaaccctttaagggactgtgagtcagtaatacccacagcactcaacattgtgagtttccacacatccctggacttgagtgagtctttccaagtgtttgttaatggtacaaatgatgacaaaattagtggttcaaaaatattaaagtgcacatgctttttgctttctctatgtatacagagattacatatatgtatactttctagcgtctagcaagtatggtatggctagggataattatgtttttctgattattttgtttcccatcaaacaccccacgaattttacagcagaccgccttcttgtcaccatttgaaagaatgtggtcagaaaagtaatgcaaaaactgccactttggttttgtctgtaccttccaggtcatatctccgtacctcacttcctgacacaaacaagttttcactgttgtcagcaacaaagccctaatatagctgcggaagagaaaaactgcattgcattttgcctcctgcaagcatcatcaacagttactggaggaacgtaattccagaaagcttgaaagccgtggtgatggtaattatgtatcaaatgcctggttctatttctgttattattgttttgtcatttctgttttcccagcgatctgactgaactcgcagagggacaaatccagtttttctttttgacttttgtcaaactaaatcaggcctgatagaaaactcattgctctccggggaaacaaagtaggagccacgaaatgtcattttaacagagcgtgggtttggtgactgtaggaaaggatttgaggacgctccttctgttcggcttcctatgtcatgagcacaggctccacgcacgcacagacaccacggctcccggatgctgtggctccccgatcggggctcctgcagcgccagaagcccctccgggatgcttcgaggggctcccggtgggtggaggtacggacgccgctgcggccgccgccgccagtcctgctgctgttgttgctgctgcagtcacgtgggagcccctttaagtttccatagagaggcctctctggtgtcacatgatggacatgatataatgaaacaacattgtggagaggaaagcattaggggagcccacggctacaaaaacaagtgagtgagaagaggtgggaggaagagaaactacgccacctcccctgcagccgagtgcacgcagcagcctggcgtgacaagtgggcgacgccggggggcagggagccggggtccttggccctggccggggaccccaccgcccaccgcgcggaggacaacttttagccggcagcccagaccagcgcggcacctgtctccggagtctccaccgctcctcccgattcatcccagggaaattctcaagaatacgctctacaaatctacgtgcgcatcattttcacctcgcgtcgcgcccgggaggaaggaacgaggcaaggagctaaagcagcgtgcgttcagccctggggcattttattaatgcttttacgagttagaagagttgggataatttgccatctggagtttctctgccttgctgatctgagctcagacctgccaatttaccagagataattgataacaccctgtaacagctgagtaagtagattcttctgttttactgcttttaaaaaaagtttaaagttttaaaatagtataaactttaattgggttctttaaattttgttgttgaataatgcaattattatgatattttgtgaatatttgtaaataatgggattctggaataaattaatccccgatgatagaaaagagttaatgaacactttctccatacataacactttagcattcaagaaacataggacttaaatacatatattaaaaatttaggccaggtgcagtggctcacgcctgtaatcccagcactttgggaggctgaggcgggcagatcacctgaggtcaggagtttgagaccagcctagccaacatggtgaaatcccatctcggctaaaaatgcaaaaattagccaggcatggtggcaggtgcctgtaatcccagctactctggaggctgaggcaggagaatcacttgaacctgggaggcagaggttgcagtgagctgagactgtgccactgcactccagtctgggcgacagagaggctctgtctcaaaaaaaaaaaaaaaaaaa

SEQ ID NO: 306575 - DNA, 1786 bp, Homo sapiens
gcagcacgcagcctccagtcttgagtgactcctgggctttggctcagcagtaactcctccataaaaacaagtgtgtgcatctggctgttagaagaattcatgctcatccgggaaaaatgaggaagctgtgagtaccagtggaaggaacgagccaggaagagggactggaaccatctcagaagccatgcccctcaggctggaacttgccctgtctcctcgcagatgaggtaggaggctcagcacgggctggtgggagcagcccacagcagcagtgagggtcagtgggcctgtgagttaagaagaaggtggcacagagcgagggtctctggatcctgactgtttgacttttccatgattaggataagtagccagggcttggctagttggagagttactcgaacctcaggtgacagttgtaaggcagcacatagtgaaaaagagtcctagcctgggaaagtccaaaaccttgggtctggtttcagttcactcacctatctctgtgacatagcaaagtctgttaatttctctaattttctgattagtagtatagttgcaggaatgaaataaaaatggtcctgattactcagagattcatttactgattactctttttgtgacctgaataaagagtacaacatctctcaaaaggtaacaatatgatgtttcaggaaattagagaagttaagagactttgctgtatttactatacagatagttgactgacagctgagcccggacccaagattcatttataaaatgaaggagttgagaagtacatactctgaggtttatcctaaataaactaaagtctaggcaagtggctgagctaggtttgccatgaatcaatctgctgagtatatttcttggtaactagttcatctttccttaattcagtcaacaaatatgatatcaagtttagtaagatgatgacagatgtcatgtaatactccatctggaagattgtatgcttctcagcttccctaacttttcttaatctaccttaagcttcctttctgaaaggtttctgtctttcctaacagtctcttctttccgccagctacctcttgtgtttaagaattgagggaagatgagctaggaatcaagaaatacgcagaactgattcctgtcactggcgccaccctgccacttgcccagagctgtggtataaatttttttaataggctgaaataaaaatatgaatagcattttggtattaagcattaaattgataaaggctatgagatacacctgctctcaaccatgttaattttttattattggtattaataaattattacttactaacatattaacaagaattgcattgagaaacaaagcatccacaggccaaatcttctgaatttcaaatgtttatattaatgcgttgtattctagaaaagtagaattgtcttaagtagctttgtaatataaagtcatctatcagcccattacacctattagaatgttttaacctttatttcccacttttttgtttctagactgagtgtacttggtctggtatttgtggcataacttacggaacacataagaatgatacagatactatttaatgatgacctaatacaagcttagatagctaaggtgaaagcttctatggccttaacattttcctcttgaagaatgtattttctgtaataaaatacagtggctacttgaaatctataaacttatgtgaggtctggataaatctgagcaactttcttctttgtgctccaggaacctacgcactatatatataaataaagcttaagtaaacatcaaaaaa

SEQ ID NO: 306576 - DNA, 2080 bp, Homo sapiens
tcttgcgaagtttttcttgattccgccaatccacacagtttcctttataaaatggaaaagcatgaactaaaaaacccagaaatagctatctggcttagatttacaggataaaatctccatgtctgtaaaaactttaaggcagaaatttgggatttatggtacaaaccctttaagggactgtgagtcagtaatacccacagcactcaacattgtgagtttccacacatccctggacttgagtgagtctttccaagtgtttgttaatggtacaaatgatgacaaaattagtggttcaaaaatattaaagtgcacatgctttttgctttctctatgtatacagagattacatatatgtatactttctagcgtctagcaagtatggtatggctagggataattatgtttttctgattattttgtttcccatcaaacaccccacgaattttacagcagaccgccttcttgtcaccatttgaaagaatgtggtcagaaaagtaatgcaaaaactgccactttggttttgtctgtaccttccaggtcatatctccgtacctcacttcctgacacaaacaagttttcactgttgtcagcaacaaagccctaatatagctgcggaagagaaaaactgcattgcattttgcctcctgcaagcatcatcaacagttactggaggaacgtaattccagaaagcttgaaagccgtggtgatggtaattatgtatcaaatgcctggttctatttctgttattattgttttgtcatttctgttttcccagcgatctgactgaactcgcagagggacaaatccagtttttctttttgacttttgtcaaactaaatcaggcctgatagaaaactcattgctctccggggaaacaaagtaggagccacgaaatgtcattttaacagagcgtgggtttggtgactgtaggaaaggatttgaggacgctccttctgttcggcttcctatgtcatgagcacaggctccacgcacgcacagacaccacggctcccggatgctgtggctccccgatcggggctcctgcagcgccagaagcccctccgggatgcttcgaggggctcccggtgggtggaggtacggacgccgctgcggccgccgccgccagtcctgctgctgttgttgctgctgcagtcacgtgggagcccctttaagtttccatagagaggcctctctggtgtcacatgatggacatgatataatgaaacaacattgtggagaggaaagcattaggggagcccacggctacaaaaacaagtgagtgagaagaggtgggaggaagagaaactacgccacctcccctgcagccgagtgcacgcagcagcctggcgtgacaagtgggcgacgccggggggcagggagccggggtccttggccctggccggggaccccaccgcccaccgcgcggaggacaacttttagccggcagcccagaccagcgcggcacctgtctccggagtctccaccgctcctcccgattcatcccagggaaattctcaagaatacgctctacaaatctacgtgcgcatcattttcacctcgcgtcgcgcccgggaggaaggaacgaggcaaggagctaaagcagcgtgcgttcagccctggggcattttattaatgcttttacgagttagaagagttgggataatttgccatctggagtttctctgccttgctgatctgagctcagacctgccaatttaccagagataattgataacaccctgtaacagctgagaggaaaatggaagaaacggagatacttttagtgaagcagaataaaccactgaacagatggagtctcactctgttgcccagactggaatgcagtggtgtgatctcaactgactgcaacctccgtatcctgggttcaagcaactctcctgctgcagccacgaaaaatgaggaagctgtgagtaccagtggaaggaacgagccaggaagagggactggaaccatctcagaagccatgcccctcaggctggaacttgccctgtctcctcgcagatgaggtgcaggtcttctgaacaaatgcctcctgaggatttctgtgcctggaaaatat

SEQ ID NO: 306577 - DNA, 1960 bp, Homo sapiens
tcttgcgaagtttttcttgattccgccaatccacacagtttcctttataaaatggaaaagcatgaactaaaaaacccagaaatagctatctggcttagatttacaggataaaatctccatgtctgtaaaaactttaaggcagaaatttgggatttatggtacaaaccctttaagggactgtgagtcagtaatacccacagcactcaacattgtgagtttccacacatccctggacttgagtgagtctttccaagtgtttgttaatggtacaaatgatgacaaaattagtggttcaaaaatattaaagtgcacatgctttttgctttctctatgtatacagagattacatatatgtatactttctagcgtctagcaagtatggtatggctagggataattatgtttttctgattattttgtttcccatcaaacaccccacgaattttacagcagaccgccttcttgtcaccatttgaaagaatgtggtcagaaaagtaatgcaaaaactgccactttggttttgtctgtaccttccaggtcatatctccgtacctcacttcctgacacaaacaagttttcactgttgtcagcaacaaagccctaatatagctgcggaagagaaaaactgcattgcattttgcctcctgcaagcatcatcaacagttactggaggaacgtaattccagaaagcttgaaagccgtggtgatggtaattatgtatcaaatgcctggttctatttctgttattattgttttgtcatttctgttttcccagcgatctgactgaactcgcagagggacaaatccagtttttctttttgacttttgtcaaactaaatcaggcctgatagaaaactcattgctctccggggaaacaaagtaggagccacgaaatgtcattttaacagagcgtgggtttggtgactgtaggaaaggatttgaggacgctccttctgttcggcttcctatgtcatgagcacaggctccacgcacgcacagacaccacggctcccggatgctgtggctccccgatcggggctcctgcagcgccagaagcccctccgggatgcttcgaggggctcccggtgggtggaggtacggacgccgctgcggccgccgccgccagtcctgctgctgttgttgctgctgcagtcacgtgggagcccctttaagtttccatagagaggcctctctggtgtcacatgatggacatgatataatgaaacaacattgtggagaggaaagcattaggggagcccacggctacaaaaacaagtgagtgagaagaggtgggaggaagagaaactacgccacctcccctgcagccgagtgcacgcagcagcctggcgtgacaagtgggcgacgccggggggcagggagccggggtccttggccctggccggggaccccaccgcccaccgcgcggaggacaacttttagccggcagcccagaccagcgcggcacctgtctccggagtctccaccgctcctcccgattcatcccagggaaattctcaagaatacgctctacaaatctacgtgcgcatcattttcacctcgcgtcgcgcccgggaggaaggaacgaggcaaggagctaaagcagcgtgcgttcagccctggggcattttattaatgcttttacgagttagaagagttgggataatttgccatctggagtttctctgccttgctgatctgagctcagacctgccaatttaccagaggttgcagtgagctgagattgtgctataacactctagcctgagcaacagagcacgactctgtctgaaaaaaagaaacaaacaaaaaaaagtgttatttctgagaaataacactcagaaaaagaaaagattattaaacttttgttagcagaagaagtacatattgcctcttcatgaaggaatttcagtctttgttctctgtgctgacctgatattattaataaatttttttgataata

SEQ ID NO: 306578 - DNA, 2200 bp, Homo sapiens
cccacctgaaaaagaactgcagagggagtgtggtttgaaaagtcgtatcaaatgtagaaggattcaaagtccaagagaatcttactctgtttccctgtgcatctaactttttattgtgtcaccttaatttcttttgaagccacaagttatttgtttttcaaatctcttattatctgtgtatgtagtaattatgtcttcttaagattctatttaggaactcagtaaaattaggcaggtgaaataattggctaaagttcagtgaagcccttttggcactctgagtttggaaaatagcaaataataatgtaaaacattttgtgtgcatttgtacctactcactaacgatattctcctcctattttgcaggaggaaaatggaagaaacggagatacttttagtgaagcagaataaaccactgaacagatggagtctcactctgttgcccagactggaatgcagtggtgtgatctcaactgactgcaacctccgtatcctgggttcaagcaactctcctgctgcagccacgaaaaatgaggaagctgtgagtaccagtggaaggaacgagccaggaagagggactggaaccatctcagaagccatgcccctcaggctggaacttgccctgtctcctcgcagatgaggtaggaggctcagcacgggctggtgggagcagcccacagcagcagtgagggtcagtgggcctgtgagttaagaagaaggtggcacagagcgagggtctctggatcctgactgtttgacttttccatgattaggataagtagccagggcttggctagttggagagttactcgaacctcaggtgacagttgtaaggcagcacatagtgaaaaagagtcctagcctgggaaagtccaaaaccttgggtctggtttcagttcactcacctatctctgtgacatagcaaagtctgttaatttctctaattttctgattagtagtatagttgcaggaatgaaataaaaatggtcctgattactcagagattcatttactgattactctttttgtgacctgaataaagagtacaacatctctcaaaaggtaacaatatgatgtttcaggaaattagagaagttaagagactttgctgtatttactatacagatagttgactgacagctgagcccggacccaagattcatttataaaatgaaggagttgagaagtacatactctgaggtttatcctaaataaactaaagtctaggcaagtggctgagctaggtttgccatgaatcaatctgctgagtatatttcttggtaactagttcatctttccttaattcagtcaacaaatatgatatcaagtttagtaagatgatgacagatgtcatgtaatactccatctggaagattgtatgcttctcagcttccctaacttttcttaatctaccttaagcttcctttctgaaaggtttctgtctttcctaacagtctcttctttccgccagctacctcttgtgtttaagaattgagggaagatgagctaggaatcaagaaatacgcagaactgattcctgtcactggcgccaccctgccacttgcccagagctgtggtataaatttttttaataggctgaaataaaaatatgaatagcattttggtattaagcattaaattgataaaggctatgagatacacctgctctcaaccatgttaattttttattattggtattaataaattattacttactaacatattaacaagaattgcattgagaaacaaagcatccacaggccaaatcttctgaatttcaaatgtttatattaatgcgttgtattctagaaaagtagaattgtcttaagtagctttgtaatataaagtcatctatcagcccattacacctattagaatgttttaacctttatttcccacttttttgtttctagactgagtgtacttggtctggtatttgtggcataacttacggaacacataagaatgatacagatactatttaatgatgacctaatacaagcttagatagctaaggtgaaagcttctatggccttaacattttcctcttgaagaatgtattttctgtaataaaatacagtggctacttgaaatctataaacttatgtgaggtctggataaatctgagcaactttcttctttgtgctccaggaacctacgcactatatatataaataaagcttaagtaaacatcaaaaaa

SEQ ID NO: 306579 - DNA, 230 bp, Homo sapiens
tatcaggccacctgctactccaaagccatgaattaacttgttctaagccctcaaggaaagaaaagaggaaacagaggtttattccctatcaagacagtccacttgagaaagttctgtcttggttgtaacttcaggtttctttcttacacaggcattttattaatgcttttacgagttagaagagttgggataatttgccatctggagtttctctgccttgctgatctgag

SEQ ID NO: 306580 - DNA, 426 bp, Homo sapiens
cagcagcacgcagcctccagtcttgagtgactcctgggctttggctcagcagtaactcctccataaaaacaagtgtgtgcatctggctgttagaagaattcatgctcatccgggtaaggataaactggagaaattattcctttttttccctttgggtggttttgaggttttagaaaaattgatcctctctttgagaagagttcagaactatttgtctgaagtttttccatccaaactgctttatcgtattatccactgtcttacccttttcctgtgaaatctaccctcttcaaaacatagtttcattttcaaattttaaaagataagattccatttttctttccgtgcatgaaactttaaaaattaaatcaccacagttgctactggcttagaagtggggtcttatatttttaggaagtatacttt

SEQ ID NO: 306581 - DNA, 2190 bp, Homo sapiens
ggcacgaggcgtctctctgcccccgccgctgccatggcggcagctccgccgctttccaaggccgagtatctgaagcgttacttgtccggggcagatgccggcgtcgaccggggatctgagtccggtcgcaagcgtcgcaaaaagcggccgaagcctggcggggccggcggcaagggaatgcggattgtggatgatgatgtgagctggacagctatctccacaaccaaactagaaaaggaggaagaggaagatgatggagatttgcctgtggtggcagagtttgtggatgagcggccagaagaggtaaagcagatggaggcctttcgttccagtgccaaatggaagcttctgggaggccacaacgaagacctaccctcaaacagacattttcgtcacgataccccggattcatctcctaggagggtccgtcatggtaccccagatccatctcctaggaaggaccgtcatgacaccccggatccatctcctaggagggcccgtcatgacaccccagatccttctcccctcagaggggctcgtcatgactcagacacatctcctcccaggaggatccgtcatgactcctcagacacttcacccccaaggagggcccgtcatgattctccagatccttctcccccaaggaggcctcagcataattcttcaggtgcatctcctaggagagtccgtcatgattcaccagatccctctcctcctaggcgagcccgtcatggttcctcagatatctcttcccccagaagggtccataacaactcccctgacacatctaggaggactcttggctcttcagacacacagcaactcagaagggcccgtcatgactcccctgatttggctcctaatgtcacttattccctgcccagaaccaaaagtggtaaagccccagaaagagcctctagcaagacttctccacattggaaggagtcaggagcctcccatttgtcattcccaaagaacagcaaatatgagtatgaccctgacatctctcctccacgaaaaaagcaagcaaaatcccattttggagacaagaagcagcttgattccaaaggtgactgccagaaagcaactgattcagacctttcttctccacggcataaacaaagtccagggcaccaggattctgattcagatctgtcacctccacggaatagacctagacaccggagctctgattctgacctctctccaccaaggaggagacagaggaccaaatcttctgattctgacctgtccccgcctcgaaggagtcagcctcctggaaagaaggctgcacacatgtattctggggctaaaactgggttggtgttaactgacatacagcgagaacagcaggagctcaaggaacaggatcaagaaaccatggcatttgaagctgaatttcaatatgctgaaaccgtatttcgagataagtctggtcgtaagaggaatttgaaactcgaacgtttagagcaaaggaggaaagcagaaaaggactcagagagagatgagctgtatgcccagtggggaaaagggcttgcccagagccggcaacagcaacaaaatgtggaggatgcaatgaaagagatgcaaaagcctctggcccgctatattgatgacgaagatctggataggatgctaagagaacaggaaagagagggggaccctatggccaacttcatcaagaagaataaggccaaggagaacaagaataaaaaagtgagacctcgctacagtggtccagcacctcctcccaacagatttaatatctggcctggatatcgctgggacggagtggacagatccaatggatttgaacagaagcgctttgccaggcttgccagcaagaaggcagtggaggaacttgcctacaaatggagtgttgaggatatgtaactttcctgaggctgtgggggtggctgggctgtggtagtgggcataggcagcgagatatccagtggtaacagttgtctgtgctaataattggagcccacacagaccagcaacttgttgaatgccagttttgaccacagaagaatattcgagacctgatgtttggactgaggtacctgtacttcttgggtgtgacagcaccggctgttgctggctttcagaggaagcattgatttctcattgaccagggtttgttcttggtagggtttttctttttcttttttaaataaacatgtattt

SEQ ID NO: 306582 - DNA, 2077 bp, Homo sapiens
ggcacgaggcgtctctctgcccccgccgctgccatggcggcagctccgccgctttccaaggccgagtatctgaagcgttacttgtccggggcagatgccggcgtcgaccggggatctgagtccggtcgcaagcgtcgcaaaaagcggccgaagcctggcggggccggcggcaagggaatgcggattgtggatgatgatgtgagctggacagctatctccacaaccaaactagaaaaggaggaagaggaagatgatggagatttgcctgtggtggcagagtttgtggatgagcggccagaagaggtaaagcagatggaggcctttcgttccagtgccaaatggaagcttctgggaggccacaacgaagacctaccctcaaacagacattttcgtcacgataccccggattcatctcctaggagggtccgtcatggtaccccagatccatctcctaggaaggaccgtcatgacaccccggatccatctcctaggaggggcccgtcatgattctccagatccttctcccccaaggaggcctcagcataattcttcaggtgcatctcctaggagagtccgtcatgattcaccagatccctctcctcctaggcgagcccgtcatggttcctcagatatctcttcccccagaagggtccataacaactcccctgacacatctaggaggactcttggctcttcagacacacagcaactcagaagggcccgtcatgactcccctgatttggctcctaatgtcacttattccctgcccagaaccaaaagtggtaaagccccagaaagagcctctagcaagacttctccacattggaaggagtcaggagcctcccatttgtcattcccaaagaacagcaaatatgagtatgaccctgacatctctcctccacgaaaaaagcaagcaaaatcccattttggagacaagaagcagcttgattccaaaggtgactgccagaaagcaactgattcagacctttcttctccacggcataaacaaagtccagggcaccaggattctgattcagatctgtcacctccacggaatagacctagacaccggagctctgattctgacctctctccaccaaggaggagacagaggaccaaatcttctgattctgacctgtccccgcctcgaaggagtcagcctcctggaaagaaggctgcacacatgtattctggggctaaaactgggttggtgttaactgacatacagcgagaacagcaggagctcaaggaacaggatcaagaaaccatggcatttgaagctgaatttcaatatgctgaaaccgtatttcgagataagtctggtcgtaagaggaatttgaaactcgaacgtttagagcaaaggaggaaagcagaaaaggactcagagagagatgagctgtatgcccagtggggaaaagggcttgcccagagccggcaacagcaacaaaatgtggaggatgcaatgaaagagatgcaaaagcctctggcccgctatattgatgacgaagatctggataggatgctaagagaacaggaaagagagggggaccctatggccaacttcatcaagaagaataaggccaaggagaacaagaataaaaaagtgagacctcgctacagtggtccagcacctcctcccaacagatttaatatctggcctggatatcgctgggacggagtggacagatccaatggatttgaacagaagcgctttgccaggcttgccagcaagaaggcagtggaggaacttgcctacaaatggagtgttgaggatatgtaactttcctgaggctgtgggggtggctgggctgtggtagtgggcataggcagcgagatatccagtggtaacagttgtctgtgctaataattggagcccacacagaccagcaacttgttgaatgccagttttgaccacagaagaatattcgagacctgatgtttggactgaggtacctgtacttcttgggtgtgacagcaccggctgttgctggctttcagaggaagcattgatttctcattgaccagggtttgttcttggtagggtttttctttttcttttttaaataaacatgtattt

SEQ ID NO: 306583 - DNA, 2280 bp, Homo sapiens
aaatcagttttctccacctgcaccactgcatagcacagatacagaaaccatcctatttcaggatttgaatgcaaaacttaccttcttactctaaagatgaatgatcagggagagatttattcaaccctgagatttttgcagtctccttcagagtcacagaatagattaaggcctgatgatactcaaaggcctgggaaaactgatgacaaagaattttcagtgccctggcacctcattgcagtgactcttgggatcctctgtttacttcttctgatgatagtcacagtgttggtgacaaatatctttcagtgtattcaagaaaaacatcaacggcaggaaattctaagaaactgtagtgaaaagtacatcatgcaaaatgacaactacttaaaagagcagattttgacaaataagactttaaaatatgacgttctcaaaaatagctttcagcagaaaaaggaactggattcacgccttatacaaaagaacagatgtcatagagaaaatgagatcgtttttaaagttttgcaaaatacaggcaaattctctgaagaccacgggtcctgttgtggagtaaactgttattattttaccatgcagaagaaagactggaagggatgtaaacagacttgtcaacattgtagatcatcccttttgaagatagatgacaaagatgaactcgtattttacattcacttttattctcttggactctgtttctcaatgttggacctaagatattgaagacaggctggagtccagagccttcattcaatctcagatttatgaaaataattactggatcggattatcatatgatgaaagggaaagtaagtggaaatggattgataatggcacatctcctggaattaattctacaataatgcgtttttcttctgggagaggagaatgtgcatttttgacctcaacaagaatggcaactattgattgcattcaaacgtacaattgtatctgtgggaagagaatagactctattttctctgattcggtgtgcgccaagaagaaaaggtgaaaatggaatgttttctttttttgtttcccataataatttctgattataaatcattgcttttaactgtgggacttagttaattcttcaaaagataaagatgaacaggaagaaaaagaaaattattttggactatgactttaaagatcagatgccatctttcttcctggagaagaggagattttctcttttgagagtggttgttccttcctttaatgtccctgaggaattattcattctttccagcatcttctggttttgaaagcagttgtgaactagaatgtagttatttttttcttcccatctagaagttacctcatcttttaaaacatttgttttgctacaaaatataacttcaaacttactgaaagttgcaagcatagtacaaggaacttctatataacctttactcatacttactagttgtttatattttgctctgctttatatttctctctttctatcttccacttaataataaattgaggacttcatgtccctttgtctaaatattttccaagatcaagggctttgttttatataatcacagtgcaattatcaaactcaggaaatttagcattagtacagtactatgatctaatctgtaatccatgttcaaattttgtcaattgtcccaataatgccatttatatgtatttcttaaaaatccatgttcaggataattcaatgcatttgattgtaatgtctctttagtcttctttaatctgaaacagttctttaggctttttcttgaccttgacattttaaaaattaactttattgagttatacttttcatgcaataaaatgcactcactttaagtcatgaggaatatgggttttaacatatatacacacacacacacacacatatatatatatcttacacagtatgaaatcaagatatagaatattttcatcatctctaaaagttcctttctgcccttcgccacccactttgccccaggcaaccagggatgtgctttctatctgcaaattagtttaccctactctagaatttaatgcatcatgtactcttctgtatctggcttatttttacgcagcatgtttttgaattatatctatggttttgtgtatcagcatttcgttctttttcctactaggtagtattctattgtacagatataccacaatttatttcttcattcacctgtggacatttgatgtgtttccagtttttggctattgtgaataaaggtgccatgaacatttgtgtgcaaatatctgtgt

SEQ ID NO: 306584 - DNA, 273 bp, Homo sapiens
aagataaagatgaacaggaagaaaaagaaaattattttggactatgactttaaagatcagatgccatctttcttcctggagaagaggagattttctcttttgagagtggttgttccttcctttaatgtccctgaggaattattcattctttctaattctcagaactacctatacaaccagttagagaactctgatattatatcctgggtcttttttcttatcaataggataaatcattccagcatcttctggttttgaaagcagttgtgaact

SEQ ID NO: 306585 - DNA, 966 bp, Homo sapiens
gtcgttgattccctatgtgaagatcctgtatgtggataccttgattgtaaggctgagagattaaagaccatagtaacttttgttaagtggtctccttgtcactcacatacctttgctcctgagttcttccataggtgccactgaacagcttccttgaggtaaactcttctgaacttgtaacctacattaactgggatattaataatctcttttaatcttaatgctcttatgaaatgacataaaaagaagaaatgcattgcactgttgtatgagcagataagacaaaatactaattctctccttttccccccatcctatcttgttttctttctcagaagctgtagatgaaaccaaacctaaggaaagtgcccggcaggacgagggtaaagaagaggaacctgaggctgaccaagaacatgcctgaactctaagaaatggctttccacatccccaccctcccctctcctgagcctgtctctccctaccctcttctcagctccactctgaagtcccttcctgtcctgctcacgtctgtgagtctgtcctttcccacccactagccctctttctctctgtgtggcaaacatttaaaaaaaaaaaaaaaaagcaggaaagatcccaagtcaaacagtgtggcttaaacattttttgtttcttggtgttgttatggcaagtttttggtaatgatgattcaatcattttgggaaattcttgcactgtatccaagttatttgatctggtgcgtgtggccctgtgggagtccactttcctctctctctctctctctgttccaagtgtgtgtgcaatgttccgttcatctgaggagtccaaaatatcgagtgaattcaaaatcatttttgttttcctccttttcaatgtgatggaatgaacaaaaaggaaaaaattcaaaaaacccagtttgttttaaaaataaataaataaagcaaatgtgccaattagcgtaaa

SEQ ID NO: 306586 - DNA, 1653 bp, Homo sapiens
aagtgattagtcactgaaggctagagaacaattccgagaaagagacggagagagagggaagaaaaagacagatagatattggggggaaggagaaaaaaggagaagagagggaagagaggacagcggagagagagcaccagagagagagggagagagagagagagcgctagagagagggagcgagcatgtgcgatgagcaatagctgtggaccttacagttgctgctaactgccctggtgtgtgtgagggagagagagggagggagggagagagagcgcgctagcgcgagagagcgagtgagcaagcgagcagaaaagaggtggagagggggggaataagaaagagagagaaggaaaggagagaaggcaggaagaaggcaagggacgagacaaccatgctgtgctgtatgagaagaaccaaacaggttgaaaaaaatgatgacgaccaaaagattgaacaagatggtatcaaaccagaagataaagctcataaggccgcaaccaaaattcaggctagcttccgtggacacataacaaggaaaaagctcaaaggagagaagaaggatgatgtccaagctgctgaggctgaagctaataagaaggatgaagcccctgttgccgatggggtggagaagaagggagaaggcaccactactgccgaagcagccccagccactggctccaagcctgatgagcccggcaaagcaggagaaactccttccgaggagaagaagggggagggtgatgctgccacagagcaggcagccccccaggctcctgcatcctcagaggagaaggccggctcagctgagacagaaagtgccactaaagcttccactgataactcgccgtcctccaaggctgaagatgccccagccaaggaggagcctaaacaagccgatgtgcctgctgctgtcactgctgctgctgccaccacccctgccgcagaggatgctgctgccaaggcaacagcccagcctccaacggagactggggagagcagccaagctgaagagaacatagaagctgtagatgaaaccaaacctaaggaaagtgcccggcaggacgagggtaaagaagaggaacctgaggctgaccaagaacatgcctgaactctaagaaatggctttccacatccccaccctcccctctcctgagcctgtctctccctaccctcttctcagctccactctgaagtcccttcctgtcctgctcacgtctgtgagtctgtcctttcccacccactagccctctttctctctgtgtggcaaacatttaaaaaaaaaaaaaaaaagcaggaaagatcccaagtcaaacagtgtggcttaaacattttttgtttcttggtgttgttatggcaagtttttggtaatgatgattcaatcattttgggaaattcttgcactgtatccaagttatttgatctggtgcgtgtggccctgtgggagtccactttcctctctctctctctctctgttccaagtgtgtgtgcaatgttccgttcatctgaggagtccaaaatatcgagtgaattcaaaatcatttttgttttcctccttttcaatgtgatggaatgaacaaaaaggaaaaaattcaaaaaacccagtttgttttaaaaataaataaataaagcaaatgtgccaattagcgtaaa

SEQ ID NO: 306587 - DNA, 1712 bp, Homo sapiens
aagtgattagtcactgaaggctagagaacaattccgagaaagagacggagagagagggaagaaaaagacagatagatattggggggaaggagaaaaaaggagaagagagggaagagaggacagcggagagagagcaccagagagagagggagagagagagagagcgctagagagagggagcgagcatgtgcgatgagcaatagctgtggaccttacagttgctgctaactgccctggtgtgtgtgagggagagagagggagggagggagagagagcgcgctagcgcgagagagcgagtgagcaagcgagcagaaaagaggtggagagggggggaataagaaagagagagaaggaaaggagagaaggcaggaagaaggcaagggacgagacaaccatgctgtgctgtatgagaagaaccaaacaggttgaaaaaaatgatgacgaccaaaagattgaacaagatggtatcaaaccagaagataaagctcataaggccgcaaccaaaattcaggctagcttccgtggacacataacaaggaaaaagctcaaaggagagaagaaggatgatgtccaagctgctgaggctgaagctaataagaaggatgaagcccctgttgccgatggggtggagaagaagggagaaggcaccactactgccgaagcagccccagccactggctccaagcctgatgagcccggcaaagcaggagaaactccttccgaggagaagaagggggagggtgatgctgccacagagcaggcagccccccaggctcctgcatcctcagaggagaaggccggctcagctgagacagaaagtgccactaaagcttccactgataactcgccgtcctccaaggctgaagatgccccagccaaggaggagcctaaacaagccgatgtgcctgctgctgtcactgctgctgctgccaccacccctgccgcagaggatgctgctgccaaggcaacagcccagcctccaacggagactggggagagcagccaagctgaagagaacatagaagctgtagatgaaaccaaacctaaggaaagtgcccggcaggacgagggtaaagaagaggaacctgaggctgaccaagaacatgcctgaactctaagaaatggctttccacatccccaccctcccctctcctgagcctgtctctccctaccctcttctcagctccactctgaagtcccttcctgtcctgctcacgtctgtgagtctgtcctttcccacccactagccctctttctctctgtgtggcaaacatttaaaaaaaaaaaaaaaaagcaggaaagatcccaagtcaaacagtgtggcttaaacattttttgtttcttggtgttgttatggcaagtttttggtaatgatgattcaatcattttgggaaattcttgcactgtatccaagttatttgatctggtgcgtgtggccctgtgggagtccactttcctctctctctctctctctgttccaagtgtgtgtgcaatgttccgttcatctgaggagtccaaaatatcgagtgaattcaaaatcatttttgttttcctccttttcaatgtgatggaatgaacaaaaaggaaaaaattcaaaaaacccagtttgttttaaaaataaataaataaagcaaatgtgccaattagcgtaaacttgcggctctaaggctcctttttcaacccgaatattaataaatcatgagagtaatcaa

SEQ ID NO: 306588 - DNA, 1720 bp, Homo sapiens
  misc_feature (1661)..(1661): n is a, c, g, or t
  misc_feature (1671)..(1671): n is a, c, g, or t
  misc_feature (1691)..(1691): n is a, c, g, or t
aagtgattagtcactgaaggctagagaacaattccgagaaagagacggagagagagggaagaaaaagacagatagatattggggggaaggagaaaaaaggagaagagagggaagagaggacagcggagagagagcaccagagagagagggagagagagagagagcgctagagagagggagcgagcatgtgcgatgagcaatagctgtggaccttacagttgctgctaactgccctggtgtgtgtgagggagagagagggagggagggagagagagcgcgctagcgcgagagagcgagtgagcaagcgagcagaaaagaggtggagagggggggaataagaaagagagagaaggaaaggagagaaggcaggaagaaggcaagggacgagacaaccatgctgtgctgtatgagaagaaccaaacaggttgaaaaaaatgatgacgaccaaaagattgaacaagatggtatcaaaccagaagataaagctcataaggccgcaaccaaaattcaggctagcttccgtggacacataacaaggaaaaagctcaaaggagagaagaaggatgatgtccaagctgctgaggctgaagctaataagaaggatgaagcccctgttgccgatggggtggagaagaagggagaaggcaccactactgccgaagcagccccagccactggctccaagcctgatgagcccggcaaagcaggagaaactccttccgaggagaagaagggggagggtgatgctgccacagagcaggcagccccccaggctcctgcatcctcagaggagaaggccggctcagctgagacagaaagtgccactaaagcttccactgataactcgccgtcctccaaggctgaagatgccccagccaaggaggagcctaaacaagccgatgtgcctgctgctgtcactgctgctgctgccaccacccctgccgcagaggatgctgctgccaaggcaacagcccagcctccaacggagactggggagagcagccaagctgaagagaacatagaagctgtagatgaaaccaaacctaaggaaagtgcccggcaggacgagggtaaagaagaggaacctgaggctgaccaagaacatgcctgaactctaagaaatggctttccacatccccaccctcccctctcctgagcctgtctctccctaccctcttctcagctccactctgaagtcccttcctgtcctgctcacgtctgtgagtctgtcctttcccacccactagccctctttctctctgtgtggcaaacatttaaaaaaaaaaaaaaaaagcaggaaagatcccaagtcaaacagtgtggcttaaacattttttgtttcttggtgttgttatggcaagtttttggtaatgatgattcaatcattttgggaaattcttgcactgtatccaagttatttgatctggtgcgtgtggccctgtgggagtccactttcctctctctctctctctctgttccaagtgtgtgtgcaatgttccgttcatctgaggagtccaaaatatcgagtgaattcaaaatcatttttgttttcctccttttcaatgtgatggaatgaacaaaaaggaaaaaattcaaaaaacccagtttgttttaaaaataaataaataaagcaaatgtgccaattagcgtaaaaaaagaanaaaaaaaatnattatatataattatttaantttagaatttttaaaatatatatatttag

SEQ ID NO: 306589 - DNA, 2196 bp, Homo sapiens
aagtgattagtcactgaaggctagagaacaattccgagaaagagacggagagagagggaagaaaaagacagatagatattggggggaaggagaaaaaaggagaagagagggaagagaggacagcggagagagagcaccagagagagagggagagagagagagagcgctagagagagggagcgagcatgtgcgatgagcaatagctgtggaccttacagttgctgctaactgccctggtgtgtgtgagggagagagagggagggagggagagagagcgcgctagcgcgagagagcgagtgagcaagcgagcagaaaagaggtggagagggggggaataagaaagagagagaaggaaaggagagaaggcaggaagaaggcaagggacgagacaaccatgctgtgctgtatgagaagaaccaaacaggttgaaaaaaatgatgacgaccaaaagattgaacaagatggtatcaaaccagaagataaagctcataaggccgcaaccaaaattcaggctagcttccgtggacacataacaaggaaaaagctcaaaggagagaagaaggatgatgtccaagctgctgaggctgaagctaataagaaggatgaagcccctgttgccgatggggtggagaagaagggagaaggcaccactactgccgaagcagccccagccactggctccaagcctgatgagcccggcaaagcaggagaaactccttccgaggagaagaagggggagggtgatgctgccacagagcaggcagccccccaggctcctgcatcctcagaggagaaggccggctcagctgagacagaaagtgccactaaagcttccactgataactcgccgtcctccaaggctgaagatgccccagccaaggaggagcctaaacaagccgatgtgcctgctgctgtcactgctgctgctgccaccacccctgccgcagaggatgctgctgccaaggcaacagcccagcctccaacggagactggggagagcagccaagctgaagagaacatagaagctgtagatgaaaccaaacctaaggaaagtgcccggcaggacgagggtaaagaagaggaacctgaggctgaccaagaacatgcctgaactctaagaaatggctttccacatccccaccctcccctctcctgagcctgtctctccctaccctcttctcagctccactctgaagtcccttcctgtcctgctcacgtctgtgagtctgtcctttcccacccactagccctctttctctctgtgtggcaaacatttaaaaaaaaaaaaaaaaagcaggaaagatcccaagtcaaacagtgtggcttaaacattttttgtttcttggtgttgttatggcaagtttttggtaatgatgattcaatcattttgggaaattcttgcactgtatccaagttatttgatctggtgcgtgtggccctgtgggagtccactttcctctctctctctctctctgttccaagtgtgtgtgcaatgttccgttcatctgaggagtccaaaatatcgagtgaattcaaaatcatttttgttttcctccttttcaatgtgatggaatgaacaaaaaggaaaaaattcaaaaaacccagtttgttttaaaaataaataaataaagcaaatgtgccaattagcgtaaacttgcggctctaaggctcctttttcaacccgaatattaataaatcatgagagtaatcaaaaaaaaaaaaaaaaaaaaaacaaaaaaaacaaaacacaaacaaaaaaaaaaaacaagaaaacaaaaaaaaaacaaaaaaaagaagaaatggcacagaaaccaaagaaaacacaaccacaaaaaaaggggggggggcgcccaccaaatagacaaacgggggaggcgactcccgccccgcacatttttgaagagaggcccccacagacgggcgacataataacaagaacggagagcgagggcagaccaaacacaacctaagtgaagggggacgaacaggcacgacgggtacgaagacgtaggagaaaagaacccactaggttggggaagggagcacaaatggtgcgcacccccccacaaggagagaaatgcgctcgcgggaaaaacaaatagcaggcaagaggttatgatgacacaacaatattactgcgcagacagaaagagccgagaataataaaatacaggcggggtcgatatagcggggagg

SEQ ID NO: 306590 - DNA, 1408 bp, Homo sapiens
gactctgaggatcctcgtgcaactgctcggagtgggtggagaagaagggagaaggcaccactacatccgaagcagtggagagggggggaataagaaagagagagaaggaaaggagagaaggcaggaagaaggcaagggacgagacaaccatgctgtgctgtatgagaagaaccaaacaggttgaaaaaaatgatgacgaccaaaagattgaacaagatggtatcaaaccagaagataaagctcataaggccgcaaccaaaattcaggctagcttccgtggacacataacaaggaaaaagctcaaaggagagaagaaggatgatgtccaagctgctgaggctgaagctaataagaaggatgaagcccctgttgccgatggggtggagaagaagggagaaggcaccactactgccgaagcagccccagccactggctccaagcctgatgagcccggcaaagcaggagaaactccttccgaggagaagaagggggagggtgatgctgccacagagcaggcagccccccaggctcctgcatcctcagaggagaaggccggctcagctgagacagaaagtgccactaaagcttccactgataactcgccgtcctccaaggctgaagatgccccagccaaggaggagcctaaacaagccgatgtgcctgctgctgtcactgctgctgctgccaccacccctgccgcagaggatgctgctgccaaggcaacagcccagcctccaacggagactggggagagcagccaagctgaagagaacatagaagctgtagatgaaaccaaacctaaggaaagtgcccggcaggacgagggtaaagaagaggaacctgaggctgaccaagaacatgcctgaactctaagaaatggctttccacatccccaccctcccctctcctgagcctgtctctccctaccctcttctcagctccactctgaagtcccttcctgtcctgctcacgtctgtgagtctgtcctttcccacccactagccctctttctctctgtgtggcaaacatttaaaaaaaaaaaaaaaaagcaggaaagatcccaagtcaaacagtgtggcttaaacattttttgtttcttggtgttgttatggcaagtttttggtaatgatgattcaatcattttgggaaattcttgcactgtatccaagttatttgatctggtgcgtgtggccctgtgggagtccactttcctctctctctctctctctgttccaagtgtgtgtgcaatgttccgttcatctgaggagtccaaaatatcgagtgaattcaaaatcatttttgttttcctccttttcaatgtgatggaatgaacaaaaaggaaaaaattcaaaaaacccagtttgttttaaaaataaataaataaagcaaatgtgccaattagcgtaaa

SEQ ID NO: 306591 - DNA, 1590 bp, Homo sapiens
aaacaaagcagcctaggcaatggtgggcgcccctcccccagcctcgctgccgccttgcagtttgatctcagactgccctgctagcaatcagcgagactccgtggacgtaggaccctccgagccaggtgcaggatatgatctcctggtgcgccgcttttttaagcccgtcggaaaagcgcagtattcgggtgggagggaccggattttccagtgagatgaacccagtacctcagatggaaatgcagaaatcacccgtcttctgcgtcgctcacgctgggagctgtagaccggagctgttcctattcggccatcttggctcctcccgacattcgatgtttcaccatcaagtatgacattagctgttgaaaaaaatgatgacgaccaaaagattgaacaagatggtatcaaaccagaagataaagctcataaggccgcaaccaaaattcaggctagcttccgtggacacataacaaggaaaaagctcaaaggagagaagaaggatgatgtccaagctgctgaggctgaagctaataagaaggatgaagcccctgttgccgatggggtggagaagaagggagaaggcaccactactgccgaagcagccccagccactggctccaagcctgatgagcccggcaaagcaggagaaactccttccgaggagaagaagggggagggtgatgctgccacagagcaggcagccccccaggctcctgcatcctcagaggagaaggccggctcagctgagacagaaagtgccactaaagcttccactgataactcgccgtcctccaaggctgaagatgccccagccaaggaggagcctaaacaagccgatgtgcctgctgctgtcactgctgctgctgccaccacccctgccgcagaggatgctgctgccaaggcaacagcccagcctccaacggagactggggagagcagccaagctgaagagaacatagaagctgtagatgaaaccaaacctaaggaaagtgcccggcaggacgagggtaaagaagaggaacctgaggctgaccaagaacatgcctgaactctaagaaatggctttccacatccccaccctcccctctcctgagcctgtctctccctaccctcttctcagctccactctgaagtcccttcctgtcctgctcacgtctgtgagtctgtcctttcccacccactagccctctttctctctgtgtggcaaacatttaaaaaaaaaaaaaaaaagcaggaaagatcccaagtcaaacagtgtggcttaaacattttttgtttcttggtgttgttatggcaagtttttggtaatgatgattcaatcattttgggaaattcttgcactgtatccaagttatttgatctggtgcgtgtggccctgtgggagtccactttcctctctctctctctctctgttccaagtgtgtgtgcaatgttccgttcatctgaggagtccaaaatatcgagtgaattcaaaatcatttttgttttcctccttttcaatgtgatggaatgaacaaaaaggaaaaaattcaaaaaacccagtttgttttaaaaataaataaataaagcaaatgtgccaattagcgtaaa

SEQ ID NO: 306592 - DNA, 2049 bp, Homo sapiens
aagtgattagtcactgaaggctagagaacaattccgagaaagagacggagagagagggaagaaaaagacagatagatattggggggaaggagaaaaaaggagaagagagggaagagaggacagcggagagagagcaccagagagagagggagagagagagagagcgctagagagagggagcgagcatgtgcgatgagcaatagctgtggaccttacagttgctgctaactgccctggtgtgtgtgagggagagagagggagggagggagagagagcgcgctagcgcgagagagcgagtgagcaagcgagcagaaaagaggtggagagggggggaataagaaagagagagaaggaaaggagagaaggcaggaagaaggcaagggacgagacaaccatgctgtgctgtatgagaagaaccaaacagaattaaaagggaacctggtctctgggttgttttcaacatctcaagtgtgaattttccctgtcaaaatcttcacaaggaaaatgagtcacagcatcacctgggtgacgaggtcataacacctcagcccttgcttaaaaaattttatttctacttttctattgtaaagagatctcaaaacaggaagataaaattggactgacagctctacagcctagtcttttagacagtgaactaggccagcattggcagacactggcgatgacaaagtcctgctctgaattatgccaccccgcactccactttttaccttgcctgggaggcttgaggaaaaatcttcagagagcagttcgacctagtccttattcacttggcttcttgactttctggatttcaagggttgaaaaaaatgatgacgaccaaaagattgaacaagatggtatcaaaccagaagataaagctcataaggccgcaaccaaaattcaggctagcttccgtggacacataacaaggaaaaagctcaaaggagagaagaaggatgatgtccaagctgctgaggctgaagctaataagaaggatgaagcccctgttgccgatggggtggagaagaagggagaaggcaccactactgccgaagcagccccagccactggctccaagcctgatgagcccggcaaagcaggagaaactccttccgaggagaagaagggggagggtgatgctgccacagagcaggcagccccccaggctcctgcatcctcagaggagaaggccggctcagctgagacagaaagtgccactaaagcttccactgataactcgccgtcctccaaggctgaagatgccccagccaaggaggagcctaaacaagccgatgtgcctgctgctgtcactgctgctgctgccaccacccctgccgcagaggatgctgctgccaaggcaacagcccagcctccaacggagactggggagagcagccaagctgaagagaacatagaagctgtagatgaaaccaaacctaaggaaagtgcccggcaggacgagggtaaagaagaggaacctgaggctgaccaagaacatgcctgaactctaagaaatggctttccacatccccaccctcccctctcctgagcctgtctctccctaccctcttctcagctccactctgaagtcccttcctgtcctgctcacgtctgtgagtctgtcctttcccacccactagccctctttctctctgtgtggcaaacatttaaaaaaaaaaaaaaaaagcaggaaagatcccaagtcaaacagtgtggcttaaacattttttgtttcttggtgttgttatggcaagtttttggtaatgatgattcaatcattttgggaaattcttgcactgtatccaagttatttgatctggtgcgtgtggccctgtgggagtccactttcctctctctctctctctctgttccaagtgtgtgtgcaatgttccgttcatctgaggagtccaaaatatcgagtgaattcaaaatcatttttgttttcctccttttcaatgtgatggaatgaacaaaaaggaaaaaattcaaaaaacccagtttgttttaaaaataaataaataaagcaaatgtgccaattagcgtaaa

SEQ ID NO: 306593 - DNA, 684 bp, Homo sapiens
gaccatcacctactcctaataatgcattatataataaaacggcgtatccctacaagctgtagatgaaaccaaacctaaggaaagtgcccggcaggacgagggtaaagaagaggaacctgaggctgaccaagaacatgcctgaactctaagaaatggctttccacatccccaccctcccctctcctgagcctgtctctccctaccctcttctcagctccactctgaagtcccttcctgtcctgctcacgtctgtgagtctgtcctttcccacccactagccctctttctctctgtgtggcaaacatttaaaaaaaaaaaaaaaaagcaggaaagatcccaagtcaaacagtgtggcttaaacattttttgtttcttggtgttgttatggcaagtttttggtaatgatgattcaatcattttgggaaattcttgcactgtatccaagttatttgatctggtgcgtgtggccctgtgggagtccactttcctctctctctctctctctgttccaagtgtgtgtgcaatgttccgttcatctgaggagtccaaaatatcgagtgaattcaaaatcatttttgttttcctccttttcaatgtgatggaatgaacaaaaaggaaaaaattcaaaaaacccagtttgttttaaaaataaataaataaagcaaatgtgccaattagcgtaaa

SEQ ID NO: 306594 - DNA, 707 bp, Homo sapiens
  misc_feature (49)..(49): n is a, c, g, or t
gaatagaaacacacataaaaagaggcgaagggacctgagaacccgcaanccgcgcgcacacgccctcctcccgtttaagctgtagatgaaaccaaacctaaggaaagtgcccggcaggacgagggtaaagaagaggaacctgaggctgaccaagaacatgcctgaactctaagaaatggctttccacatccccaccctcccctctcctgagcctgtctctccctaccctcttctcagctccactctgaagtcccttcctgtcctgctcacgtctgtgagtctgtcctttcccacccactagccctctttctctctgtgtggcaaacatttaaaaaaaaaaaaaaaaagcaggaaagatcccaagtcaaacagtgtggcttaaacattttttgtttcttggtgttgttatggcaagtttttggtaatgatgattcaatcattttgggaaattcttgcactgtatccaagttatttgatctggtgcgtgtggccctgtgggagtccactttcctctctctctctctctctgttccaagtgtgtgtgcaatgttccgttcatctgaggagtccaaaatatcgagtgaattcaaaatcatttttgttttcctccttttcaatgtgatggaatgaacaaaaaggaaaaaattcaaaaaacccagtttgttttaaaaataaataaataaagcaaatgtgccaattagcgtaaa

SEQ ID NO: 306595 - DNA, 1236 bp, Homo sapiens
  misc_feature (841)..(841): n is a, c, g, or t
  misc_feature (848)..(848): n is a, c, g, or t
  misc_feature (853)..(853): n is a, c, g, or t
  misc_feature (859)..(859): n is a, c, g, or t
tccgacggcagtacttcccggtgtaatggtacgaggcctgggtggtcgcttgtcccaccttcggcagagcagcgaccctatgctgagcgagttcaagaacctggacatcaccaagaagaaattggtccacgagggcccactgacgtggcgggtgactaaggacaaggcagtggaggtgcatgtgctgctgctggacgacctgctgctgctgctccagcgccaggacgagcggctgctgctcaagtcccatagccggacactgacgcccacgcccgatggcaagaccatgctgcggcccgtgctgcggctcacctccgccatgacccgcgaggtggccaccgatcacaaagccttctacgtcctttttacctgggaccaggaggcccagatatacgagctggtggcacagactgtgtcggagcggaaaaactggtgtgctctcatcactgagactgccggatccctgaaagtccctgcccctgcctctcgccctaagccccggcccagcccgagcagcacccgagaacccctcctcagcagctctgagaacggcaatggtggccgagagacgtctccagctgatgcccggaccgagagaatcctcagtgacctcctgcccttctgcagaccaggccccgagggccagctcgctgccacggcccttcggaaagtgctgtccctgaagcagcttctgtttccggcggaggaagacaatggggcggggcctcctcgagatggggatggggtcccagggggcggccccctgagcccagcacggacccaggaaatccaggagaacctgctcagcttggaggagaccatgaagcagctggagagttgnagaggantttgncgctgngaccctcctgtgtcagttggggggaaccttgtcccagcggtgtggccttgaggtcccgccaggagggcgtttgccgaagggccggcttcgtgggatgcctgttgtgccaccccccccaccacagtgtcgtgggatttctcccccggggcgtaggagggagcaggttgtaccccgttaggggcgcccggtgttttgtccgcgacgaacgaggagaacaccgagcacacgtgggaggagaggcaccgtgtgcgcgaacccgcccctattgtggtgggcccgcccccccctcccgtcattgggggctggttttaaaaactagctatagtcgagcgccaggctggtggtcgtcacatgttcatctgtagccactggtacga

SEQ ID NO: 306596 - DNA, 442 bp, Homo sapiens
  misc_feature (16)..(16): n is a, c, g, or t
  misc_feature (18)..(18): n is a, c, g, or t
gggaaggtggaaaccntnatggacactgtggtaggcacccaaaggggaagggggcgcaaagggtcaagcatccggaacaagggggccccgaccaggaaggccttttgcaagaaggagaggaatgggggagaggacgtgagggaccacccccacccacacagctgccgcagcatctcacaccccgagggcctgaggagagggagctgtgggccacgcctgggaggggcccagctggggttactggccccgcatgagcctcggccatctctccctcctgccctctgcttgggggactcagggctccattctggagggcaccacggtgacccgggccatctcagtattgcctgtgggggccacccctccacccccacccccaagtgccttcgctctgtttttataccctgaattggaggtttattttttaatatatattatctaa

SEQ ID NO: 306597 - DNA, 3231 bp, Homo sapiens
ccagagccaggaagcgggagccgggacccagggcccgggatcgccgagcccgacctcgggcgccccgccggtcacctccgcgcggacaccagccctgcagagcccagggagatggaagacttcgcccgaggggcggcctccccaggcccctcccggcctggcctggttcccgtcagcatcatcggggctgaggatgaggattttgagaacgagctggagacaaactcagaagagcaaaacagccagttccagagcctggagcaggtgaagcggcgcccagcccacctcatggccctcctgcagcacgtggccctgcagtttgagccaggacccctgctttgctgtctgcatgccgacatgctgggctcactgggccccaaggaggccaagaaggccttcctggacttctaccacagcttcctggagaagacagcggttctccgggtgccggtccctcccaacgtcgcctttgaacttgaccgcactagggctgacctcatctccgaggatgtccagcggcggttcgtgcaggaggtggtgcaaagccagcaggtagccgtgggccggcagctggaggacttccgttccaagcggctcatgggcatgacgccctgggagcaggagctggcccagctggaggcttgggttgggcgggaccgagccagctacgaggcccgggagcggcacgtggcggagcggctgctcatgcacctggaggagatgcaacataccatctctaccgacgaagaaaagagtgctgccgtggtcaacgccattggcctgtacatgcgccaccttggggtgcggaccaagagtggagacaagaagtcggggaggaacttcttccggaaaaaggtgatggggaaccggcggtcggacgagcctgccaagaccaagaaggggctgagcagcatcctggatgccgcccgctggaaccggggagagccccaggttccagattttcgacacctcaaagcagaggttgatgccgagaagccaggtgctacagaccggaagggaggcgtggggatgccctctcgggaccggaatatcggggctcctgggcaggacacccctggagtctctctgcaccctctgtccctggacagcccagaccgggaaccaggtgctgacgcccccctggagctgggggactcatccccgcagggcccaatgagcctggagtccttggcgcccccagagagtaccgacgagggggccgaaaccgagagccccgagcctggagatgagggggagccggggcggtcgggactggagcttgaaccagaagagcctcccggctggcgggaactcgtccccccagacaccctgcacagcctgcccaagagccaggtgaagcggcaggaggtcatcagcgagctgctggtgacagaggcggcccacgtgcgcatgctgcgggtgctgcacgacctcttcttccagcccatggcagaatgcctgttcttccccttggaggagctgcagaacatcttccccagcctggacgagctcatcgaggtgcattccctgttcctcgatcgcctgatgaagcggaggcaggagagtggctacctcatcgaggagatcggagacgtgctgctggcccggtttgatggtgctgagggctcctggttccagaaaatctcctcccgcttctgcagccgccagtcatttgccttagagcagctcaaagccaagcaacgcaaggaccctcggttctgtgccttcgtgcaggaagctgagagccgcccgcggtgccgccgcctgcagctgaaggacatgatccccacggagatgcagcggctgaccaagtaccccctgctcctgcagagcatcgggcagaacacagaagagcccacagaacgggagaaagtggagctggcagccgagtgctgccgggaaattctacaccacgtcaaccaagccgtgcgtgacatggaggacctgctgaggctcaaggactatcagcggcgcctggacttgtcccaccttcggcagagcagcgaccctatgctgagcgagttcaagaacctggacatcaccaagaagaaattggtccacgagggcccactgacgtggcgggtgactaaggacaaggcagtggaggtgcatgtgctgctgctggacgacctgctgctgctgctccagcgccaggacgagcggctgctgctcaagtcccatagccggacactgacgcccacgcccgatggcaagaccatgctgcggcccgtgctgcggctcacctccgccatgacccgcgaggtggccaccgatcacaaagccttctacgtcctttttacctgggaccaggaggcccagatatacgagctggtggcacagactgtgtcggagcggaaaaactggtgtgctctcatcactgagactgccggatccctgaaagtccctgcccctgcctctcgccctaagccccggcccagcccgagcagcacccgagaacccctcctcagcagctctgagaacggcaatggtggccgagagacgtctccagctgatgcccggaccgagagaatcctcagtgacctcctgcccttctgcagaccaggccccgagggccagctcgctgccacggcccttcggaaagtgctgtccctgaagcagcttctgtttccggcggaggaagacaatggggcggggcctcctcgagatggggatggggtcccagggggcggccccctgagcccagcacggacccaggaaatccaggagaacctgctcagcttggaggagaccatgaagcagctggaggagttggaggaggaattttgccgcctgagacccctcctgtctcagcttggggggaactctgtcccccagcctggctgcacttgaggttcccgcccaggaaggccttttgcaagaaggagaggaatgggggagaggacgtgagggaccacccccacccacacagctgccgcagcatctcacaccccgagggcctgaggagagggagctgtgggccacgcctgggaggggcccagctggggttactggccccgcatgagcctcggccatctctccctcctgccctctgcttgggggactcagggctccattctggagggcaccacggtgacccgggccatctcagtattgcctgtgggggccacccctccacccccacccccaagtgccttcgctctgtttttataccctgaattggaggtttattttttaatatatattatctaagaaagatctgtgtgtgtgatg

SEQ ID NO: 306598 - DNA, 3210 bp, Homo sapiens
ccagagccaggaagcgggagccgggacccagggcccgggatcgccgagcccgacctcgggcgccccgccggtcacctccgcgcggacaccagccctgcagagcccagggagatggaagacttcgcccgaggggcggcctccccaggcccctcccggcctggcctggttcccgtcagcatcatcggggctgaggatgaggattttgagaacgagctggagacaaactcagaagagcaaaacagccagttccagagcctggagcaggtgaagcggcgcccagcccacctcatggccctcctgcagcacgtggccctgcagtttgagccaggacccctgctttgctgtctgcatgccgacatgctgggctcactgggccccaaggaggccaagaaggccttcctggacttctaccacagcttcctggagaagacagcggttctccgggtgccggtccctcccaacgtcgcctttgaacttgaccgcactagggctgacctcatctccgaggatgtccagcggcggttcgtgcaggaggtggtgcaaagccagcaggtagccgtgggccggcagctggaggacttccgttccaagcggctcatgggcatgacgccctgggagcaggagctggcccagctggaggcttgggttgggcgggaccgagccagctacgaggcccgggagcggcacgtggcggagcggctgctcatgcacctggaggagatgcaacataccatctctaccgacgaagaaaagagtgctgccgtggtcaacgccattggcctgtacatgcgccaccttggggtgcggaccaagagtggagacaagaagtcggggaggaacttcttccggaaaaaggtgatggggaaccggcggtcggacgagcctgccaagaccaagaaggggctgagcagcatcctggatgccgcccgctggaaccggggagagccccaggttccagattttcgacacctcaaagcagaggttgatgccgagaagccaggtgctacagaccggaagggaggcgtggggatgccctctcgggaccggaatatcggggctcctgggcaggacacccctggagtctctctgcaccctctgtccctggacagcccagaccgggaaccaggtgctgacgcccccctggagctgggggactcatccccgcagggcccaatgagcctggagtccttggcgcccccagagagtaccgacgagggggccgaaaccgagagccccgagcctggagatgagggggagccggggcggtcgggactggagcttgaaccagaagagcctcccggctggcgggaactcgtccccccagacaccctgcacagcctgcccaagagccaggtgaagcggcaggaggtcatcagcgagctgctggtgacagaggcggcccacgtgcgcatgctgcgggtgctgcacgacctcttcttccagcccatggcagaatgcctgttcttccccttggaggagctgcagaacatcttccccagcctggacgagctcatcgaggtgcattccctgttcctcgatcgcctgatgaagcggaggcaggagagtggctacctcatcgaggagatcggagacgtgctgctggcccggtttgatggtgctgagggctcctggttccagaaaatctcctcccgcttctgcagccgccagtcatttgccttagagcagctcaaagccaagcaacgcaaggaccctcggttctgtgccttcgtgcaggaagctgagagccgcccgcggtgccgccgcctgcagctgaaggacatgatccccacggagatgcagcggctgaccaagtaccccctgctcctgcagagcatcgggcagaacacagaagagcccacagaacgggagaaagtggagctggcagccgagtgctgccgggaaattctacaccacgtcaaccaagccgtgcgtgacatggaggacctgctgaggctcaaggactatcagcggcgcctggacttgtcccaccttcggcagagcagcgaccctatgctgagcgagttcaagaacctggacatcaccaagaagaaattggtccacgagggcccactgacgtggcgggtgactaaggacaaggcagtggaggtgcatgtgctgctgctggacgacctgctgctgctgctccagcgccaggacgagcggctgctgctcaagtcccatagccggacactgacgcccacgcccgatggcaagaccatgctgcggcccgtgctgcggctcacctccgccatgacccgcgaggtggccaccgatcacaaagccttctacgtcctttttacctgggaccaggaggcccagatatacgagctggtggcacagactgtgtcggagcggaaaaactggtgtgctctcatcactgagactgccggatccctgaaagtccctgcccctgcctctcgccctaagccccggcccagcccgagcagcacccgagaacccctcctcagcagctctgagaacggcaatggtggccgagagacgtctccagctgatgcccggaccgagagaatcctcagtgacctcctgcccttctgcagaccaggccccgagggccagctcgctgccacggcccttcggaaagtgctgtccctgaagcagcttctgtttccggcggaggaagacaatggggcggggcctcctcgagatggggatggggtcccagggggcggccccctgagcccagcacggacccaggaaatccaggagaacctgctcagcttggaggagaccatgaagcagctggaggagttggaggaggaattttgccgcctgagacccctcctgtctcagcttggggggaactctgtcccccagcctggctgcacttgaggttcccgcccaggaaggccttttgcaagaaggagaggaatgggggagaggacgtgagggaccacccccacccacacagctgccgcagcatctcacaccccgagggcctgaggagagggagctgtgggccacgcctgggaggggcccagctggggttactggccccgcatgagcctcggccatctctccctcctgccctctgcttgggggactcagggctccattctggagggcaccacggtgacccgggccatctcagtattgcctgtgggggccacccctccacccccacccccaagtgccttcgctctgtttttataccctgaattggaggtttattttttaatatatattatctaa

SEQ ID NO: 306599 - DNA, 3411 bp, Homo sapiens
ccagagccaggaagcgggagccgggacccagggcccgggatcgccgagcccgacctcgggcgccccgccggtcacctccgcgcggacaccagccctgcagagcccagggagatggaagacttcgcccgaggggcggcctccccaggcccctcccggcctggcctggttcccgtcagcatcatcggggctgaggatgaggattttgagaacgagctggagacaaactcagaagagcaaaacagccagttccagagcctggagcaggtgaagcggcgcccagcccacctcatggccctcctgcagcacgtggccctgcagtttgagccaggacccctgctttgctgtctgcatgccgacatgctgggctcactgggccccaaggaggccaagaaggccttcctggacttctaccacagcttcctggagaagacagcggttctccgggtgccggtccctcccaacgtcgcctttgaacttgaccgcactagggctgacctcatctccgaggatgtccagcggcggttcgtgcaggaggtggtgcaaagccagcaggtagccgtgggccggcagctggaggacttccgttccaagcggctcatgggcatgacgccctgggagcaggagctggcccagctggaggcttgggttgggcgggaccgagccagctacgaggcccgggagcggcacgtggcggagcggctgctcatgcacctggaggagatgcaacataccatctctaccgacgaagaaaagagtgctgccgtggtcaacgccattggcctgtacatgcgccaccttggggtgcggaccaagagtggagacaagaagtcggggaggaacttcttccggaaaaaggtgatggggaaccggcggtcggacgagcctgccaagaccaagaaggggctgagcagcatcctggatgccgcccgctggaaccggggagagccccaggttccagattttcgacacctcaaagcagaggttgatgccgagaagccaggtgctacagaccggaagggaggcgtggggatgccctctcgggaccggaatatcggggctcctgggcaggacacccctggagtctctctgcaccctctgtccctggacagcccagaccgggaaccaggtgctgacgcccccctggagctgggggactcatccccgcagggcccaatgagcctggagtccttggcgcccccagagagtaccgacgagggggccgaaaccgagagctcggggtccaggctatcagggcgtctggggcgctcagagagcctgcgggtgagtgaccgccgccggccttcccggggcagcctcggggctaagggccggggtgggggccgctcccggagcgacgtggacatggaccccagttccgccacggcagtgcttggccctgcccgacgagccacccccgagcctggagatgagggggagccggggcggtcgggactggagcttgaaccagaagagcctcccggctggcgggaactcgtccccccagacaccctgcacagcctgcccaagagccaggtgaagcggcaggaggtcatcagcgagctgctggtgacagaggcggcccacgtgcgcatgctgcgggtgctgcacgacctcttcttccagcccatggcagaatgcctgttcttccccttggaggagctgcagaacatcttccccagcctggacgagctcatcgaggtgcattccctgttcctcgatcgcctgatgaagcggaggcaggagagtggctacctcatcgaggagatcggagacgtgctgctggcccggtttgatggtgctgagggctcctggttccagaaaatctcctcccgcttctgcagccgccagtcatttgccttagagcagctcaaagccaagcaacgcaaggaccctcggttctgtgccttcgtgcaggaagctgagagccgcccgcggtgccgccgcctgcagctgaaggacatgatccccacggagatgcagcggctgaccaagtaccccctgctcctgcagagcatcgggcagaacacagaagagcccacagaacgggagaaagtggagctggcagccgagtgctgccgggaaattctacaccacgtcaaccaagccgtgcgtgacatggaggacctgctgaggctcaaggactatcagcggcgcctggacttgtcccaccttcggcagagcagcgaccctatgctgagcgagttcaagaacctggacatcaccaagaagaaattggtccacgagggcccactgacgtggcgggtgactaaggacaaggcagtggaggtgcatgtgctgctgctggacgacctgctgctgctgctccagcgccaggacgagcggctgctgctcaagtcccatagccggacactgacgcccacgcccgatggcaagaccatgctgcggcccgtgctgcggctcacctccgccatgacccgcgaggtggccaccgatcacaaagccttctacgtcctttttacctgggaccaggaggcccagatatacgagctggtggcacagactgtgtcggagcggaaaaactggtgtgctctcatcactgagactgccggatccctgaaagtccctgcccctgcctctcgccctaagccccggcccagcccgagcagcacccgagaacccctcctcagcagctctgagaacggcaatggtggccgagagacgtctccagctgatgcccggaccgagagaatcctcagtgacctcctgcccttctgcagaccaggccccgagggccagctcgctgccacggcccttcggaaagtgctgtccctgaagcagcttctgtttccggcggaggaagacaatggggcggggcctcctcgagatggggatggggtcccagggggcggccccctgagcccagcacggacccaggaaatccaggagaacctgctcagcttggaggagaccatgaagcagctggaggagttggaggaggaattttgccgcctgagacccctcctgtctcagcttggggggaactctgtcccccagcctggctgcacttgaggttcccgcccaggaaggccttttgcaagaaggagaggaatgggggagaggacgtgagggaccacccccacccacacagctgccgcagcatctcacaccccgagggcctgaggagagggagctgtgggccacgcctgggaggggcccagctggggttactggccccgcatgagcctcggccatctctccctcctgccctctgcttgggggactcagggctccattctggagggcaccacggtgacccgggccatctcagtattgcctgtgggggccacccctccacccccacccccaagtgccttcgctctgtttttataccctgaattggaggtttattttttaatatatattatctaagaaagatctgtgtgtgtgatg

SEQ ID NO: 306600 - DNA, 3111 bp, Homo sapiens
ccagagccaggaagcgggagccgggacccagggcccgggatcgccgagcccgacctcgggcgccccgccggtcacctccgcgcggacaccagccctgcagagcccagggagatggaagacttcgcccgaggggcggcctccccaggcccctcccggcctggcctggttcccgtcagcatcatcggggctgaggatgaggattttgagaacgagctggagacaaactcagaagagcaaaacagccagttccagagcctggagcaggtgaagcggcgcccagcccacctcatggccctcctgcagcacgtggccctgcagtttgagccaggacccctggttctccgggtgccggtccctcccaacgtcgcctttgaacttgaccgcactagggctgacctcatctccgaggatgtccagcggcggttcgtgcaggaggtggtgcaaagccagcaggtagccgtgggccggcagctggaggacttccgttccaagcggctcatgggcatgacgccctgggagcaggagctggcccagctggaggcttgggttgggcgggaccgagccagctacgaggcccgggagcggcacgtggcggagcggctgctcatgcacctggaggagatgcaacataccatctctaccgacgaagaaaagagtgctgccgtggtcaacgccattggcctgtacatgcgccaccttggggtgcggaccaagagtggagacaagaagtcggggaggaacttcttccggaaaaaggtgatggggaaccggcggtcggacgagcctgccaagaccaagaaggggctgagcagcatcctggatgccgcccgctggaaccggggagagccccaggttccagattttcgacacctcaaagcagaggttgatgccgagaagccaggtgctacagaccggaagggaggcgtggggatgccctctcgggaccggaatatcggggctcctgggcaggacacccctggagtctctctgcaccctctgtccctggacagcccagaccgggaaccaggtgctgacgcccccctggagctgggggactcatccccgcagggcccaatgagcctggagtccttggcgcccccagagagtaccgacgagggggccgaaaccgagagccccgagcctggagatgagggggagccggggcggtcgggactggagcttgaaccagaagagcctcccggctggcgggaactcgtccccccagacaccctgcacagcctgcccaagagccaggtgaagcggcaggaggtcatcagcgagctgctggtgacagaggcggcccacgtgcgcatgctgcgggtgctgcacgacctcttcttccagcccatggcagaatgcctgttcttccccttggaggagctgcagaacatcttccccagcctggacgagctcatcgaggtgcattccctgttcctcgatcgcctgatgaagcggaggcaggagagtggctacctcatcgaggagatcggagacgtgctgctggcccggtttgatggtgctgagggctcctggttccagaaaatctcctcccgcttctgcagccgccagtcatttgccttagagcagctcaaagccaagcaacgcaaggaccctcggttctgtgccttcgtgcaggaagctgagagccgcccgcggtgccgccgcctgcagctgaaggacatgatccccacggagatgcagcggctgaccaagtaccccctgctcctgcagagcatcgggcagaacacagaagagcccacagaacgggagaaagtggagctggcagccgagtgctgccgggaaattctacaccacgtcaaccaagccgtgcgtgacatggaggacctgctgaggctcaaggactatcagcggcgcctggacttgtcccaccttcggcagagcagcgaccctatgctgagcgagttcaagaacctggacatcaccaagaagaaattggtccacgagggcccactgacgtggcgggtgactaaggacaaggcagtggaggtgcatgtgctgctgctggacgacctgctgctgctgctccagcgccaggacgagcggctgctgctcaagtcccatagccggacactgacgcccacgcccgatggcaagaccatgctgcggcccgtgctgcggctcacctccgccatgacccgcgaggtggccaccgatcacaaagccttctacgtcctttttacctgggaccaggaggcccagatatacgagctggtggcacagactgtgtcggagcggaaaaactggtgtgctctcatcactgagactgccggatccctgaaagtccctgcccctgcctctcgccctaagccccggcccagcccgagcagcacccgagaacccctcctcagcagctctgagaacggcaatggtggccgagagacgtctccagctgatgcccggaccgagagaatcctcagtgacctcctgcccttctgcagaccaggccccgagggccagctcgctgccacggcccttcggaaagtgctgtccctgaagcagcttctgtttccggcggaggaagacaatggggcggggcctcctcgagatggggatggggtcccagggggcggccccctgagcccagcacggacccaggaaatccaggagaacctgctcagcttggaggagaccatgaagcagctggaggagttggaggaggaattttgccgcctgagacccctcctgtctcagcttggggggaactctgtcccccagcctggctgcacttgaggttcccgcccaggaaggccttttgcaagaaggagaggaatgggggagaggacgtgagggaccacccccacccacacagctgccgcagcatctcacaccccgagggcctgaggagagggagctgtgggccacgcctgggaggggcccagctggggttactggccccgcatgagcctcggccatctctccctcctgccctctgcttgggggactcagggctccattctggagggcaccacggtgacccgggccatctcagtattgcctgtgggggccacccctccacccccacccccaagtgccttcgctctgtttttataccctgaattggaggtttattttttaatatatattatctaa

SEQ ID NO: 306601 - DNA, 2113 bp, Homo sapiens
tagtctagagatcccgtggagcaggacactgaccggggttgaacgctctaagaggctgaaggctgcttcttgggatggcccaagctggggccctaacaaggcctctgtccacagccccgagcctggagatgagggggagccggggcggtcgggactggagcttgaaccagaagagcctcccggctggcgggaactcgtccccccagacaccctgcacagcctgcccaagagccaggtgaagcggcaggaggtcatcagcgagctgctggtgacagaggcggcccacgtgcgcatgctgcgggtgctgcacgacctcttcttccagcccatggcagaatgcctgttcttccccttggaggagctgcagaacatcttccccagcctggacgagctcatcgaggtgcattccctgttcctcgatcgcctgatgaagcggaggcaggagagtggctacctcatcgaggagatcggagacgtgctgctggcccggtttgatggtgctgagggctcctggttccagaaaatctcctcccgcttctgcagccgccagtcatttgccttagagcagctcaaagccaagcaacgcaaggaccctcggttctgtgccttcgtgcaggaagctgagagccgcccgcggtgccgccgcctgcagctgaaggacatgatccccacggagatgcagcggctgaccaagtaccccctgctcctgcagagcatcgggcagaacacagaagagcccacagaacgggagaaagtggagctggcagccgagtgctgccgggaaattctacaccacgtcaaccaagccgtgcgtgacatggaggacctgctgaggctcaaggactatcagcggcgcctggacttgtcccaccttcggcagagcagcgaccctatgctgagcgagttcaagaacctggacatcaccaagaagaaattggtccacgagggcccactgacgtggcgggtgactaaggacaaggcagtggaggtgcatgtgctgctgctggacgacctgctgctgctgctccagcgccaggacgagcggctgctgctcaagtcccatagccggacactgacgcccacgcccgatggcaagaccatgctgcggcccgtgctgcggctcacctccgccatgacccgcgaggtggccaccgatcacaaagccttctacgtcctttttacctgggaccaggaggcccagatatacgagctggtggcacagactgtgtcggagcggaaaaactggtgtgctctcatcactgagactgccggatccctgaaagtccctgcccctgcctctcgccctaagccccggcccagcccgagcagcacccgagaacccctcctcagcagctctgagaacggcaatggtggccgagagacgtctccagctgatgcccggaccgagagaatcctcagtgacctcctgcccttctgcagaccaggccccgagggccagctcgctgccacggcccttcggaaagtgctgtccctgaagcagcttctgtttccggcggaggaagacaatggggcggggcctcctcgagatggggatggggtcccagggggcggccccctgagcccagcacggacccaggaaatccaggagaacctgctcagcttggaggagaccatgaagcagctggaggagttggaggaggaattttgccgcctgagacccctcctgtctcagcttggggggaactctgtcccccagcctggctgcacttgaggttcccgcccaggaaggccttttgcaagaaggagaggaatgggggagaggacgtgagggaccacccccacccacacagctgccgcagcatctcacaccccgagggcctgaggagagggagctgtgggccacgcctgggaggggcccagctggggttactggccccgcatgagcctcggccatctctccctcctgccctctgcttgggggactcagggctccattctggagggcaccacggtgacccgggccatctcagtattgcctgtgggggccacccctccacccccacccccaagtgccttcgctctgtttttataccctgaattggaggtttattttttaatatatattatctaagaaagatctgtgtgtgtgatg

SEQ ID NO: 306602 - DNA, 3729 bp, Homo sapiens
ccagagccaggaagcgggagccgggacccagggcccgggatcgccgagcccgacctcgggcgccccgccggtcacctccgcgcggacaccagccctgcagagcccagggagatggaagacttcgcccgaggggcggcctccccaggcccctcccggcctggcctggttcccgtcagcatcatcggggctgaggatgaggattttgagaacgagctggagacaaactcagaagagcaaaacagccagttccagagcctggagcaggtgaagcggcgcccagcccacctcatggccctcctgcagcacgtggccctgcagtttgagccaggacccctgctttgctgtctgcatgccgacatgctgggctcactgggccccaaggaggccaagaaggccttcctggacttctaccacagcttcctggagaagacagcggttctccgggtgccggtccctcccaacgtcgcctttgaacttgaccgcactagggctgacctcatctccgaggatgtccagcggcggttcgtgcaggaggtggtgcaaagccagcaggtagccgtgggccggcagctggaggacttccgttccaagcggctcatgggcatgacgccctgggagcaggagctggcccagctggaggcttgggttgggcgggaccgagccagctacgaggcccgggagcggcacgtggcggagcggctgctcatgcacctggaggagatgcaacataccatctctaccgacgaagaaaagagtgctgccgtggtcaacgccattggcctgtacatgcgccaccttggggtgcggaccaagagtggagacaagaagtcggggaggaacttcttccggaaaaaggtgatggggaaccggcggtcggacgagcctgccaagaccaagaaggggctgagcagcatcctggatgccgcccgctggaaccggggagagccccaggttccagattttcgacacctcaaagcagaggttgatgccgagaagccaggtgctacagaccggaagggaggcgtggggatgccctctcgggaccggaatatcggggctcctgggcaggacacccctggagtctctctgcaccctctgtccctggacagcccagaccgggaaccaggtgctgacgcccccctggagctgggggactcatccccgcagggcccaatgagcctggagtccttggcgcccccagagagtaccgacgagggggccgaaaccgagagccccgagcctggagatgagggggagccggggcggtcgggactggagcttgaaccagaagagcctcccggctggcgggaactcgtccccccagacaccctgcacagcctgcccaagagccaggtgaagcggcaggaggtcatcagcgagctgctggtgacagaggcggcccacgtgcgcatgctgcgggtgctgcacgacctcttcttccagcccatggcagaatgcctgttcttccccttggaggagctgcagaacatcttccccagcctggacgagctcatcgaggtgcattccctgttcctcgatcgcctgatgaagcggaggcaggagagtggctacctcatcgaggagatcggagacgtgctgctggcccggtttgatggtgctgagggctcctggttccagaaaatctcctcccgcttctgcagccgccagtcatttgccttagagcagctcaaagccaagcaacgcaaggaccctcggttctgtgccttcgtgcaggaagctgagagccgcccgcggtgccgccgcctgcagctgaaggacatgatccccacggagatgcagcggctgaccaagtaccccctgctcctgcagagcatcgggcagaacacagaagagcccacagaacgggagaaagtggagctggcagccgagtgctgccgggaaattctacaccacgtcaaccaagccgtgcgtgacatggaggacctgctgaggctcaaggactatcagcggcgcctggacttgtcccaccttcggcagagcagcgaccctatgctgagcgagttcaagaacctggacatcaccaagaagaaattggtccacgagggcccactgacgtggcgggtgactaaggacaaggcagtggaggtgcatgtgctgctgctggacgacctgctgctgctgctccagcgccaggacgagcggctgctgctcaagtcccatagccggacactgacgcccacgcccgatggcaagaccatgctgcggcccgtgctgcggctcacctccgccatgacccgcgaggtggccaccgatcacaaagccttctacgtcctttttacctgggaccaggaggcccagatatacgagctggtggcacagactgtgtcggagcggaaaaactggtgtgctctcatcactgagactgccggatccctgaaagtccctgcccctgcctctcgccctaagccccggcccagcccgagcaggtgaggggggccatggagagagctggaggttcagggagtggggccggaaggcggggcaggcttccctccacaactccagaaccgtctctgtgtgagcatgcacatgtgtgaatgcatgtgtgtgcatacatgtgtgtctgtacgcaagtatgtgactgtgcgtgcatatatagtgtgtgtatgcatgcatgtgtgcgtgtgcatgtgtgtgcgtgtatggtgtgtgtgtatgcatatgtgtgcatgcgtgtgacagcatgtgcatgcatgtgtgtgtgtgtgcgcatgtgccgaccccaccactgccccgtctgtctcctgtctccaggcctctgtgtcttccattgtctgggcctctctgtctccctgtctcccggcctcgacctctgtctctgtctccggacctccctgcctccccacctccagctctctgtctccctgcccctgcggccccccagggccaggggtgtggggtcacccagcacttcctcccctcagcacccgagaacccctcctcagcagctctgagaacggcaatggtggccgagagacgtctccagctgatgcccggaccgagagaatcctcagtgacctcctgcccttctgcagaccaggccccgagggccagctcgctgccacggcccttcggaaagtgctgtccctgaagcagcttctgtttccggcggaggaagacaatggggcggggcctcctcgagatggggatggggtcccagggggcggccccctgagcccagcacggacccaggaaatccaggagaacctgctcagcttggaggagaccatgaagcagctggaggagttggaggaggaattttgccgcctgagacccctcctgtctcagcttggggggaactctgtcccccagcctggctgcacttgaggttcccgcccaggaaggccttttgcaagaaggagaggaatgggggagaggacgtgagggaccacccccacccacacagctgccgcagcatctcacaccccgagggcctgaggagagggagctgtgggccacgcctgggaggggcccagctggggttactggccccgcatgagcctcggccatctctccctcctgccctctgcttgggggactcagggctccattctggagggcaccacggtgacccgggccatctcagtattgcctgtgggggccacccctccacccccacccccaagtgccttcgctctgtttttataccctgaattggaggtttattttttaatatatattatctaagaaagatctgtgtgtgtgatg

SEQ ID NO: 306603 - DNA, 3067 bp, Homo sapiens
ccagagccaggaagcgggagccgggacccagggcccgggatcgccgagcccgacctcgggcgccccgccggtcacctccgcgcggacaccagccctgcagagcccagggagatggaagacttcgcccgaggggcggcctccccaggcccctcccggcctggcctggttcccgtcagcatcatcggggctgaggatgaggattttgagaacgagctggagacaaactcagaagagcaaaacagccagttccagagcctggagcaggtgaagcggcgcccagcccacctcatggccctcctgcagcacgtggccctgcagtttgagccaggacccctgctttgctgtctgcatgccgacatgctgggctcactgggccccaaggaggccaagaaggccttcctggacttctaccacagcttcctggagaagacagcggttctccgggtgccggtccctcccaacgtcgcctttgaacttgaccgcactagggctgacctcatctccgaggatgtccagcggcggttcgtgcaggaggtggtgcaaagccagcaggtagccgtgggccggcagctggaggacttccgttccaagcggctcatgggcatgacgccctgggagcaggagctggcccagctggaggcttgggttgggcgggaccgagccagctacgaggcccgggagcggcacgtggcggagcggctgctcatgcacctggaggagatgcaacataccatctctaccgacgaagaaaagagtgctgccgtggtcaacgccattggcctgtacatgcgccaccttggggtgcggaccaagagtggagacaagaagtcggggaggaacttcttccggaaaaaggtgatggggaaccggcggtcggacgagcctgccaagaccaagaaggggctgagcagcatcctggatgccgcccgctggaaccggggagagccccaggttccagattttcgacacctcaaagcagaggttgatgccgagaagccaggtgctacagaccggaagggaggcgtggggatgccctctcgggaccggaatatcggggctcctgggcaggacacccctggagtctctctgcaccctctgtccctggacagcccagaccgggaaccaggtgctgacgcccccctggagctgggggactcatccccgcagggcccaatgagcctggagtccttggcgcccccagagagtaccgacgagggggccgaaaccgagagccccgagcctggagatgagggggagccggggcggtcgggactggagcttgaaccagaagagcctcccggctggcgggaactcgtccccccagacaccctgcacagcctgcccaagagccaggtgaagcggcaggaggtcatcagcgagctgctggtgacagaggcggcccacgtgcgcatgctgcgggtgctgcacgacctcttcttccagcccatggcagaatgcctgttcttccccttggaggagctgcagaacatcttccccagcctggacgagctcatcgaggtgcattccctgttcctcgatcgcctgatgaagcggaggcaggagagtggctacctcatcgaggagatcggagacgtgctgctggcccggtttgatggtgctgagggctcctggttccagaaaatctcctcccgcttctgcagccgccagtcatttgccttagagcagctcaaagccaagcaacgcaaggaccctcggttctgtgccttcgtgcaggaagctgagagccgcccgcggtgccgccgcctgcagctgaaggacatgatccccacggagatgcagcggctgaccaagtaccccctgctcctgcagagcatcgggcagaacacagaagagcccacagaacgggagaaagtggagctggcagccgagtgctgccgggaaattctacaccacgtcaaccaagccgtgcgtgacatggaggacctgctgaggctcaaggactatcagcggcgcctggacttgtcccaccttcggcagagcagcgaccctatgctgagcgagttcaagaacctggacatcaccaagaagaaattggtccacgagggcccactgacgtggcgggtgactaaggacaaggcagtggaggtgcatgtgctgctgctggacgacctgctgctgctgctccagcgccaggacgagcggctgctgctcaagtcccatagccggacactgacgcccacgcccgatggcaagaccatgctgcggcccgtgctgcggctcacctccgccatgacccgcgaggtggccaccgatcacaaagccttctacgtcctttttacctgggaccaggaggcccagatatacgagctggtggcacagactgtgtcggagcggaaaaactggtgtgctctcatcactgagactgccggatccctgaaagtccctgcccctgcctctcgccctaagccccggcccagcccgagcagcacccgagaacccctcctcagcagctctgagaacggcaatggtggccgagagacgtctccagctgatgcccggaccgagagaatcctcagtgacctcctgcccttctgcagaccaggccccgagggccagctcgctgccacggcccttcggaaaggagttggaggaggaattttgccgcctgagacccctcctgtctcagcttggggggaactctgtcccccagcctggctgcacttgaggttcccgcccaggaaggccttttgcaagaaggagaggaatgggggagaggacgtgagggaccacccccacccacacagctgccgcagcatctcacaccccgagggcctgaggagagggagctgtgggccacgcctgggaggggcccagctggggttactggccccgcatgagcctcggccatctctccctcctgccctctgcttgggggactcagggctccattctggagggcaccacggtgacccgggccatctcagtattgcctgtgggggccacccctccacccccacccccaagtgccttcgctctgtttttataccctgaattggaggtttattttttaatatatattatctaagaaagatctgtgtgtgtgatg

SEQ ID NO: 306604 - DNA, 2926 bp, Homo sapiens
ccagagccaggaagcgggagccgggacccagggcccgggatcgccgagcccgacctcgggcgccccgccggtcacctccgcgcggacaccagccctgcagagcccagggagatggaagacttcgcccgaggggcggcctccccaggcccctcccggcctggcctggttcccgtcagcatcatcggggctgaggatgaggattttgagaacgagctggagacaaactcagaagagcaaaacagccagttccagagcctggagcaggtgaagcggcgcccagcccacctcatggccctcctgcagcacgtggccctgcagtttgagccaggacccctgctttgctgtctgcatgccgacatgctgggctcactgggccccaaggaggccaagaaggccttcctggacttctaccacagcttcctggagaagacagcggttctccgggtgccggtccctcccaacgtcgcctttgaacttgaccgcactagggctgacctcatctccgaggatgtccagcggcggttcgtgcaggaggtggtgcaaagccagcaggtagccgtgggccggcagctggaggacttccgttccaagcggctcatgggcatgacgccctgggagcaggagctggcccagctggaggcttgggttgggcgggaccgagccagctacgaggcccgggagcggcacgtggcggagcggctgctcatgcacctggaggagatgcaacataccatctctaccgacgaagaaaagagtgctgccgtggtcaacgccattggcctgtacatgcgccaccttggggtgcggaccaagagtggagacaagaagtcggggaggaacttcttccggaaaaaggtgatggggaaccggcggtcggacgagcctgccaagaccaagaaggggctgagcagcatcctggatgccgcccgctggaaccggggagagccccaggttccagattttcgacacctcaaagcagaggttgatgccgagaagccaggtgctacagaccggaagggaggcgtggggatgccctctcgggaccggaatatcggggctcctgggcaggacacccctggagtctctctgcaccctctgtccctggacagcccagaccgggaaccaggtgctgacgcccccctggagctgggggactcatccccgcagggcccaatgagcctggagtccttggcgcccccagagagtaccgacgagggggccgaaaccgagagccccgagcctggagatgagggggagccggggcggtcgggactggagcttgaaccagaagagcctcccggctggcgggaactcgtccccccagacaccctgcacagcctgcccaagagccaggtgaagcggcaggaggtcatcagcgagctgctggtgacagaggcggcccacgtgcgcatgctgcgggtgctgcacgacctcttcttccagcccatggcagaatgcctgttcttccccttggaggagctgcagaacatcttccccagcctggacgagctcatcgaggtgcattccctgttcctcgatcgcctgatgaagcggaggcaggagagtggctacctcatcgaggagatcggagacgtgctgctggcccggtttgatggtgctgagggctcctggttccagaaaatctcctcccgcttctgcagccgccagtcatttgccttagagcagctcaaagccaagcaacgcaaggaccctcggttctgtgccttcgtgcaggaagctgagagccgcccgcggtgccgccgcctgcagctgaaggacatgatccccacggagatgcagcggctgaccaagtaccccctgctcctgcagagcatcgggcagaacacagaagagcccacagaacgggagaaagtggagctggcagccgagtgctgccgggaaattctacaccacgtcaaccaagccgtgcgtgacatggaggacctgctgaggctcaaggactatcagcggcgcctggacttgtcccaccttcggcagagcagcgaccctatgctgagcgagttcaagaacctggacatcaccaagaagaaattggtccacgagggcccactgacgtggcgggtgactaaggacaaggcagtggaggtgcatgtgctgctgctggacgacctgctgctgctgctccagcgccaggacgagcggctgctgctcaagtcccatagccggacactgacgcccacgcccgatggcaagaccatgctgcggcccgtgctgcggctcacctccgccatgacccgcgaggtggccaccgatcacaaagccttctacgtcctttttacctgggaccaggaggcccagatatacgagctggtggcacagactgtgtcggagcggaaaaactggtgtgctctcatcactgagactgccggatccctgaaagtccctgcccctgcctctcgccctaagccccggcccagcccgagcagcacccgagaacccctcctcagcagctctgagaacggcaatggtggccgagagacgtctccagctgatgcccggaccgagagaatcctcagtgacctcctgcccttctgcagaccaggccccgagggccagctcgctgccacggcccttcggaaaggtagcccagctctgcccctccagggtggccaccagcccaaacagtgcctctgttccaactagaacaaggctctccacgtcaaaaatttccttacgcccagctgccagaaaacaaatgctccaaacccacccagcctgcaccactgtcctgggtgcccacgtccctcttctgcagccaccatcccttgcttgattctatatttagcctcttcctgaacacatctctgtcttcagtaccttcctgccctgtcccaaccctaaacccagcctcacttcttcacctccctttggatccccgaaccccatctgctcagccttgcctggc

SEQ ID NO: 306605 - DNA, 1931 bp, Homo sapiens
ttaaggctagtagaggccgggttgaaatcggcagagggctgccaagagttccaggtgaagcggaggaggtcatcagcgagctgctggtgacagaggcggcccacgtgcgcatgctgcgggtgctgcacgacctcttcttccagcccatggcagaatgcctgttcttccccttggaggagctgcagaacatcttccccagcctggacgagctcatcgaggtgcattccctgttcctcgatcgcctgatgaagcggaggcaggagagtggctacctcatcgaggagatcggagacgtgctgctggcccggtttgatggtgctgagggctcctggttccagaaaatctcctcccgcttctgcagccgccagtcatttgccttagagcagctcaaagccaagcaacgcaaggaccctcggttctgtgccttcgtgcaggaagctgagagccgcccgcggtgccgccgcctgcagctgaaggacatgatccccacggagatgcagcggctgaccaagtaccccctgctcctgcagagcatcgggcagaacacagaagagcccacagaacgggagaaagtggagctggcagccgagtgctgccgggaaattctacaccacgtcaaccaagccgtgcgtgacatggaggacctgctgaggctcaaggactatcagcggcgcctggacttgtcccaccttcggcagagcagcgaccctatgctgagcgagttcaagaacctggacatcaccaagaagaaattggtccacgagggcccactgacgtggcgggtgactaaggacaaggcagtggaggtgcatgtgctgctgctggacgacctgctgctgctgctccagcgccaggacgagcggctgctgctcaagtcccatagccggacactgacgcccacgcccgatggcaagaccatgctgcggcccgtgctgcggctcacctccgccatgacccgcgaggtggccaccgatcacaaagccttctacgtcctttttacctgggaccaggaggcccagatatacgagctggtggcacagactgtgtcggagcggaaaaactggtgtgctctcatcactgagactgccggatccctgaaagtccctgcccctgcctctcgccctaagccccggcccagcccgagcagcacccgagaacccctcctcagcagctctgagaacggcaatggtggccgagagacgtctccagctgatgcccggaccgagagaatcctcagtgacctcctgcccttctgcagaccaggccccgagggccagctcgctgccacggcccttcggaaagtgctgtccctgaagcagcttctgtttccggcggaggaagacaatggggcggggcctcctcgagatggggatggggtcccagggggcggccccctgagcccagcacggacccaggaaatccaggagaacctgctcagcttggaggagaccatgaagcagctggaggagttggaggaggaattttgccgcctgagacccctcctgtctcagcttggggggaactctgtcccccagcctggctgcacttgaggttcccgcccaggaaggccttttgcaagaaggagaggaatgggggagaggacgtgagggaccacccccacccacacagctgccgcagcatctcacaccccgagggcctgaggagagggagctgtgggccacgcctgggaggggcccagctggggttactggccccgcatgagcctcggccatctctccctcctgccctctgcttgggggactcagggctccattctggagggcaccacggtgacccgggccatctcagtattgcctgtgggggccacccctccacccccacccccaagtgccttcgctctgtttttataccctgaattggaggtttattttttaatatatattatctaagaaagatctgtgtgtgtgatg

SEQ ID NO: 306606 - DNA, 1301 bp, Homo sapiens
  misc_feature (13)..(13): n is a, c, g, or t
cggggaggaaaanaaaaaacataggctaggtacgaggcctgggtggttgcttgtcccaccttcggcagagcagcgaccctatgctgagcgagttcaagaacctggacatcaccaagaagaaattggtccacgagggcccactgacgtggcgggtgactaaggacaaggcagtggaggtgcatgtgctgctgctggacgacctgctgctgctgctccagcgccaggacgagcggctgctgctcaagtcccatagccggacactgacgcccacgcccgatggcaagaccatgctgcggcccgtgctgcggctcacctccgccatgacccgcgaggtggccaccgatcacaaagccttctacgtcctttttacctgggaccaggaggcccagatatacgagctggtggcacagactgtgtcggagcggaaaaactggtgtgctctcatcactgagactgccggatccctgaaagtccctgcccctgcctctcgccctaagccccggcccagcccgagcagcacccgagaacccctcctcagcagctctgagaacggcaatggtggccgagagacgtctccagctgatgcccggaccgagagaatcctcagtgacctcctgcccttctgcagaccaggccccgagggccagctcgctgccacggcccttcggaaagtgctgtccctgaagcagcttctgtttccggcggaggaagacaatggggcggggcctcctcgagatggggatggggtcccagggggcggccccctgagcccagcacggacccaggaaatccaggagaacctgctcagcttggaggagaccatgaagcagctggaggagttggaggaggaattttgccgcctgagacccctcctgtctcagcttggggggaactctgtcccccagcctggctgcacttgaggttcccgcccaggaaggccttttgcaagaaggagaggaatgggggagaggacgtgagggaccacccccacccacacagctgccgcagcatctcacaccccgagggcctgaggagagggagctgtgggccacgcctgggaggggcccagctggggttactggccccgcatgagcctcggccatctctccctcctgccctctgcttgggggactcagggctccattctggagggcaccacggtgacccgggccatctcagtattgcctgtgggggccacccctccacccccacccccaagtgccttcgctctgtttttataccctgaattggaggtttattttttaatatatattatctaagaaagatctgtgtgtgtgatg

SEQ ID NO: 306607 - DNA, 1649 bp, Homo sapiens
  misc_feature (1636)..(1636): n is a, c, g, or t
ccagagccaggaagcgggagccgggacccagggcccgggatcgccgagcccgacctcgggcgccccgccggtcacctccgcgcggacaccagccctgcagagcccagggagatggaagacttcgcccgaggggcggcctccccaggcccctcccggcctggcctggttcccgtcagcatcatcggggctgaggatgaggattttgagaacgagctggagacaaactcagaagagcaaaacagccagttccagagcctggagcaggtgaagcggcgcccagcccacctcatggccctcctgcagcacgtggccctgcagtttgagccaggacccctgctttgctgtctgcatgccgacatgctgggctcactgggccccaaggaggccaagaaggccttcctggacttctaccacagcttcctggagaagacagcggttctccgggtgccggtccctcccaacgtcgcctttgaacttgaccgcactagggctgacctcatctccgaggatgtccagcggcggttcgtgcaggaggtggtgcaaagccagcaggtagccgtgggccggcagctggaggacttccgttccaagcggctcatgggcatgacgccctgggagcaggagctggcccagctggaggcttgggttgggcgggaccgagccagctacgaggcccgggagcggcacgtggcggagcggctgctcatgcacctggaggagatgcaacataccatctctaccgacgaagaaaagagtgctgccgtggtcaacgccattggcctgtacatgcgccaccttggggtgcggaccaagagtggagacaagaagtcggggaggaacttcttccggaaaaaggtgatggggaaccggcggtcggacgagcctgccaagaccaagaaggggctgagcagcatcctggatgccgcccgctggaaccggggagagccccaggttccagattttcgacacctcaaagcagaggttgatgccgagaagccaggtgctacagaccggaagggaggcgtggggatgccctctcgggaccggaatatcggggctcctgggcaggacacccctggagtctctctgcaccctctgtccctggacagcccagaccgggaaccaggtgctgacgcccccctggagctgggggactcatccccgcagggcccaatgagcctggagtccttggcgcccccagagagtaccgacgagggggccgaaaccgagaggtgcccaggctggggtgcaggggcgggaggtgtggcttactgggcgctggtgggtgggtgcagggtcaccgctgccatctgtgcctgcctgtcccaggctcttgctccccatgctcctctgctgctctctgggtctggccattcctctcccttcttctttccttttctcatctccctcctgcttcctcattgcccccctttccttttatccttcctttttcctctgctccttcctctccttccttttttcactaatccttctcctcctcccttcctctccaccactccttccatctcctttatttccccctcctctctcacctcccctctcctctctcacctcccccatcctctctcacctcccccctcctctctcacctacccgactcgccttaaggatcctnaagtaccaacagc

SEQ ID NO: 306608 - DNA, 967 bp, Homo sapiens
aggtttctgggttcccagggacaggagggctgtggggaggccctggcatagggtctgggggctctgactgcccagggatttggcctttctccccagctggtgtgctctcatcactgagactgccggatccctgaaagtccctgcccctgcctctcgccctaagccccggcccagcccgagcagcacccgagaacccctcctcagcagctctgagaacggcaatggtggccgagagacgtctccagctgatgcccggaccgagagaatcctcagtgacctcctgcccttctgcagaccaggccccgagggccagctcgctgccacggcccttcggaaagtgctgtccctgaagcagcttctgtttccggcggaggaagacaatggggcggggcctcctcgagatggggatggggtcccagggggcggccccctgagcccagcacggacccaggaaatccaggagaacctgctcagcttggaggagaccatgaagcagctggaggagttggaggaggaattttgccgcctgagacccctcctgtctcagcttggggggaactctgtcccccagcctggctgcacttgaggttcccgcccaggaaggccttttgcaagaaggagaggaatgggggagaggacgtgagggaccacccccacccacacagctgccgcagcatctcacaccccgagggcctgaggagagggagctgtgggccacgcctgggaggggcccagctggggttactggccccgcatgagcctcggccatctctccctcctgccctctgcttgggggactcagggctccattctggagggcaccacggtgacccgggccatctcagtattgcctgtgggggccacccctccacccccacccccaagtgccttcgctctgtttttataccctgaattggaggtttattttttaatatatattatctaagaaagatctgtgtgtgtgatg

SEQ ID NO: 306609 - DNA, 1662 bp, Homo sapiens
ccagagccaggaagcgggagccgggacccagggcccgggatcgccgagcccgacctcgggcgccccgccggtcacctccgcgcggacaccagccctgcagagcccagggagatggaagacttcgcccgaggggcggcctccccaggcccctcccggcctggcctggttcccgtcagcatcatcggggctgaggatgaggattttgagaacgagctggagacaaactcagaagagcaaaacagccagttccagagcctggagcaggtgaagcggcgcccagcccacctcatggccctcctgcagcacgtggccctgcagtttgagccaggacccctgctttgctgtctgcatgccgacatgctgggctcactgggccccaaggaggccaagaaggccttcctggacttctaccacagcttcctggagaagacagcggttctccgggtgccggtccctcccaacgtcgcctttgaacttgaccgcactagggctgacctcatctccgaggatgtccagcggcggttcgtgcaggaggtggtgcaaagccagcaggtagccgtgggccggcagctggaggacttccgttccaagcggctcatgggcatgacgccctgggagcaggagctggcccagctggaggcttgggttgggcgggaccgagccagctacgaggcccgggagcggcacgtggcggagcggctgctcatgcacctggaggagatgcaacataccatctctaccgacgaagaaaagagtgctgccgtggtcaacgccattggcctgtacatgcgccaccttggggtgcggaccaagagtggagacaagaagtcggggaggaacttcttccggaaaaaggtgatggggaaccggcggtcggacgagcctgccaagaccaagaaggggctgagcagcatcctggatgccgcccgctggaaccggggagagccccaggttccagattttcgacacctcaaagcagaggttgatgccgagaagccaggtgctacagaccggaagggaggcgtggggatgccctctcgggaccggaatatcggggctcctgggcaggacacccctggagtctctctgcaccctctgtccctggacagcccagaccgggaaccaggtgctgacgcccccctggagctgggggactcatccccgcagggcccaatgagcctggagtccttggcgcccccagagagtaccgacgagggggccgaaaccgagaggtgcccaggctggggtgcaggggcgggaggtgtggcttactgggcgctggtgggtgggtgcagggtcaccgctgccatctgtgcctgcctgtcccaggctcttgctccccatgctcctctgctgctctctgggtctggccattcctctcccttcttctttccttttctcatctccctcccccaagaccccccactaccccagtgcccctaaaatcccaccactcctctgactctctcctctcttctgttgcatgtttgatccctgccctctgcttgggggactcagggctccattctggagggcaccacggtgacccgggccatctcagtattgcctgtgggggccacccctccacccccacccccaagtgccttcgctctgtttttataccctgaattggaggtttattttttaatatatattatctaa

SEQ ID NO: 306610 - DNA, 1418 bp, Homo sapiens
ccagagccaggaagcgggagccgggacccagggcccgggatcgccgagcccgacctcgggcgccccgccggtcacctccgcgcggacaccagccctgcagagcccagggagatggaagacttcgcccgaggggcggcctccccaggcccctcccggcctggcctggttcccgtcagcatcatcggggctgaggatgaggattttgagaacgagctggagacaaactcagaagagcaaaacagccagttccagagcctggagcaggtgaagcggcgcccagcccacctcatggccctcctgcagcacgtggccctgcagtttgagccaggacccctgctttgctgtctgcatgccgacatgctgggctcactgggccccaaggaggccaagaaggccttcctggacttctaccacagcttcctggagaagacagcggttctccgggtgccggtccctcccaacgtcgcctttgaacttgaccgcactagggctgacctcatctccgaggatgtccagcggcggttcgtgcaggaggtggtgcaaagccagcaggtagccgtgggccggcagctggaggacttccgttccaagcggctcatgggcatgacgccctgggagcaggagctggcccagctggaggcttgggttgggcgggaccgagccagctacgaggcccgggagcggcacgtggcggagcggctgctcatgcacctggaggagatgcaacataccatctctaccgacgaagaaaagagtgctgccgtggtcaacgccattggcctgtacatgcgccaccttggggtgcggaccaagagtggagacaagaagtcggggaggaacttcttccggaaaaaggtgatggggaaccggcggtcggacgagcctgccaagaccaagaaggggctgagcagcatcctggatgccgcccgctggaaccggggagagccccaggttccagattttcgacacctcaaagcagaggttgatgccgagaagccaggtgctacagaccggaagggaggcgtggggatgccctctcgggaccggaatatcggggctcctgggcaggacacccctggagtctctctgcaccctctgtccctggacagcccagaccgggaaccaggtgctgacgcccccctggagctgggggactcatccccgcagggcccaatgagcctggagtccttggcgcccccagagagtaccgacgagggggccgaaaccgagaggtgcccaggctggggtgcaggggcgggaggtgtggcttactgggcgctggtgggtgggtgcagggtcaccgctgccatctgtgcctgcctgtcccaggctcttgctccccatgctcctctgctgctctaaccccaccctctcccatcttcctcatctcttctttgcctcctccttggtgcataaaa

SEQ ID NO: 306611 - DNA, 2229 bp, Homo sapiens
  misc_feature (686)..(686): n is a, c, g, or t
  misc_feature (1882)..(1882): n is a, c, g, or t
  misc_feature (2016)..(2016): n is a, c, g, or t
  misc_feature (2081)..(2081): n is a, c, g, or t
  misc_feature (2130)..(2130): n is a, c, g, or t
ccagagccaggaagcgggagccgggacccagggcccgggatcgccgagcccgacctcgggcgccccgccggtcacctccgcgcggacaccagccctgcagagcccagggagatggaagacttcgcccgaggggcggcctccccaggcccctcccggcctggcctggttcccgtcagcatcatcggggctgaggatgaggattttgagaacgagctggagacaaactcagaagagcaaaacagccagttccagagcctggagcaggtgaagcggcgcccagcccacctcatggccctcctgcagcacgtggccctgcagtttgagccaggacccctggtgagggcagggctgggtgggcacagggaggggtggggctgggacaggcacagcttttagcgaattaaaccagcgagctagtgcctggagggtctggaaaagcagatctagaacacagagagccagatctagaaagagagaatgctttagacaagagccagaaagcatgccacgtgacctcaacaggcttacaagtgcccagggtagatctcagtgcgcagcgggcagggtacacacgtcaggaccccgcggagccacagagagtccagcagcctggcagaaaccacatcccatcccactctgtgcctgtggcagcgcccccatcagcctgtggcagcacctttccgtgnactctaggggaccaaattcttctctccaaagcctttttggcagatgccagcacgcagtcattcacggttgatggttgggaaaaagaagctgttagccatcccaggtctagggagcacagcaggccctgatctggaaacaagaaaaccaccacacacagctcacaaggcagaccacacaattgtggatccagaagcctccggatgaggcagaagatacctgggagatgtggatggacaaccgtgccatccagaaacacccgcagagtctagaaaacccagcaggtgatttagaaagggagaggccacagtgctggctggcaggggatctgtagacaagggtctcatcccaagaagaccccgtccagcccagcacaggataggaggacagcctggggacagccagggcactgcaccatgtggacatgcatagtggacccctccagaaaacaaggaaaccgatagagtggggagaagtgcccgaggcatgcagaaagaagaacatgtcagctgcaagaccagaggctggtcatccggacgccaaaccatcagatatgcagaaaattaggaaattgcagtctttcccctgtctacattctctttccagaagagtggttcccccgacaaccacatgcacggagactctggccctctgagcaagggagtcccctattcaagccttggggtttctagaacaccagattgtggacatcagcccagggatcgtgctgactaccatgttcttttacagatgtggaaaccgaggcctagagagggtcagggacttgcctgaggtgaccccggcggcctctgggcattttgaggtttattctcgcatagctccctcacctcatcagcttgtggggagccgatcagagatagctgtggtcccctgggcagcttcctgttggcctgtcttagaattttgctatatttggggggtgtgaagagtggatatagatgtgttaaaactgtttaaagtggagaaggaggaccgggcctggtggttcatgactgtagtcccaacgctttgggaggctgaggcaggaggatagcttgagcctgggaggttgaggctgcagtgattgcaccactgcactccagcctgggcgacaagagtgaaaccctgtcttgaaaaaaaaaaaaaagtggggccgggcatggtggctcacacctataatcccagaactttggaggcngaggtgggtagatcacttgagatcaagagttcgagaccagcgtggccaacatggtaaaaccccgtctctactaaaaatatgaaaattggccaggcgcagtgactcacgcatataatcccagcactttgggaggntgaggcaggtggatcacccgacgtcaggagttcaagaccagcctggccaacatggtgaaatcccntctctactaaaatagaaaaattagccaggcacagtggtacacacctgtnattccagctactcgggaggctgaggcaggagactcacttgaacctgggaggtggtggttgcaatgagccgagattgcaccattgcactccagcctaggc

SEQ ID NO: 306612 - DNA, 581 bp, Homo sapiens
cctgtcctggtcacccttgccccggtcctggtctctccctgtctctgtccctgtcctggtctctccccgtctctgtccctgtcctcgtctctccccaatttctgtccctgccctggcctctccccacctctgtccctgccctggtctctccccgtctctgtccctgtcctggtttctcttcgtctctgttcttgtcttggtctctccttgtctctgtccccggcatctgcctgactctgtccttggcctcggggtccaggctatcagggcgtctggggcgctcagagagcctgcgggtgagtgaccgccgccggccttcccggggcagcctcggggctaagggccggggtgggggccgctcccggagcgacgtggacatggaccccagttccgccacggcagtgcttggccctgcccgacgagccacgtatgtcaaccctctcccttcccccatccactaaggcagcctggagaatcagggagggattgttgtcagagtcacagaggaatgggcgttggagaccgaggtcattgaggccaactgtggtcacagaccttggaggaggagggggtagaatgct

SEQ ID NO: 306613 - DNA, 527 bp, Homo sapiens
cctgggtctgagggaggaaggcctggggcctggacctctgggtctgagggaggaggggctgggggcctggactcctgtgtctgagggaggaggggttgagggctcctgggtctgagggaggaaggggctccttgtcatggtggggaagggcctgagcacagcctcttgcatcccctggcggttgtggatttgagttactgttctcttatctccctctttctccctcactgtctccccagccgagaagccaggtgctacagaccggaagggaggcgtggggatgccctctcgggaccggaatatcggggctcctgggcaggacacccctggagtctctctgcaccctctgtccctggacagcccagaccgggaaccaggtgagagtttcctgggccagggctccatgaggcccggcgatccagggtgggggtgctgcctgcccccttggcacccccagatagaagccattccccagcaacacctcccctttgctctcagcatccacttctccctgctcctggtcacca

SEQ ID NO: 306614 - DNA, 474 bp, Homo sapiens
cagggagtgcttcccagaggaagtggcagttgagtcccacagccataggatggccaggaggtgaggaaggcccttttcaaagggagagtgtggtttgaggcagggtgagggagcggagagtcatgctgtgtgtctcccccagctttgctgtctgcatgccgacatgctgggctcactgggccccaaggaggccaagaaggccttcctggacttctaccacagcttcctggagaagacagcggtgagagaccttcaagctgccccaaccctgcaatccctgtttgggcctgcagagtcaccatgcggtccccagcctctgccctgagggcagctgctgacccaggccttccccagcaccctcgcttagaccagggttcctggcagtcctcccggcctgcatctcagcacaccaagtcctcctcttcaccccattctctctcttgagcaggttctccgggtgccggtccctcccaa

SEQ ID NO: 306615 - DNA, 3357 bp, Homo sapiens
ggaaaggaaaataatctgcagaaacgagctgagcttgcaaagacttcatagttcccaagaattaaaaaaaaaaaaaaaaagaattccacttgatcaacttaattccttttctttatcttccctccatcacttcccttttctcccaccctcttttccaagctgtttcgctttgcaatatattactggtaatgagttgcaggataatgcagtcataacttgttttctcctaagtatttgagttcaaaactcctgtatctaaagaaatacggttggggtcattaataaagaaaatctttctatcttaaaaaaaaaaaaaccgtcagcatcatcggggctgaggatgaggattttgagaacgagctggagacaaactcagaagagcaaaacagccagttccagagcctggagcaggtgaagcggcgcccagcccacctcatggccctcctgcagcacgtggccctgcagtttgagccaggacccctgctttgctgtctgcatgccgacatgctgggctcactgggccccaaggaggccaagaaggccttcctggacttctaccacagcttcctggagaagacagcggttctccgggtgccggtccctcccaacgtcgcctttgaacttgaccgcactagggctgacctcatctccgaggatgtccagcggcggttcgtgcaggaggtggtgcaaagccagcaggtagccgtgggccggcagctggaggacttccgttccaagcggctcatgggcatgacgccctgggagcaggagctggcccagctggaggcttgggttgggcgggaccgagccagctacgaggcccgggagcggcacgtggcggagcggctgctcatgcacctggaggagatgcaacataccatctctaccgacgaagaaaagagtgctgccgtggtcaacgccattggcctgtacatgcgccaccttggggtgcggaccaagagtggagacaagaagtcggggaggaacttcttccggaaaaaggtgatggggaaccggcggtcggacgagcctgccaagaccaagaaggggctgagcagcatcctggatgccgcccgctggaaccggggagagccccaggttccagattttcgacacctcaaagcagaggttgatgccgagaagccaggtgctacagaccggaagggaggcgtggggatgccctctcgggaccggaatatcggggctcctgggcaggacacccctggagtctctctgcaccctctgtccctggacagcccagaccgggaaccaggtgctgacgcccccctggagctgggggactcatccccgcagggcccaatgagcctggagtccttggcgcccccagagagtaccgacgagggggccgaaaccgagagccccgagcctggagatgagggggagccggggcggtcgggactggagcttgaaccagaagagcctcccggctggcgggaactcgtccccccagacaccctgcacagcctgcccaagagccaggtgaagcggcaggaggtcatcagcgagctgctggtgacagaggcggcccacgtgcgcatgctgcgggtgctgcacgacctcttcttccagcccatggcagaatgcctgttcttccccttggaggagctgcagaacatcttccccagcctggacgagctcatcgaggtgcattccctgttcctcgatcgcctgatgaagcggaggcaggagagtggctacctcatcgaggagatcggagacgtgctgctggcccggtttgatggtgctgagggctcctggttccagaaaatctcctcccgcttctgcagccgccagtcatttgccttagagcagctcaaagccaagcaacgcaaggaccctcggttctgtgccttcgtgcaggaagctgagagccgcccgcggtgccgccgcctgcagctgaaggacatgatccccacggagatgcagcggctgaccaagtaccccctgctcctgcagagcatcgggcagaacacagaagagcccacagaacgggagaaagtggagctggcagccgagtgctgccgggaaattctacaccacgtcaaccaagccgtgcgtgacatggaggacctgctgaggctcaaggactatcagcggcgcctggacttgtcccaccttcggcagagcagcgaccctatgctgagcgagttcaagaacctggacatcaccaagaagaaattggtccacgagggcccactgacgtggcgggtgactaaggacaaggcagtggaggtgcatgtgctgctgctggacgacctgctgctgctgctccagcgccaggacgagcggctgctgctcaagtcccatagccggacactgacgcccacgcccgatggcaagaccatgctgcggcccgtgctgcggctcacctccgccatgacccgcgaggtggccaccgatcacaaagccttctacgtcctttttacctgggaccaggaggcccagatatacgagctggtggcacagactgtgtcggagcggaaaaactggtgtgctctcatcactgagactgccggatccctgaaagtccctgcccctgcctctcgccctaagccccggcccagcccgagcagcacccgagaacccctcctcagcagctctgagaacggcaatggtggccgagagacgtctccagctgatgcccggaccgagagaatcctcagtgacctcctgcccttctgcagaccaggccccgagggccagctcgctgccacggcccttcggaaagtgctgtccctgaagcagcttctgtttccggcggaggaagacaatggggcggggcctcctcgagatggggatggggtcccagggggcggccccctgagcccagcacggacccaggaaatccaggagaacctgctcagcttggaggagaccatgaagcagctggaggagttggaggaggaattttgccgcctgagacccctcctgtctcagcttggggggaactctgtcccccagcctggctgcacttgaggttcccgcccaggaaggccttttgcaagaaggagaggaatgggggagaggacgtgagggaccacccccacccacacagctgccgcagcatctcacaccccgagggcctgaggagagggagctgtgggccacgcctgggaggggcccagctggggttactggccccgcatgagcctcggccatctctccctcctgccctctgcttgggggactcagggctccattctggagggcaccacggtgacccgggccatctcagtattgcctgtgggggccacccctccacccccacccccaagtgccttcgctctgtttttataccctgaattggaggtttattttttaatatatattatctaa

SEQ ID NO: 306616 - DNA, 515 bp, Homo sapiens
tctccctgtctctctctccatctctccccgtctcccctcttctcctacatcccccaggccttttgcaagaaggagaggaatgggggagaggacgtgagggaccacccccacccacacagctgccgcagcatctcacaccccgagggcctgaggagagggagctgtgggccacgcctgggaggggcccagctggggttactggccccgcatgagcctcggccatctctccctcctgccctctgcttgggggactcagggctccattctggagggcaccacggtgacccgggccatctcagtattgcctgtgggggccacccctccacccccacccccaagtgccttcgctctgtttttataccctgaattggaggtttattttttaatatatattatctaatgaaactttataaatatatacctctagggggggcccggttcctaatttcgcctatagtgagtctaattacaatttaatgggccgtcgttttacaatttattcactgggaaaaccc

SEQ ID NO: 306617 - DNA, 296 bp, Homo sapiens
cggcgaattcgtggtgctgctcggcgaattcgtggtgctgctcggcgaattcgtggtgctgctcggcgaattcgtggtgctgctcggcgaattcgtggtgctgctgacccaggccttccccagcaccctcgcttagaccagggttcctggcagtcctcccggcctgcatctcagcacaccaagtcctcctcttcaccccattctctctcttgagcaggttctccgggtgccggtccctcccaacgtcgcctttgaacttggtaaggagaaggatgggatgagggagaggtgtctag

SEQ ID NO: 306618 - DNA, 3220 bp, Homo sapiens
aggggtggggagagtgcggagcccgagcgcggaggcttcggttccggtggcggcgatggcttctctttccacctggagcagccctgcagagcccagggagatggaagacttcgcccgaggggcggcctccccaggcccctcccggcctggcctggttcccgtcagcatcatcggggctgaggatgaggattttgagaacgagctggagacaaactcagaagagcaaaacagccagttccagagcctggagcaggtgaagcggcgcccagcccacctcatggccctcctgcagcacgtggccctgcagtttgagccaggacccctgctttgctgtctgcatgccgacatgctgggctcactgggccccaaggaggccaagaaggccttcctggacttctaccacagcttcctggagaagacagcggttctccgggtgccggtccctcccaacgtcgcctttgaacttgaccgcactagggctgacctcatctccgaggatgtccagcggcggttcgtgcaggaggtggtgcaaagccagcaggtagccgtgggccggcagctggaggacttccgttccaagcggctcatgggcatgacgccctgggagcaggagctggcccagctggaggcttgggttgggcgggaccgagccagctacgaggcccgggagcggcacgtggcggagcggctgctcatgcacctggaggagatgcaacataccatctctaccgacgaagaaaagagtgctgccgtggtcaacgccattggcctgtacatgcgccaccttggggtgcggaccaagagtggagacaagaagtcggggaggaacttcttccggaaaaaggtgatggggaaccggcggtcggacgagcctgccaagaccaagaaggggctgagcagcatcctggatgccgcccgctggaaccggggagagccccaggttccagattttcgacacctcaaagcagaggttgatgccgagaagccaggtgctacagaccggaagggaggcgtggggatgccctctcgggaccggaatatcggggctcctgggcaggacacccctggagtctctctgcaccctctgtccctggacagcccagaccgggaaccaggtgctgacgcccccctggagctgggggactcatccccgcagggcccaatgagcctggagtccttggcgcccccagagagtaccgacgagggggccgaaaccgagagccccgagcctggagatgagggggagccggggcggtcgggactggagcttgaaccagaagagcctcccggctggcgggaactcgtccccccagacaccctgcacagcctgcccaagagccaggtgaagcggcaggaggtcatcagcgagctgctggtgacagaggcggcccacgtgcgcatgctgcgggtgctgcacgacctcttcttccagcccatggcagaatgcctgttcttccccttggaggagctgcagaacatcttccccagcctggacgagctcatcgaggtgcattccctgttcctcgatcgcctgatgaagcggaggcaggagagtggctacctcatcgaggagatcggagacgtgctgctggcccggtttgatggtgctgagggctcctggttccagaaaatctcctcccgcttctgcagccgccagtcatttgccttagagcagctcaaagccaagcaacgcaaggaccctcggttctgtgccttcgtgcaggaagctgagagccgcccgcggtgccgccgcctgcagctgaaggacatgatccccacggagatgcagcggctgaccaagtaccccctgctcctgcagagcatcgggcagaacacagaagagcccacagaacgggagaaagtggagctggcagccgagtgctgccgggaaattctacaccacgtcaaccaagccgtgcgtgacatggaggacctgctgaggctcaaggactatcagcggcgcctggacttgtcccaccttcggcagagcagcgaccctatgctgagcgagttcaagaacctggacatcaccaagaagaaattggtccacgagggcccactgacgtggcgggtgactaaggacaaggcagtggaggtgcatgtgctgctgctggacgacctgctgctgctgctccagcgccaggacgagcggctgctgctcaagtcccatagccggacactgacgcccacgcccgatggcaagaccatgctgcggcccgtgctgcggctcacctccgccatgacccgcgaggtggccaccgatcacaaagccttctacgtcctttttacctgggaccaggaggcccagatatacgagctggtggcacagactgtgtcggagcggaaaaactggtgtgctctcatcactgagactgccggatccctgaaagtccctgcccctgcctctcgccctaagccccggcccagcccgagcagcacccgagaacccctcctcagcagctctgagaacggcaatggtggccgagagacgtctccagctgatgcccggaccgagagaatcctcagtgacctcctgcccttctgcagaccaggccccgagggccagctcgctgccacggcccttcggaaagtgctgtccctgaagcagcttctgtttccggcggaggaagacaatggggcggggcctcctcgagatggggatggggtcccagggggcggccccctgagcccagcacggacccaggaaatccaggagaacctgctcagcttggaggagaccatgaagcagctggaggagttggaggaggaattttgccgcctgagacccctcctgtctcagcttggggggaactctgtcccccagcctggctgcacttgaggttcccgcccaggaaggccttttgcaagaaggagaggaatgggggagaggacgtgagggaccacccccacccacacagctgccgcagcatctcacaccccgagggcctgaggagagggagctgtgggccacgcctgggaggggcccagctggggttactggccccgcatgagcctcggccatctctccctcctgccctctgcttgggggactcagggctccattctggagggcaccacggtgacccgggccatctcagtattgcctgtgggggccacccctccacccccacccccaagtgccttcgctctgtttttataccctgaattggaggtttattttttaatatatattatctaagaaagatctgtgtgtgtgatg

SEQ ID NO: 306619 - DNA, 3132 bp, Homo sapiens
ccagagccaggaagcgggagccgggacccagggcccgggatcgccgagcccgacctcgggcgccccgccggtcacctccgcgcggacaccagccctgcagagcccagggagatggaagacttcgcccgaggggcggcctccccaggcccctcccggcctggcctggttcccgtcagcatcatcggggctgaggatgaggattttgagaacgagctggagacaaactcagaagagcaaaacagccagttccagagcctggagcaggtgaagcggcgcccagcccacctcatggccctcctgcagcacgtggccctgcagtttgagccaggacccctggttctccgggtgccggtccctcccaacgtcgcctttgaacttgaccgcactagggctgacctcatctccgaggatgtccagcggcggttcgtgcaggaggtggtgcaaagccagcaggtagccgtgggccggcagctggaggacttccgttccaagcggctcatgggcatgacgccctgggagcaggagctggcccagctggaggcttgggttgggcgggaccgagccagctacgaggcccgggagcggcacgtggcggagcggctgctcatgcacctggaggagatgcaacataccatctctaccgacgaagaaaagagtgctgccgtggtcaacgccattggcctgtacatgcgccaccttggggtgcggaccaagagtggagacaagaagtcggggaggaacttcttccggaaaaaggtgatggggaaccggcggtcggacgagcctgccaagaccaagaaggggctgagcagcatcctggatgccgcccgctggaaccggggagagccccaggttccagattttcgacacctcaaagcagaggttgatgccgagaagccaggtgctacagaccggaagggaggcgtggggatgccctctcgggaccggaatatcggggctcctgggcaggacacccctggagtctctctgcaccctctgtccctggacagcccagaccgggaaccaggtgctgacgcccccctggagctgggggactcatccccgcagggcccaatgagcctggagtccttggcgcccccagagagtaccgacgagggggccgaaaccgagagccccgagcctggagatgagggggagccggggcggtcgggactggagcttgaaccagaagagcctcccggctggcgggaactcgtccccccagacaccctgcacagcctgcccaagagccaggtgaagcggcaggaggtcatcagcgagctgctggtgacagaggcggcccacgtgcgcatgctgcgggtgctgcacgacctcttcttccagcccatggcagaatgcctgttcttccccttggaggagctgcagaacatcttccccagcctggacgagctcatcgaggtgcattccctgttcctcgatcgcctgatgaagcggaggcaggagagtggctacctcatcgaggagatcggagacgtgctgctggcccggtttgatggtgctgagggctcctggttccagaaaatctcctcccgcttctgcagccgccagtcatttgccttagagcagctcaaagccaagcaacgcaaggaccctcggttctgtgccttcgtgcaggaagctgagagccgcccgcggtgccgccgcctgcagctgaaggacatgatccccacggagatgcagcggctgaccaagtaccccctgctcctgcagagcatcgggcagaacacagaagagcccacagaacgggagaaagtggagctggcagccgagtgctgccgggaaattctacaccacgtcaaccaagccgtgcgtgacatggaggacctgctgaggctcaaggactatcagcggcgcctggacttgtcccaccttcggcagagcagcgaccctatgctgagcgagttcaagaacctggacatcaccaagaagaaattggtccacgagggcccactgacgtggcgggtgactaaggacaaggcagtggaggtgcatgtgctgctgctggacgacctgctgctgctgctccagcgccaggacgagcggctgctgctcaagtcccatagccggacactgacgcccacgcccgatggcaagaccatgctgcggcccgtgctgcggctcacctccgccatgacccgcgaggtggccaccgatcacaaagccttctacgtcctttttacctgggaccaggaggcccagatatacgagctggtggcacagactgtgtcggagcggaaaaactggtgtgctctcatcactgagactgccggatccctgaaagtccctgcccctgcctctcgccctaagccccggcccagcccgagcagcacccgagaacccctcctcagcagctctgagaacggcaatggtggccgagagacgtctccagctgatgcccggaccgagagaatcctcagtgacctcctgcccttctgcagaccaggccccgagggccagctcgctgccacggcccttcggaaagtgctgtccctgaagcagcttctgtttccggcggaggaagacaatggggcggggcctcctcgagatggggatggggtcccagggggcggccccctgagcccagcacggacccaggaaatccaggagaacctgctcagcttggaggagaccatgaagcagctggaggagttggaggaggaattttgccgcctgagacccctcctgtctcagcttggggggaactctgtcccccagcctggctgcacttgaggttcccgcccaggaaggccttttgcaagaaggagaggaatgggggagaggacgtgagggaccacccccacccacacagctgccgcagcatctcacaccccgagggcctgaggagagggagctgtgggccacgcctgggaggggcccagctggggttactggccccgcatgagcctcggccatctctccctcctgccctctgcttgggggactcagggctccattctggagggcaccacggtgacccgggccatctcagtattgcctgtgggggccacccctccacccccacccccaagtgccttcgctctgtttttataccctgaattggaggtttattttttaatatatattatctaagaaagatctgtgtgtgtgatg

SEQ ID NO: 306620 - DNA, 3604 bp, Homo sapiens
ccagagccaggaagcgggagccgggacccagggcccgggatcgccgagcccgacctcgggcgccccgccggtcacctccgcgcggacaccagccctgcagagcccagggagatggaagacttcgcccgaggggcggcctccccaggcccctcccggcctggcctggttcccgtcagcatcatcggggctgaggatgaggattttgagaacgagctggagacaaactcagaagagcaaaacagccagttccagagcctggagcaggtgaagcggcgcccagcccacctcatggccctcctgcagcacgtggccctgcagtttgagccaggacccctgctttgctgtctgcatgccgacatgctgggctcactgggccccaaggaggccaagaaggccttcctggacttctaccacagcttcctggagaagacagcggttctccgggtgccggtccctcccaacgtcgcctttgaacttgaccgcactagggctgacctcatctccgaggatgtccagcggcggttcgtgcaggaggtggtgcaaagccagcaggtagccgtgggccggcagctggaggacttccgttccaagcggctcatgggcatgacgccctgggagcaggagctggcccagctggaggcttgggttgggcgggaccgagccagctacgaggcccgggagcggcacgtggcggagcggctgctcatgcacctggaggagatgcaacataccatctctaccgacgaagaaaagagtgctgccgtggtcaacgccattggcctgtacatgcgccaccttggggtgcggaccaagagtggagacaagaagtcggggaggaacttcttccggaaaaaggtgatggggaaccggcggtcggacgagcctgccaagaccaagaaggggctgagcagcatcctggatgccgcccgctggaaccggggagagccccaggttccagattttcgacacctcaaagcagaggttgatgccgagaagccaggtgctacagaccggaagggaggcgtggggatgccctctcgggaccggaatatcggggctcctgggcaggacacccctggagtctctctgcaccctctgtccctggacagcccagaccgggaaccaggtgctgacgcccccctggagctgggggactcatccccgcagggcccaatgagcctggagtccttggcgcccccagagagtaccgacgagggggccgaaaccgagagccccgagcctggagatgagggggagccggggcggtcgggactggagcttgaaccagaagagcctcccggctggcgggaactcgtccccccagacaccctgcacagcctgcccaagagccaggtgaagcggcaggaggtcatcagcgagctgctggtgacagaggcggcccacgtgcgcatgctgcgggtgctgcacgacctcttcttccagcccatggcagaatgcctgttcttccccttggaggagctgcagaacatcttccccagcctggacgagctcatcgaggtgcattccctgttcctcgatcgcctgatgaagcggaggcaggagagtggctacctcatcgaggagatcggagacgtgctgctggcccggtttgatggtgctgagggctcctggttccagaaaatctcctcccgcttctgcagccgccagtcatttgccttagagcagctcaaagccaagcaacgcaaggaccctcggttctgtgccttcgtgcaggaagctgagagccgcccgcggtgccgccgcctgcagctgaaggacatgatccccacggagatgcagcggctgaccaagtaccccctgctcctgcagagcatcgggcagaacacagaagagcccacagaacgggagaaagtggagctggcagccgagtgctgccgggaaattctacaccacgtcaaccaagccgtgcgtgacatggaggacctgctgaggctcaaggactatcagcggcgcctggacttgtcccaccttcggcagagcagcgaccctatgctgagcgagttcaagaacctggacatcaccaagaagaaattggtccacgagggcccactgacgtggcgggtgactaaggacaaggcagtggaggtgcatgtgctgctgctggacgacctgctgctgctgctccagcgccaggacgagcggctgctgctcaagtcccatagccggacactgacgcccacgcccgatggcaagaccatgctgcggcccgtgctgcggctcacctccgccatgacccgcgaggtggccaccgatcacaaagccttctacgtcctttttacctgggaccaggaggcccagatatacgagctggtggcacagactgtgtcggagcggaaaaactggtgtgctctcatcactgagactgccggatccctgaaagtccctgcccctgcctctcgccctaagccccggcccagcccgagcagcacccgagaacccctcctcagcagctctgagaacggcaatggtggccgagagacgtctccagctgatgcccggaccgagagaatcctcagtgacctcctgcccttctgcagaccaggccccgagggccagctcgctgccacggcccttcggaaagtgctgtccctgaagcagcttctgtttccggcggaggaagacaatggggcggggcctcctcgagatggggatggggtcccagggggcggccccctgagcccagcacggacccaggaaatccaggagaacctgctcagcttggaggagaccatgaagcagctggaggagttggaggaggaattttgccgcctgagacccctcctgtctcagcttggggggaactctgtcccccagcctggctgcacttgaggttcccgcccaggaaggccttttgcaagaaggagaggaatgggggagaggacgtgagggaccacccccacccacacagctgccgcagcatctcacaccccgagggcctgaggagagggagctgtgggccacgcctgggaggggcccagctggggttactggccccgcatgagcctcggccatctctccctcctgccctctgcttgggggactcagggctccattctggagggcaccacggtgacccgggccatctcagtattgcctgtgggggccacccctccacccccacccccaagtgccttcgctctgtttttataccctgaattggaggtttattttttaatatatattatctaagagagaaaaaaaaaacaaacaaaaaaaaaaaaaaaaaacaacaaaacaaaaaaaaacaacaacaaaaaacacaaaacaaaaaaacaacacacgagagcgggggggcgggccgcccaaagaacactccccacggcgggggccccacagcggacccagcgccacccgccgcaggatgtttgggacaaaaggggcgcgaccccccacaggggaggggcggacgcataaacacgaccgagcggagcgcgaggcgggcagacaatatgcaacaccgccggcgagagaaggggggaaaaaagaggagaaacgagcggggagacaactggcggagggaaggacccaccaacatccgacggggggggaggggaacaaaaaggggggagagacagccacgagg

SEQ ID NO: 306621 - DNA, 3076 bp, Homo sapiens
ccagagccaggaagcgggagccgggacccagggcccgggatcgccgagcccgacctcgggcgccccgccggtcacctccgcgcggacaccagccctgcagagcccagggagatggaagacttcgcccgaggggcggcctccccaggcccctcccggcctggcctggttcccgtcagcatcatcggggctgaggatgaggattttgagaacgagctggagacaaactcagaagagcaaaacagccagttccagagcctggagcaggtgaagcggcgcccagcccacctcatggccctcctgcagcacgtggccctgcagtttgagccaggacccctgctttgctgtctgcatgccgacatgctgggctcactgggccccaaggaggccaagaaggccttcctggacttctaccacagcttcctggagaagacagcggttctccgggtgccggtccctcccaacgtcgcctttgaacttgaccgcactagggctgacctcatctccgaggatgtccagcggcggttcgtgcaggaggtggtgcaaagccagcaggtagccgtgggccggcagctggaggacttccgttccaagcggctcatgggcatgacgccctgggagcaggagctggcccagctggaggcttgggttgggcgggaccgagccagctacgaggcccgggagcggcacgtggcggagcggctgctcatgcacctggaggagatgcaacataccatctctaccgacgaagaaaagagtgctgccgtggtcaacgccattggcctgtacatgcgccaccttggggtgcggaccaagagtggagacaagaagtcggggaggaacttcttccggaaaaaggtgatggggaaccggcggtcggacgagcctgccaagaccaagaaggggctgagcagcatcctggatgccgcccgctggaaccggggagagccccaggttccagattttcgacacctcaaagcagaggttgatgccgagaagccaggtgctacagaccggaagggaggcgtggggatgccctctcgggaccggaatatcggggctcctgggcaggacacccctggagtctctctgcaccctctgtccctggacagcccagaccgggaaccaggtgctgacgcccccctggagctgggggactcatccccgcagggcccaatgagcctggagtccttggcgcccccagagagtaccgacgagggggccgaaaccgagagccccgagcctggagatgagggggagccggggcggtcgggactggagcttgaaccagaagagcctcccggctggcgggaactcgtccccccagacaccctgcacagcctgcccaagagccaggtgaagcggcaggaggtcatcagcgagctgctggtgacagaggcggcccacgtgcgcatgctgcgggtgctgcacgacctcttcttccagcccatggcagaatgcctgttcttccccttggaggagctgcagaacatcttccccagcctggacgagctcatcgaggtgcattccctgttcctcgatcgcctgatgaagcggaggcaggagagtggctacctcatcgaggagatcggagacgtgctgctggcccggtttgatggtgctgagggctcctggttccagaaaatctcctcccgcttctgcagccgccagtcatttgccttagagcagctcaaagccaagcaacgcaaggaccctcggttctgtgccttcgtgcaggaagctgagagccgcccgcggtgccgccgcctgcagctgaaggacatgatccccacggagatgcagcggctgaccaagtaccccctgctcctgcagagcatcgggcagaacacagaagagcccacagaacgggagaaagtggagctggcagccgagtgctgccgggaaattctacaccacgtcaaccaagccgtgcgtgacatggaggacctgctgaggctcaaggactatcagcggcgcctggacttgtcccaccttcggcagagcagcgaccctatgctgagcgagttcaagaacctggacatcaccaagaagaaattggtccacgagggcccactgacgtggcgggtgactaaggacaaggcagtggaggtgcatgtgctgctgctggacgacctgctgctgctgctccagcgccaggacgagcggctgctgctcaagtcccatagccggacactgacgcccacgcccgatggcaagaccatgctgcggcccgtgctgcggctcacctccgccatgacccgcgaggtggccaccgatcacaaagccttctacgtcctttttacctgggaccaggaggcccagatatacgagctggtggcacagactgtgtcggagcggaaaaactggtgtgctctcatcactgagactgccggatccctgaaagtccctgcccctgcctctcgccctaagccccggcccagcccgagcagcacccgagaacccctcctcagcagctctgagaacggcaatggtggccgagagacgtctccagctgatgcccggaccgagagaatcctcagtgacctcctgcccttctgcagaccaggccccgagggccagctcgctgccacggcccttcggaaagtgctgtccctgaagcagcttctgtttccggcggaggaagacaatggggcggggcctcctcgagatggggatggggtcccagggggcggccccctgagcccagcacggacccaggaaatccaggagaacctgctcagcttggaggagaccatgaagcagctggaggagttggaggaggaattttgccgcctgagacccctcctgtctcagcttggggggaactctgtcccccagcctggctgcacttgaggttcccgcccaggaaggtgagtggggcacctgggggccagggcgctgtcctgaaaggagggtccccctccagagctcgcatccctacagccccttctgtccatctccctctttgtcttttctgaatctccccactccacctcgtgtttctcatctctgtgtctctgtttctgataatctgtttctctgtctctgtgcccgcctgcctctccccacctccccttct

SEQ ID NO: 306622 - DNA, 2838 bp, Homo sapiens
ccagagccaggaagcgggagccgggacccagggcccgggatcgccgagcccgacctcgggcgccccgccggtcacctccgcgcggacaccagccctgcagagcccagggagatggaagacttcgcccgaggggcggcctccccaggcccctcccggcctggcctggttcccgtcagcatcatcggggctgaggatgaggattttgagaacgagctggagacaaactcagaagagcaaaacagccagttccagagcctggagcaggtgaagcggcgcccagcccacctcatggccctcctgcagcacgtggccctgcagtttgagccaggacccctgctttgctgtctgcatgccgacatgctgggctcactgggccccaaggaggccaagaaggccttcctggacttctaccacagcttcctggagaagacagcggttctccgggtgccggtccctcccaacgtcgcctttgaacttgaccgcactagggctgacctcatctccgaggatgtccagcggcggttcgtgcaggaggtggtgcaaagccagcaggtagccgtgggccggcagctggaggacttccgttccaagcggctcatgggcatgacgccctgggagcaggagctggcccagctggaggcttgggttgggcgggaccgagccagctacgaggcccgggagcggcacgtggcggagcggctgctcatgcacctggaggagatgcaacataccatctctaccgacgaagaaaagagtgctgccgtggtcaacgccattggcctgtacatgcgccaccttggggtgcggaccaagagtggagacaagaagtcggggaggaacttcttccggaaaaaggtgatggggaaccggcggtcggacgagcctgccaagaccaagaaggggctgagcagcatcctggatgccgcccgctggaaccggggagagccccaggttccagattttcgacacctcaaagcagaggttgatgccgagaagccaggtgctacagaccggaagggaggcgtggggatgccctctcgggaccggaatatcggggctcctgggcaggacacccctggagtctctctgcaccctctgtccctggacagcccagaccgggaaccaggtgctgacgcccccctggagctgggggactcatccccgcagggcccaatgagcctggagtccttggcgcccccagagagtaccgacgagggggccgaaaccgagagccccgagcctggagatgagggggagccggggcggtcgggactggagcttgaaccagaagagcctcccggctggcgggaactcgtccccccagacaccctgcacagcctgcccaagagccaggtgaagcggcaggaggtcatcagcgagctgctggtgacagaggcggcccacgtgcgcatgctgcgggtgctgcacgacctcttcttccagcccatggcagaatgcctgttcttccccttggaggagctgcagaacatcttccccagcctggacgagctcatcgaggtgcattccctgttcctcgatcgcctgatgaagcggaggcaggagagtggctacctcatcgaggagatcggagacgtgctgctggcccggtttgatggtgctgagggctcctggttccagaaaatctcctcccgcttctgcagccgccagtcatttgccttagagcagctcaaagccaagcaacgcaaggaccctcggttctgtgccttcgtgcaggaagctgagagccgcccgcggtgccgccgcctgcagctgaaggacatgatccccacggagatgcagcggctgaccaagtaccccctgctcctgcagagcatcgggcagaacacagaagagcccacagaacgggagaaagtggagctggcagccgagtgctgccgggaaattctacaccacgtcaaccaagccgtgcgtgacatggaggacctgctgaggctcaaggactatcagcggcgcctggacttgtcccaccttcggcagagcagcgaccctatgctgagcgagttcaagaacctggacatcaccaagaagaaattggtccacgagggcccactgacgtggcgggtgactaaggacaaggcagtggaggtgcatgtgctgctgctggacgacctgctgctgctgctccagcgccaggacgagcggctgctgctcaagtcccatagccggacactgacgcccacgcccgatggcaagaccatgctgcggcccgtgctgcggctcacctccgccatgacccgcgaggtggccaccgctggtgtgctctcatcactgagactgccggatccctgaaagtccctgcccctgcctctcgccctaagccccggcccagcccgagcagcacccgagaacccctcctcagcagctctgagaacggcaatggtggccgagagacgtctccagctgatgcccggaccgagagaatcctcagtgacctcctgcccttctgcagaccaggccccgagggccagctcgctgccacggcccttcggaaaggtagcccagctctgcccctccagggtggccaccagcccaaacagtgcctctgttccaactagaacaaggctctccacgtcaaaaatttccttacgcccagctgccagaaaacaaatgctccaaacccacccagcctgcaccactgtcctgggtgcccacgtccctcttctgcagccaccatcccttgcttgattctatatttagcctcttcctgaacacatctctgtcttcagtaccttcctgccctgtcccaaccctaaacccagcctcacttcttcacctccctttggatccccgaaccccatctgctcagccttgcctggc

SEQ ID NO: 306623 - DNA, 1300 bp, Homo sapiens
tccgacggcagtacttcccggtgtaatggtacgaggcctgggtggtcgcttgtcccaccttcggcagagcagcgaccctatgctgagcgagttcaagaacctggacatcaccaagaagaaattggtccacgagggcccactgacgtggcgggtgactaaggacaaggcagtggaggtgcatgtgctgctgctggacgacctgctgctgctgctccagcgccaggacgagcggctgctgctcaagtcccatagccggacactgacgcccacgcccgatggcaagaccatgctgcggcccgtgctgcggctcacctccgccatgacccgcgaggtggccaccgatcacaaagccttctacgtcctttttacctgggaccaggaggcccagatatacgagctggtggcacagactgtgtcggagcggaaaaactggtgtgctctcatcactgagactgccggatccctgaaagtccctgcccctgcctctcgccctaagccccggcccagcccgagcagcacccgagaacccctcctcagcagctctgagaacggcaatggtggccgagagacgtctccagctgatgcccggaccgagagaatcctcagtgacctcctgcccttctgcagaccaggccccgagggccagctcgctgccacggcccttcggaaagtgctgtccctgaagcagcttctgtttccggcggaggaagacaatggggcggggcctcctcgagatggggatggggtcccagggggcggccccctgagcccagcacggacccaggaaatccaggagaacctgctcagcttggaggagaccatgaagcagctggaggagttggaggaggaattttgccgcctgagacccctcctgtctcagcttggggggaactctgtcccccagcctggctgcacttgaggttcccgcccaggaaggccttttgcaagaaggagaggaatgggggagaggacgtgagggaccacccccacccacacagctgccgcagcatctcacaccccgagggcctgaggagagggagctgtgggccacgcctgggaggggcccagctggggttactggccccgcatgagcctcggccatctctccctcctgccctctgcttgggggactcagggctccattctggagggcaccacggtgacccgggccatctcagtattgcctgtgggggccacccctccacccccacccccaagtgccttcgctctgtttttataccctgaattggaggtttattttttaatatatattatctaagaaagatctgtgtgtgtgatg

SEQ ID NO: 306624 - DNA, 1465 bp, Homo sapiens
aggtttctgggttcccagggacaggagggctgtggggaggccctggcatagggtctgggggctctgactgcccagggatttggcctttctccccagctggtgtgctctcatcactgagactgccggatccctgaaagtccctgcccctgcctctcgccctaagccccggcccagcccgagcaggtgaggggggccatggagagagctggaggttcagggagtggggccggaaggcggggcaggcttccctccacaactccagaaccgtctctgtgtgagcatgcacatgtgtgaatgcatgtgtgtgcatacatgtgtgtctgtacgcaagtatgtgactgtgcgtgcatatatagtgtgtgtatgcatgcatgtgtgcgtgtgcatgtgtgtgcgtgtatggtgtgtgtgtatgcatatgtgtgcatgcgtgtgacagcatgtgcatgcatgtgtgtgtgtgtgcgcatgtgccgaccccaccactgccccgtctgtctcctgtctccaggcctctgtgtcttccattgtctgggcctctctgtctccctgtctcccggcctcgacctctgtctctgtctccggacctccctgcctccccacctccagctctctgtctccctgcccctgcggccccccagggccaggggtgtggggtcacccagcacttcctcccctcagcacccgagaacccctcctcagcagctctgagaacggcaatggtggccgagagacgtctccagctgatgcccggaccgagagaatcctcagtgacctcctgcccttctgcagaccaggccccgagggccagctcgctgccacggcccttcggaaagtgctgtccctgaagcagcttctgtttccggcggaggaagacaatggggcggggcctcctcgagatggggatggggtcccagggggcggccccctgagcccagcacggacccaggaaatccaggagaacctgctcagcttggaggagaccatgaagcagctggaggagttggaggaggaattttgccgcctgagacccctcctgtctcagcttggggggaactctgtcccccagcctggctgcacttgaggttcccgcccaggaaggccttttgcaagaaggagaggaatgggggagaggacgtgagggaccacccccacccacacagctgccgcagcatctcacaccccgagggcctgaggagagggagctgtgggccacgcctgggaggggcccagctggggttactggccccgcatgagcctcggccatctctccctcctgccctctgcttgggggactcagggctccattctggagggcaccacggtgacccgggccatctcagtattgcctgtgggggccacccctccacccccacccccaagtgccttcgctctgtttttataccctgaattggaggtttattttttaatatatattatctaagaaagatctgtgtgtgtgatg

SEQ ID NO: 306625 - DNA, 1119 bp, Homo sapiens
tattgaagacagagatgtgttcaggaagaggctaaatatagaatcaagcaagggatggtggctccagaagagggacgtgggtacccaggacagcatgtgcatgcatgtgtgtgtgtgtgcgcatgtgccgaccccaccactgccccgtctgtctcctgtctccaggcctctgtgtcttccattgtctgggcctctctgtctccctgtctcccggcctcgacctctgtctctgtctccggacctccctgcctccccacctccagctctctgtctccctgcccctgcggccccccagggccaggggtgtggggtcacccagcacttcctcccctcagcacccgagaacccctcctcagcagctctgagaacggcaatggtggccgagagacgtctccagctgatgcccggaccgagagaatcctcagtgacctcctgcccttctgcagaccaggccccgagggccagctcgctgccacggcccttcggaaagtgctgtccctgaagcagcttctgtttccggcggaggaagacaatggggcggggcctcctcgagatggggatggggtcccagggggcggccccctgagcccagcacggacccaggaaatccaggagaacctgctcagcttggaggagaccatgaagcagctggaggagttggaggaggaattttgccgcctgagacccctcctgtctcagcttggggggaactctgtcccccagcctggctgcacttgaggttcccgcccaggaaggccttttgcaagaaggagaggaatgggggagaggacgtgagggaccacccccacccacacagctgccgcagcatctcacaccccgagggcctgaggagagggagctgtgggccacgcctgggaggggcccagctggggttactggccccgcatgagcctcggccatctctccctcctgccctctgcttgggggactcagggctccattctggagggcaccacggtgacccgggccatctcagtattgcctgtgggggccacccctccacccccacccccaagtgccttcgctctgtttttataccctgaattggaggtttattttttaatatatattatctaagaaagatctgtgtgtgtgatg

SEQ ID NO: 306626 - DNA, 2459 bp, Homo sapiens
  misc_feature (686)..(686): n is a, c, g, or t
  misc_feature (1882)..(1882): n is a, c, g, or t
ccagagccaggaagcgggagccgggacccagggcccgggatcgccgagcccgacctcgggcgccccgccggtcacctccgcgcggacaccagccctgcagagcccagggagatggaagacttcgcccgaggggcggcctccccaggcccctcccggcctggcctggttcccgtcagcatcatcggggctgaggatgaggattttgagaacgagctggagacaaactcagaagagcaaaacagccagttccagagcctggagcaggtgaagcggcgcccagcccacctcatggccctcctgcagcacgtggccctgcagtttgagccaggacccctggtgagggcagggctgggtgggcacagggaggggtggggctgggacaggcacagcttttagcgaattaaaccagcgagctagtgcctggagggtctggaaaagcagatctagaacacagagagccagatctagaaagagagaatgctttagacaagagccagaaagcatgccacgtgacctcaacaggcttacaagtgcccagggtagatctcagtgcgcagcgggcagggtacacacgtcaggaccccgcggagccacagagagtccagcagcctggcagaaaccacatcccatcccactctgtgcctgtggcagcgcccccatcagcctgtggcagcacctttccgtgnactctaggggaccaaattcttctctccaaagcctttttggcagatgccagcacgcagtcattcacggttgatggttgggaaaaagaagctgttagccatcccaggtctagggagcacagcaggccctgatctggaaacaagaaaaccaccacacacagctcacaaggcagaccacacaattgtggatccagaagcctccggatgaggcagaagatacctgggagatgtggatggacaaccgtgccatccagaaacacccgcagagtctagaaaacccagcaggtgatttagaaagggagaggccacagtgctggctggcaggggatctgtagacaagggtctcatcccaagaagaccccgtccagcccagcacaggataggaggacagcctggggacagccagggcactgcaccatgtggacatgcatagtggacccctccagaaaacaaggaaaccgatagagtggggagaagtgcccgaggcatgcagaaagaagaacatgtcagctgcaagaccagaggctggtcatccggacgccaaaccatcagatatgcagaaaattaggaaattgcagtctttcccctgtctacattctctttccagaagagtggttcccccgacaaccacatgcacggagactctggccctctgagcaagggagtcccctattcaagccttggggtttctagaacaccagattgtggacatcagcccagggatcgtgctgactaccatgttcttttacagatgtggaaaccgaggcctagagagggtcagggacttgcctgaggtgaccccggcggcctctgggcattttgaggtttattctcgcatagctccctcacctcatcagcttgtggggagccgatcagagatagctgtggtcccctgggcagcttcctgttggcctgtcttagaattttgctatatttggggggtgtgaagagtggatatagatgtgttaaaactgtttaaagtggagaaggaggaccgggcctggtggttcatgactgtagtcccaacgctttgggaggctgaggcaggaggatagcttgagcctgggaggttgaggctgcagtgattgcaccactgcactccagcctgggcgacaagagtgaaaccctgtcttgaaaaaaaaaaaaaagtggggccgggcatggtggctcacacctataatcccagaactttggaggcngaggtgggtagatcacttgagatcaagagttcgagaccagcgtggccaacatggtaaaaccccgtctctactaaaaatatgaaaattggccaggcgcagtgactcctgccttggcctcccaaagtgctaggattacaggcatgagccaccacgcctggccataaatatgttaaaaggttgatatagaaacagatgaccgtggcatttagagttttggggtgttgagggagtcaggggtaactccagaaaggattgatatctgtgaattgtcctgaagggtaagaaggaatcagcaaaactcccaaattaaaaactttaccaaaaacatttcatcttagtgctaagtctactattttctacaaaatacatatttctaaatttttcatttactattttaaaattcttagcttccctcctcatccctgattaaaaaaaattttttttttgccctttggcttcttacatttttaatgaatgtgtttatgagtactttggactccactgaaaaaaattagaagaggccaagagagtaggatgaagggccttccagacagggggaatagactgaaaaaaaaaa

SEQ ID NO: 306627 - DNA, 3469 bp, Homo sapiens
cgtgggagttccggatgtttagcgttaccatggatcctggaggtgcccgcgaacactgcttgtcgcctgggcaaccggagaggacgaagcaggacctaggtggcggcggtggtaccggctgcaatggtgtccaatcccgtgcatggcttgccctttcttccgggcacgtcctttaaggactctacgaaaacagccttccacagaagtcagacgctgagctacaggaacggctatgcaattgttcgacgtccaacagttgggataggcggagaccggctccagttcaaccagctgtcccaggctgagctggatgagttggccagtaaggcaccagtcttaacttatggccaacctaaacaagccccacctgcggattttattcctgcgcatgtggcctttgacaaaaaggtactgaaatttgatgcctatttccaagaagatgttcctatgtcaactgaggaacagtataggatccgtcaggtgaacatttactattatctagaagatgacagcatgtctgtcatagagcctgttgtagaaaattctggaatccttcaaggcaagttaataaaacgccagcggctagccaagaatgaccggggtgaccattaccattggaaagacctaaatcgaggaataaacatcacaatttatggcaaaactttccgcgttgttgactgtgaccaattcacacaggtatttttagaaagccaaggaattgagttaaatccaccagagaagatggctcttgatccttacactgaactccgaaaacagcctcttcgtaagtatgtcaccccatcagactttgatcaactcaagcaatttctcacctttgacaaacaggtaagtgacataggaaccacaataggcttacttatttccaaatgtgacctacatttattggcaaaaggtttgggtagctgtattggtaactattttgaaacattacagctataattgaactgtttggacacagtactgtctttctgctttcatcaagggttacaggtacaggaatgcctacatttcatatggagatccaaagaagatcgtggagttgcggagttgttttgtgaacctcaccaaacatttaaatctcaaagcaattcctgagctacatctgcttcccaccttacgtttccaattgacaatttctttcccttaaaatgagctaatttcatagactcctttgtgaaaccataaatcgattattaggaaatttcacaaatatgcatacatgtaggttgtaatgttaaaatgtttaatttcacagaagccccactacagatgcttccttgttaaatgttatattaatattggagtccagaatgttctgagcattttccaactctgttccaaccttcctaatcctctcccttgtgagctgatgtgtataagcagatttaaatccttccctttctgtactaaagggagaaagaaaaggaagagatcaccctcagtgcttctttgctgctccttttctttagacatttaaccccttttagttcagaaaatgtaaactagcactagcatggtcttttaaggattttgttcatatcagtcatatatctgttattattttgtatttaaagattgtgtttattcccacgatttgaagaagcctagccaaaaaaaaaaaaaaaaagattgtgtttatattattgctagaagatatgtgttgatgggaccaaaaaaagactggttaataaataaaaattttttctacactaattatatataaaccatattcacatgtacctttattaatatatatataccactatgtaaagaacttcattgctcttttaatttagcttctctttcactgactaatattttggatcaaagtgagctcttcttttttggcacaaacttataatcctattatttaattctttccagctgctgacatatagtacataatttcagatgttttagtatgtttgatgaatatttcttttttttcaatttaccccatctgaaattacttcatagtctttccagctagtctttccatcgttgatacataattgccaaagtagccaagttgaactccctacttttaggattcttgagtcactactttggattcttcaaaggtccttcgattctatgcaatctgggatgatacagacagcatgtatggtgaatgtcggacctacatcattcattactatcttatggatgatacggtggaaattcgagaggtccacgaacggaatgatgggagagatcctttcccactcctaatgaaccgccagcgtgtgcccaaagttttggtggaaaatgcaaagaacttccctcagtgtgtgctagaaatctctgaccaagaagtgttggaatggtatactgctaaagacttcattgttgggaagtcactcactatccttgggagaactttcttcatttatgattgtgatccatttactcgacggtattacaaagagaagtttggaatcactgatttaccacgtattgatgtgagcaagcgggaaccacctccagtaaaacaggagttgcctccttataacggttttggactagtggaagattctgctcagaattgttttgctctcattccaaaagctccaaaaaaagacgttattaaaatgctggtgaatgataacaaggtgcttcgttatttggctgtactggaatcccccatcccagaagacaaagaccgcagatttgtcttctcttactttctagctaccgacatgatcagtatctttgagcctcctgttcgcaattctggtatcattgggggcaagtaccttggcaggactaaagttgttaaaccatactctacagtggacaaccctgtctactatggccccagtgacttcttcattggtgctgtgattgaagtgtttggtcaccggttcatcatccttgatacagacgagtatgttttgaaatacatggagagcaacgctgcccagtattcaccagaagcactcgcgtcaattcagaaccatgtccgaaagcgagaagcgcctgctccagaagcagaaagcaagcaaactgaaaaggatccaggcgtgcaggaattggaagcattaatagacacaattcagaagcaactgaaagatcactcatgcaaagacaacattcgtgaggcatttcaaatttatgacaaggaagcttcaggatatgtggacagagacatgttctttaaaatctgtgaatcgcttaacgtcccagtggatgactccttggttaaggagttaatcaggatgtgctctcatggagaaggcaaaattaactactataactttgttcgtgctttctcaaactgacctgctgatgagaaaatgcaagacaatttttgatactggaactatgctttgaaatacaccttacactcttcatagaggcatttacagggttcctgaagttttatttctgttttggttcttatttcactcctactgaagtcgaaactaaattggatctaataggatct

SEQ ID NO: 306628 - DNA, 743 bp, Homo sapiens
aaagggaataaaaaatttaataataaataaagggaatctgagggtggtttaaggtttgaatctcaagctgagtttgggcaagttatttaactggctctctcagtctcagattcttcaggtgtaaaatgggatatcagagcaactcaaagcgttgctaaaataattacattagtttagcgtggtggttcctggaaaatagtaaatgttcaataaatgctgattgtaactttttattcacgttgtttggtcaccggttcatcatccttgatacagacgagtatgttttgaaatacatggagagcaacgctgcccagtattcaccagaagcactcgcgtcaattcagaaccatgtccgaaagcgagaagcgcctgctccagaagcagaaaggtgtgtgtttgattgctagggtttggcacactcaagatattcaggaagtaattcttgagaaaacaaatgagtaatcacattttagattttctgatttctctcaccaggtgggaattattagatataaacagaaggttccctgtgtcaatgtaatagctagtaacttagaactttttcaacttcatttgtttagcaaatacagttgacccttgaacaatgtgggagttaggggtaccagcctccctccacagctgaaaattcatgtataacttttgacaccccaaaacttaactactaatagcctactcttgactgtaagccttactgataacataaacagttgattaacacatat

SEQ ID NO: 306629 - DNA, 3856 bp, Homo sapiens
cgtgggagttccggatgtttagcgttaccatggatcctggaggtgcccgcgaacactgcttgtcgcctgggcaaccggagaggacgaagcaggacctaggtggcggcggtggtaccggctgcaatggtgtccaatcccgtgcatggcttgccctttcttccgggcacgtcctttaaggactctacgaaaacagccttccacagaagtcagacgctgagctacaggaacggctatgcaattgttcgacgtccaacagttgggataggcggagaccggctccagttcaaccagctgtcccaggctgagctggatgagttggccagtaaggcaccagtcttaacttatggccaacctaaacaagccccacctgcggattttattcctgcgcatgtggcctttgacaaaaaggtactgaaatttgatgcctatttccaagaagatgttcctatgtcaactgaggaacagtataggatccgtcaggtgaacatttactattatctagaagatgacagcatgtctgtcatagagcctgttgtagaaaattctggaatccttcaaggcaagttaataaaacgccagcggctagccaagaatgaccggggtgaccattaccattggaaagacctaaatcgaggaataaacatcacaatttatggcaaaactttccgcgttgttgactgtgaccaattcacacaggtatttttagaaagccaaggaattgagttaaatccaccagagaagatggctcttgatccttacactgaactccgaaaacagcctcttcgtaagtatgtcaccccatcagactttgatcaactcaagcaatttctcacctttgacaaacaggtccttcgattctatgcaatctgggatgatacagacagcatgtatggtgaatgtcggacctacatcattcattactatcttatggatgatacggtggaaattcgagaggtccacgaacggaatgatgggagagatcctttcccactcctaatgaaccgccagcgtgtgcccaaagttttggtggaaaatgcaaagaacttccctcagtgtgtgctagaaatctctgaccaagaagtgttggaatggtatactgctaaagacttcattgttgggaagtcactcactatccttgggagaactttcttcatttatgattgtgatccatttactcgacggtattacaaagagaagtttggaatcactgatttaccacgtattgatgtgagcaagcgggaaccacctccagtaaaacaggagttgcctccttataacggttttggactagtggaagattctgctcagaattgttttgctctcattccaaaagctccaaaaaaagacgttattaaaatgctggtgaatgataacaaggtgcttcgttatttggctgtactggaatcccccatcccagaagacaaagaccgcagatttgtcttctcttactttctagctaccgacatgatcagtatctttgagcctcctgttcgcaattctggtatcattgggggcaagtaccttggcaggactaaagttgttaaaccatactctacagtggacaaccctgtctactatggccccagtgacttcttcattggtgctgtgattgaagtgtttggtcaccggttcatcatccttgatacagacgagtatgttttgaaatacatggagagcaacgctgcccagtattcaccagaagcactcgcgtcaattcagaaccatgtccgaaagcgagaagcgcctgctccagaagcagaaagcaagcaaactgaaaaggatccaggcgtgcaggaattggaagcattaatagacacaattcagaagcaactgaaagatcactcatgcaaagacaacattcgtgaggcatttcaaatttatgacaaggaagcttcaggatatgtggacagagacatgttctttaaaatctgtgaatcgcttaacgtcccagtggatgactccttggttaaggagttaatcaggatgtgctctcatggagaaggcaaaattaactactataactttgttcgtgctttctcaaactgacctgctgatgagaaaatgcaagacaatttttgatactggaactatgctttgaaatacaccttacactcttcatagaggcatttacagggttcctgaagttttatttctgttttggttcttatttcactcctactgaagtcgaaactaaattggatctaataggatctaagattggtgccttatttagggtgataggggtatagcaatgtctaattttgtgtgtcaaattgacttggccacagggggcccaaatatttcctttctttctttttaaaaaaataaatttttttagagatgggatctcactctgtcatacaggctggagtgtggtggcactatcctagttctatgaagcctcagactcctgggctcaagtgatcctcccacttcaacctccccagtagctgggacaacaggctcaagccaccatgcccagctaatttttaaaattattttgtagagacaaggtcttgctaggttgcctgaacttgtctcaaactcatgagctccagaaattctcccacctcagcctccaaaagtgctgggattataggcatgagccactgtgcccagcctcagatatttcattattctgggggtttctctgaaggtatttttcgatgagataaacatttgaatcagaagactaagtaaaacagatagtcctccctaatgtgggtgggcctcctccaatcatttgaagacatgagtagaataaaaaggctgacctttccccaggtaagagaattcctcctgcctgactggcttcaaattggaacatcagccttttcttgccttcagacacaaatggaaacatcagctgttggtctggagcctgctgaccttcagactggacctaaaccatcagctctcctaagtcttaggcctttggattcagactggaattatacctttagctctcctgggtctccagcttgccaatttaccctgcagatcttgggacttgtaagccttcataattgtgtgagcaatttcttataactctctctttctctctctctacatatatatatatatatatattttatatgtacacattcatacacacacacgcttatatgtatacatatagtatgtatatgtgtatatatattatgtatatacatatatgtgcacacatctctactaaaaatagaaaaattagccaggtgtggtggcatgtgcctgtagtcccagccactcgggaggcttaaatgggagaatcacttgaaccctggaggcagaggttgcagtgagccaggaccacgccactgcactccatccagcctgggtgacagagcaagactccatctcaaaaaaaaaaaggttagaaaaatgctgcttttagagagcctggccttgagagaggaaggaaagactagttgcagttaccattctctggtgagctctgactggctttttacaaacagggcttctctttggttgaagtcagccactaagttcatctttaaacatgctatctcaaattccccgaagccacccaaaatgtggtatgaatgaggatagagttacacagaattcagactgctttgccctctcagaacttctagggaacttcccttggtgtttccttccctaacgagctcagccacttgtaaccagcttattgaaagggctgtgaatgtattatgttgattccttttctgttccaggttattatcttgggaataacccatgttttgttttgttttaccctcagtcgctcataactatttaaaacagtatctcactttcaagtacagatgctcctctacttatggggctatgtctcaataaactcacgtaagta

SEQ ID NO: 306630 - DNA, 2375 bp, Homo sapiens
cgtgggagttccggatgtttagcgttaccatggatcctggaggtgcccgcgaacactgcttgtcgcctgggcaaccggagaggacgaagcaggacctaggtggcggcggtggtaccggctgcaatggtgtccaatcccgtgcatggcttgccctttcttccgggcacgtcctttaaggactctacgaaaacagccttccacagaagtcagacgctgagctacaggaacggctatgcaattgttcgacgtccaacagttgggataggcggagaccggctccagttcaaccagctgtcccaggctgagctggatgagttggccagtaaggcaccagtcttaacttatggccaacctaaacaagccccacctgcggattttattcctgcgcatgtggcctttgacaaaaaggtactgaaatttgatgcctatttccaagaagatgttcctatgtcaactgaggaacagtataggatccgtcaggtgaacatttactattatctagaagatgacagcatgtctgtcatagagcctgttgtagaaaattctggaatccttcaaggcaagttaataaaacgccagcggctagccaagaatgaccggggtgaccattaccattggaaagacctaaatcgaggaataaacatcacaatttatggcaaaactttccgcgttgttgactgtgaccaattcacacaggtatttttagaaagccaaggaattgagttaaatccaccagagaagatggctcttgatccttacactgaactccgaaaacagcctcttcgtaagtatgtcaccccatcagactttgatcaactcaagcaatttctcacctttgacaaacaggtccttcgattctatgcaatctgggatgatacagacagcatgtatggtgaatgtcggacctacatcattcattactatcttatggatgatacggtggaaattcgagaggtccacgaacggaatgatgggagagatcctttcccactcctaatgaaccgccagcgtgtgcccaaagttttggtggaaaatgcaaagaacttccctcagtgtgtgctagaaatctctgaccaagaagtgttggaatggtatactgctaaagacttcattgttgggaagtcactcactatccttgggagaactttcttcatttatgattgtgatccatttactcgacggtattacaaagagaagtttggaatcactgatttaccacgtattgatgtgagcaagcgggaaccacctccagtaaaacaggagttgcctccttataacggttttggactagtggaagattctgctcagaattgttttgctctcattccaaaagctccaaaaaaagacgttattaaaatgctggtgaatgataacaaggtgcttcgttatttggctgtactggaatcccccatcccagaagacaaagaccgcagatttgtcttctcttactttctagctaccgacatgatcagtatctttgagcctcctgttcgcaattctggtatcattgggggcaagtaccttggcaggactaaagttgttaaaccatactctacagtggacaaccctgtctactatggccccagtgacttcttcattggtgctgtgattgaagtgtttggtcaccggttcatcatccttgatacagacgagtatgttttgaaatacatggagagcaacgctgcccagtattcaccagaagcactcgcgtcaattcagaaccatgtccgaaagcgagaagcgcctgctccagaagcagaaagcaagcaaactgaaaaggatccaggcgtgcaggaattggaagcattaatagacacaattcagaagcaactgaaagatcactcatgcaaagacaacattcgtgaggcatttcaaatttatgacaaggaagcttcaggatatgtggacagagacatgttctttaaaatctgtgaatcgcttaacgtcccagtggatgactccttggttaaggagttaatcaggatgtgctctcatggagaaggcaaaattaactactataactttgttcgtgctttctcaaactgacctgctgatgagaaaatgcaagacaatttttgatactggaactatgctttgaaatacaccttacactcttcatagaggcatttacagggttcctgaagttttatttctgttttggttcttatttcactcctactgaagtcgaaactaaattggatctaataggatctaagattggtgccttatttagggtgataggggtatagcaatgtctaattttgtgtgtcaaattgacttggccacagggggcccaaatatttcctttctttctttttaaaaaaataaatttttttagagatgggatctcactctgtcatacaggctggagtgtg

SEQ ID NO: 306631 - DNA, 5564 bp, Homo sapiens
cgtgggagttccggatgtttagcgttaccatggatcctggaggtgcccgcgaacactgcttgtcgcctgggcaaccggagaggacgaagcaggacctaggtggcggcggtggtaccggctgcaatggtgtccaatcccgtgcatggcttgccctttcttccgggcacgtcctttaaggactctacgaaaacagccttccacagaagtcagacgctgagctacaggaacggctatgcaattgttcgacgtccaacagttgggataggcggagaccggctccagttcaaccagctgtcccaggctgagctggatgagttggccagtaaggcaccagtcttaacttatggccaacctaaacaagccccacctgcggattttattcctgcgcatgtggcctttgacaaaaagctattgtaaaaggggttgagttcttgatttgattctcagcttggtcgctgttggtgtaaagaagagctactgatatgtgtatattaattttgtatccagaaacttcgctgaattcttttatcagttctaggagctttctggaggagtctttaggattttccaggacttcttctagtactgtgctgaagaggagtggagagagtgggcatccttatgttgtcccagttctcagagggaatgctttcaacttttccccattcagcattatgttggctgtgggtctgtcatagatggcttttattacattgaggtactgaaatttgatgcctatttccaagaagatgttcctatgtcaactgaggaacagtataggatccgtcaggtgaacatttactattatctagaagatgacagcatgtctgtcatagagcctgttgtagaaaattctggaatccttcaaggcaagttaataaaacgccagcggctagccaagaatgaccggggtgaccattaccattggaaagacctaaatcgaggaataaacatcacaatttatggcaaaactttccgcgttgttgactgtgaccaattcacacaggtatttttagaaagccaaggaattgagttaaatccaccagagaagatggctcttgatccttacactgaactccgaaaacagcctcttcgtaagtatgtcaccccatcagactttgatcaactcaagcaatttctcacctttgacaaacaggtaagtgacataggaaccacaataggcttacttatttccaaatgtgacctacatttattggcaaaaggtttgggtagctgtattggtaactattttgaaacattacagctataattgaactgtttggacacagtactgtctttctgctttcatcaagggttacaggtacaggaatgcctacatttcatatggagatccaaagaagatcgtggagttgcggagttgttttgtgaacctcaccaaacatttaaatctcaaagcaattcctgagctacatctgcttcccaccttacgtttccaattgacaatttctttcccttaaaatgagctaatttcatagactcctttgtgaaaccataaatcgattattaggaaatttcacaaatatgcatacatgtaggttgtaatgttaaaatgtttaatttcacagaagccccactacagatgcttccttgttaaatgttatattaatattggagtccagaatgttctgagcattttccaactctgttccaaccttcctaatcctctcccttgtgagctgatgtgtataagcagatttaaatccttccctttctgtactaaagggagaaagaaaaggaagagatcaccctcagtgcttctttgctgctccttttctttagacatttaaccccttttagttcagaaaatgtaaactagcactagcatggtcttttaaggattttgttcatatcagtcatatatctgttattattttgtatttaaagattgtgtttattcccacgatttgaagaagcctagccaaaaaaaaaaaaaaaaagattgtgtttatattattgctagaagatatgtgttgatgggaccaaaaaaagactggttaataaataaaaattttttctacactaattatatataaaccatattcacatgtacctttattaatatatatataccactatgtaaagaacttcattgctcttttaatttagcttctctttcactgactaatattttggatcaaagtgagctcttcttttttggcacaaacttataatcctattatttaattctttccagctgctgacatatagtacataatttcagatgttttagtatgtttgatgaatatttcttttttttcaatttaccccatctgaaattacttcatagtctttccagctagtctttccatcgttgatacataattgccaaagtagccaagttgaactccctacttttaggattcttgagtcactactttggattcttcaaaggtccttcgattctatgcaatctgggatgatacagacagcatgtatggtgaatgtcggacctacatcattcattactatcttatggatgatacggtggaaattcgagaggtccacgaacggaatgatgggagagatcctttcccactcctaatgaaccgccagcgtgtgcccaaagttttggtggaaaatgcaaagaacttccctcagtgtgtgctagaaatctctgaccaagaagtgttggaatggtatactgctaaagacttcattgttgggaagtcactcactatccttgggagaactttcttcatttatgattgtgatccatttactcgacggtattacaaagagaagtttggaatcactgatttaccacgtattgatgtgagcaagcgggaaccacctccagtaaaacaggagttgcctccttataacggttttggactagtggaagattctgctcagaattgttttgctctcattccaaaagctccaaaaaaagacgttattaaaatgctggtgaatgataacaaggtgcttcgttatttggctgtactggaatcccccatcccagaagacaaagaccgcagatttgtcttctcttactttctagctaccgacatgatcagtatctttgagcctcctgttcgcaattctggtatcattgggggcaagtaccttggcaggactaaagttgttaaaccatactctacagtggacaaccctgtctactatggccccagtgacttcttcattggtgctgtgattgaagtgtttggtcaccggttcatcatccttgatacagacgagtatgttttgaaatacatggagagcaacgctgcccagtattcaccagaagcactcgcgtcaattcagaaccatgtccgaaagcgagaagcgcctgctccagaagcagaaagcaagcaaactgaaaaggatccaggcgtgcaggaattggaagcattaatagacacaattcagaagcaactgaaagatcactcatgcaaagacaacattcgtgaggcatttcaaatttatgacaaggaagcttcaggatatgtggacagagacatgttctttaaaatctgtgaatcgcttaacgtcccagtggatgactccttggttaaggagttaatcaggatgtgctctcatggagaaggcaaaattaactactataactttgttcgtgctttctcaaactgacctgctgatgagaaaatgcaagacaatttttgatactggaactatgctttgaaatacaccttacactcttcatagaggcatttacagggttcctgaagttttatttctgttttggttcttatttcactcctactgaagtcgaaactaaattggatctaataggatctaagattggtgccttatttagggtgataggggtatagcaatgtctaattttgtgtgtcaaattgacttggccacagggggcccaaatatttcctttctttctttttaaaaaaataaatttttttagagatgggatctcactctgtcatacaggctggagtgtggtggcactatcctagttctatgaagcctcagactcctgggctcaagtgatcctcccacttcaacctccccagtagctgggacaacaggctcaagccaccatgcccagctaatttttaaaattattttgtagagacaaggtcttgctaggttgcctgaacttgtctcaaactcatgagctccagaaattctcccacctcagcctccaaaagtgctgggattataggcatgagccactgtgcccagcctcagatatttcattattctgggggtttctctgaaggtatttttcgatgagataaacatttgaatcagaagactaagtaaaacagatagtcctccctaatgtgggtgggcctcctccaatcatttgaagacatgagtagaataaaaaggctgacctttccccaggtaagagaattcctcctgcctgactggcttcaaattggaacatcagccttttcttgccttcagacacaaatggaaacatcagctgttggtctggagcctgctgaccttcagactggacctaaaccatcagctctcctaagtcttaggcctttggattcagactggaattatacctttagctctcctgggtctccagcttgccaatttaccctgcagatcttgggacttgtaagccttcataattgtgtgagcaatttcttataactctctctttctctctctctacatatatatatatatatatattttatatgtacacattcatacacacacacgcttatatgtatacatatagtatgtatatgtgtatatatattatgtatatacatatatgtgcacacatctctactaaaaatagaaaaattagccaggtgtggtggcatgtgcctgtagtcccagccactcgggaggcttaaatgggagaatcacttgaaccctggaggcagaggttgcagtgagccaggaccacgccactgcactccatccagcctgggtgacagagcaagactccatctcaaaaaaaaaaaggttagaaaaatgctgcttttagagagcctggccttgagagaggaaggaaagactagttgcagttaccattctctggtgagctctgactggctttttacaaacagggcttctctttggttgaagtcagccactaagttcatctttaaacatgctatctcaaattccccgaagccacccaaaatgtggtatgaatgaggatagagttacacagaattcagactgctttgccctctcagaacttctagggaacttcccttggtgtttccttccctaacgagctcagccacttgtaaccagcttattgaaagggctgtgaatgtattatgttgattccttttctgttccaggttattatcttgggaataacccatgttttgttttgttttaccctcagtcgctcataactatttaaaacagtatctcactttcaagtacagatgctcctctacttatggggctatgtctcaataaactcacgtaagtaaaaaatatcacaagttgaaaacacatttaataaccctgataagcccattgtaaagtaggcaaataagttggaccattgaaagttggggactatctgtattttagaagttttttcagcttaaaaattaccaagctctatccta

SEQ ID NO: 306632 - DNA, 4246 bp, Homo sapiens
cgtgggagttccggatgtttagcgttaccatggatcctggaggtgcccgcgaacactgcttgtcgcctgggcaaccggagaggacgaagcaggacctaggtggcggcggtggtaccggctgcaatggtgtccaatcccgtgcatggcttgccctttcttccgggcacgtcctttaaggactctacgaaaacagccttccacagaagtcagacgctgagctacaggaacggctatgcaattgttcgacgtccaacagttgggataggcggagaccggctccagttcaaccagctgtcccaggctgagctggatgagttggccagtaaggcaccagtcttaacttatggccaacctaaacaagccccacctgcggattttattcctgcgcatgtggcctttgacaaaaaggtactgaaatttgatgcctatttccaagaagatgttcctatgtcaactgaggaacagtataggatccgtcaggtgaacatttactattatctagaagatgacagcatgtctgtcatagagcctgttgtagaaaattctggaatccttcaaggcaagttaataaaacgccagcggctagccaagaatgaccggggtgaccattaccattggaaagacctaaatcgaggaataaacatcacaatttatggcaaaactttccgcgttgttgactgtgaccaattcacacaggtatttttagaaagccaaggaattgagttaaatccaccagagaagatggctcttgatccttacactgaactccgaaaacagcctcttcgtaagtatgtcaccccatcagactttgatcaactcaagcaatttctcacctttgacaaacaggtaagtgacataggaaccacaataggcttacttatttccaaatgtgacctacatttattggcaaaaggtttgggtagctgtattggtaactattttgaaacattacagctataattgaactgtttggacacagtactgtctttctgctttcatcaagggttacaggtacaggaatgcctacatttcatatggagatccaaagaagatcgtggagttgcggagttgttttgtgaacctcaccaaacatttaaatctcaaagcaattcctgagctacatctgcttcccaccttacgtttccaattgacaatttctttcccttaaaatgagctaatttcatagactcctttgtgaaaccataaatcgattattaggaaatttcacaaatatgcatacatgtaggttgtaatgttaaaatgtttaatttcacagaagccccactacagatgcttccttgttaaatgttatattaatattggagtccagaatgttctgagcattttccaactctgttccaaccttcctaatcctctcccttgtgagctgatgtgtataagcagatttaaatccttccctttctgtactaaagggagaaagaaaaggaagagatcaccctcagtgcttctttgctgctccttttctttagacatttaaccccttttagttcagaaaatgtaaactagcactagcatggtcttttaaggattttgttcatatcagtcatatatctgttattattttgtatttaaagattgtgtttattcccacgatttgaagaagcctagccaaaaaaaaaaaaaaaaagattgtgtttatattattgctagaagatatgtgttgatgggaccaaaaaaagactggttaataaataaaaattttttctacactaattatatataaaccatattcacatgtacctttattaatatatatataccactatgtaaagaacttcattgctcttttaatttagcttctctttcactgactaatattttggatcaaagtgagctcttcttttttggcacaaacttataatcctattatttaattctttccagctgctgacatatagtacataatttcagatgttttagtatgtttgatgaatatttcttttttttcaatttaccccatctgaaattacttcatagtctttccagctagtctttccatcgttgatacataattgccaaagtagccaagttgaactccctacttttaggattcttgagtcactactttggattcttcaaaggtccttcgattctatgcaatctgggatgatacagacagcatgtatggtgaatgtcggacctacatcattcattactatcttatggatgatacggtggaaattcgagaggtccacgaacggaatgatgggagagatcctttcccactcctaatgaaccgccagcgtgtgcccaaagttttggtggaaaatgcaaagaacttccctcagtgtgtgctagaaatctctgaccaagaagtgttggaatggtatactgctaaagacttcattgttgggaagtcactcactatccttgggagaactttcttcatttatgattgtgatccatttactcgacggtattacaaagagaagtttggaatcactgatttaccacgtattgatgtgagcaagcgggaaccacctccagtaaaacaggagttgcctccttataacggttttggactagtggaagattctgctcagaattgttttgctctcattccaaaagctccaaaaaaagacgttattaaaatgctggtgaatgataacaaggtgcttcgttatttggctgtactggaatcccccatcccagaagacaaagaccgcagatttgtcttctcttactttctagctaccgacatgatcagtatctttgagcctcctgttcgcaattctggtatcattgggggcaagtaccttggcaggactaaagttgttaaaccatactctacagtggacaaccctgtctactatggccccagtgacttcttcattggtgctgtgattgaagtgtttggtcaccggttcatcatccttgatacagacgagtatgttttgaaatacatggagagcaacgctgcccagtattcaccagaagcactcgcgtcaattcagaaccatgtccgaaagcgagaagcgcctgctccagaagcagaaagcaagcaaactgaaaaggatccaggcgtgcaggaattggaagcattaatagacacaattcagaagcaactgaaagatcactcatgcaaagacaacattcgtgaggcatttcaaatttatgacaaggaagcttcaggatatgtggacagagacatgttctttaaaatctgtgaatcgcttaacgtcccagtggatgactccttggttaaggagttaatcaggatgtgctctcatggagaaggcaaaattaactactataactttgttcgtgctttctcaaactgacctgctgatgagaaaatgcaagacaatttttgatactggaactatgctttgaaatacaccttacactcttcatagagacaacaaaaaaaaaaaaaaaaaaaaaaaaaactttgtctgggccgccctgggcccctgagaaaaaagtttttaaaaccattgtctgtgtgggcgcggcgcggccccgcgtttggtgtcttgtggttcccctgggccccaaatcgggtgttcccaaagggaaacctcgggggcatggaaacataggtgcgtttggagttttctctacacccaaataaaaaaaaaggaggcccggggtgacacaaccaggagcgctttttcgttgaaacaactccaaaaatgggaaacgttccaggaggagccaaagatccgtgtgtctatcaatcaaccagcaaggcagtgcacaacaggcagcgcccagataacacaaaaattaacggccccggccgtgaaggatagtaaagaaacagccagcaggacaacctagccaacaaacaagaccataacaagcagacaagcaacatccacacaagccaaagagaaggaggaaacaaagaaaaacgaagaggacaggcaaacaacagagcatagtaaggaaaaaccgcaaggccggccaggagtggcgacagcgagggaaaacagaagccagatgccgcccgagagccagatgaagggagcaccacagcgaggcaaaagagaagagagaatgacaatgagcagaataagaagacgcagcacacagcagagagcgcaaggagagcgctaggcgtaacagccacagaaggagacgtacagatgcaagtcaagagaaagacagcaagacctaacacagagatacagcgaaggagaaacggaaacgcacgagcaaccagcaggacgaggcagagacagaagcgagccaacagcgacacagagagaacgacagagag

SEQ ID NO: 306633 - DNA, 334 bp, Homo sapiens
gtagagacagcatcttgttgcccaggctggtctcgaactctggggctgaagtgattctccctcttcagcctcccagagttctgggattataggcacgagccaccatgcccagccttaatgttggtaagcttcttgatgtaagttttgtgatgcttataagcaaagattcaagttatatttttaaaagttagttttttttttacctaacaaatatttgtctaatgttattaatgacacattcttttcttcttcagaaaacagccttccacagaagtcagacgctgagctacaggaacggctatgcaattgttcgacgtccaacagttgggatagg

SEQ ID NO: 306634 - DNA, 2213 bp, Homo sapiens
cgtgggagttccggatgtttagcgttaccatggatcctggaggtgcccgcgaacactgcttgtcgcctgggcaaccggagaggacgaagcaggacctaggtggcggcggtggtaccggctgcaatggtgtccaatcccgtgcatggcttgccctttcttccgggcacgtcctttaaggactctacgaaaacagccttccacagaagtcagacgctgagctacaggaacggctatgcaattgttcgacgtccaacagttgggataggcggagaccggctccagttcaaccagctgtcccaggctgagctggatgagttggccagtaaggcaccagtcttaacttatggccaacctaaacaagccccacctgcggattttattcctgcgcatgtggcctttgacaaaaaggtactgaaatttgatgcctatttccaagaagatgttcctatgtcaactgaggaacagtataggatccgtcaggtgaacatttactattatctagaagatgacagcatgtctgtcatagagcctgttgtagaaaattctggaatccttcaaggcaagttaataaaacgccagcggctagccaagaatgaccggggtgaccattaccattggaaagacctaaatcgaggaataaacatcacaatttatggcaaaactttccgcgttgttgactgtgaccaattcacacaggtatttttagaaagccaaggaattgagttaaatccaccagagaagatggctcttgatccttacactgaactccgaaaacagcctcttcgtaagtatgtcaccccatcagactttgatcaactcaagcaatttctcacctttgacaaacaggtccttcgattctatgcaatctgggatgatacagacagcatgtatggtgaatgtcggacctacatcattcattactatcttatggatgatacggtggaaattcgagaggtccacgaacggaatgatgggagagatcctttcccactcctaatgaaccgccagcgtgtgcccaaagttttggtggaaaatgcaaagaacttccctcagtgtgtgctagaaatctctgaccaagaagtgttggaatggtatactgctaaagacttcattgttgggaagtcactcactatccttgggagaactttcttcatttatgattgtgatccatttactcgacggtattacaaagagaagtttggaatcactgatttaccacgtattgatgtgagcaagcgggaaccacctccagtaaaacaggagttgcctccttataacggttttggactagtggaagattctgctcagaattgttttgctctcattccaaaagctccaaaaaaagacgttattaaaatgctggtgaatgataacaaggtgcttcgttatttggctgtactggaatcccccatcccagaagacaaagaccgcagatttgtcttctcttactttctagctaccgacatgatcagtatctttgagcctcctgttcgcaattctggtatcattgggggcaagtaccttggcaggactaaagttgttaaaccatactctacagtggacaaccctgtctactatggccccagtgacttcttcattggtgctgtgattgaagtgtttggtcaccggttcatcatccttgatacagacgagtatgttttgaaatacatggagagcaacgctgcccagtattcaccagaagcactcgcgtcaattcagaaccatgtccgaaagcgagaagcgcctgctccagaagcagaaagcaagcaaactgaaaaggatccaggcgtgcaggaattggaagcattaatagacacaattcagaagcaactgaaagatcactcatgcaaagacaacattcgtgaggcatttcaaatttatgacaaggaagcttcaggatatgtggacagagacatgttctttaaaatctgtgaatcgcttaacgtcccagtggatgactccttggttaaggagttaatcaggatgtgctctcatggagaaggcaaaattaactactataactttgttcgtgctttctcaaactgacctgctgatgagaaaatgcaagacaatttttgatactggaactatgctttgaaatacaccttacactcttcatagaggcatttacagggttcctgaagttttatttctgttttggttcttatttcactcctactgaagtcgaaactaaattggatctaataggatct

SEQ ID NO: 306635 - DNA, 3998 bp, Homo sapiens
cgtgggagttccggatgtttagcgttaccatggatcctggaggtgcccgcgaacactgcttgtcgcctgggcaaccggagaggacgaagcaggacctaggtggcggcggtggtaccggctgcaatggtgtccaatcccgtgcatggcttgccctttcttccgggcacgtcctttaaggactctacgaaaacagccttccacagaagtcagacgctgagctacaggaacggctatgcaattgttcgacgtccaacagttgggataggcggagaccggctccagttcaaccagctgtcccaggctgagctggatgagttggccagtaaggcaccagtcttaacttatggccaacctaaacaagccccacctgcggattttattcctgcgcatgtggcctttgacaaaaaggtactgaaatttgatgcctatttccaagaagatgttcctatgtcaactgaggaacagtataggatccgtcaggtgaacatttactattatctagaagatgacagcatgtctgtcatagagcctgttgtagaaaattctggaatccttcaaggcaagttaataaaacgccagcggctagccaagaatgaccggggtgaccattaccattggaaagacctaaatcgaggaataaacatcacaatttatggcaaaactttccgcgttgttgactgtgaccaattcacacaggtatttttagaaagccaaggaattgagttaaatccaccagagaagatggctcttgatccttacactgaactccgaaaacagcctcttcgtaagtatgtcaccccatcagactttgatcaactcaagcaatttctcacctttgacaaacaggtccttcgattctatgcaatctgggatgatacagacagcatgtatggtgaatgtcggacctacatcattcattactatcttatggatgatacggtggaaattcgagaggtccacgaacggaatgatgggagagatcctttcccactcctaatgaaccgccagcgtgtgcccaaagttttggtggaaaatgcaaagaacttccctcagtgtgtgctagaaatctctgaccaagaagtgttggaatggtatactgctaaagacttcattgttgggaagtcactcactatccttgggagaactttcttcatttatgattgtgatccatttactcgacggtattacaaagagaagtttggaatcactgatttaccacgtattgatgtgagcaagcgggaaccacctccagtaaaacaggagttgcctccttataacggttttggactagtggaagattctgctcagaattgttttgctctcattccaaaagctccaaaaaaagacgttattaaaatgctggtgaatgataacaaggtgcttcgttatttggctgtactggaatcccccatcccagaagacaaagaccgcagatttgtcttctcttactttctagctaccgacatgatcagtatctttgagcctcctgttcgcaattctggtatcattgggggcaagtaccttggcaggactaaagttgttaaaccatactctacagtggacaaccctgtctactatggccccagtgacttcttcattggtgctgtgattgaagtgtttggtcaccggttcatcatccttgatacagacgagtatgttttgaaatacatggagagcaacgctgcccagtattcaccagaagcactcgcgtcaattcagaaccatgtccgaaagcgagaagcgcctgctccagaagcagaaagcaagcaaactgaaaaggatccaggcgtgcaggaattggaagcattaatagacacaattcagaagcaactgaaagatcactcatgcaaagacaacattcgtgaggcatttcaaatttatgacaaggaagcttcaggatatgtggacagagacatgttctttaaaatctgtgaatcgcttaacgtcccagtggatgactccttggttaaggagttaatcaggatgtgctctcatggagaaggcaaaattaactactataactttgttcgtgctttctcaaactgacctgctgatgagaaaatgcaagacaatttttgatactggaactatgctttgaaatacaccttacactcttcatagaggcatttacagggttcctgaagttttatttctgttttggttcttatttcactcctactgaagtcgaaactaaattggatctaataggatctaagattggtgccttatttagggtgataggggtatagcaatgtctaattttgtgtgtcaaattgacttggccacagggggcccaaatatttcctttctttctttttaaaaaaataaatttttttagagatgggatctcactctgtcatacaggctggagtgtggtggcactatcctagttctatgaagcctcagactcctgggctcaagtgatcctcccacttcaacctccccagtagctgggacaacaggctcaagccaccatgcccagctaatttttaaaattattttgtagagacaaggtcttgctaggttgcctgaacttgtctcaaactcatgagctccagaaattctcccacctcagcctccaaaagtgctgggattataggcatgagccactgtgcccagcctcagatatttcattattctgggggtttctctgaaggtatttttcgatgagataaacatttgaatcagaagactaagtaaaacagatagtcctccctaatgtgggtgggcctcctccaatcatttgaagacatgagtagaataaaaaggctgacctttccccaggtaagagaattcctcctgcctgactggcttcaaattggaacatcagccttttcttgccttcagacacaaatggaaacatcagctgttggtctggagcctgctgaccttcagactggacctaaaccatcagctctcctaagtcttaggcctttggattcagactggaattatacctttagctctcctgggtctccagcttgccaatttaccctgcagatcttgggacttgtaagccttcataattgtgtgagcaatttcttataactctctctttctctctctctacatatatatatatatatatattttatatgtacacattcatacacacacacgcttatatgtatacatatagtatgtatatgtgtatatatattatgtatatacatatatgtgcacacatctctactaaaaatagaaaaattagccaggtgtggtggcatgtgcctgtagtcccagccactcgggaggcttaaatgggagaatcacttgaaccctggaggcagaggttgcagtgagccaggaccacgccactgcactccatccagcctgggtgacagagcaagactccatctcaaaaaaaaaaaggttagaaaaatgctgcttttagagagcctggccttgagagaggaaggaaagactagttgcagttaccattctctggtgagctctgactggctttttacaaacagggcttctctttggttgaagtcagccactaagttcatctttaaacatgctatctcaaattccccgaagccacccaaaatgtggtatgaatgaggatagagttacacagaattcagactgctttgccctctcagaacttctagggaacttcccttggtgtttccttccctaacgagctcagccacttgtaaccagcttattgaaagggctgtgaatgtattatgttgattccttttctgttccaggttattatcttgggaataacccatgttttgttttgttttaccctcagtcgctcataactatttaaaacagtatctcactttcaagtacagatgctcctctacttatggggctatgtctcaataaactcacgtaagtaaaaaatatcacaagttgaaaacacatttaataaccctgataagcccattgtaaagtaggcaaataagttggaccattgaaagttggggactatctgtattttagaagttttttcagcttaaaaattaccaagctctatccta

SEQ ID NO: 306636 - DNA, 5033 bp, Homo sapiens
cgtgggagttccggatgtttagcgttaccatggatcctggaggtgcccgcgaacactgcttgtcgcctgggcaaccggagaggacgaagcaggacctaggtggcggcggtggtaccggctgcaatggtgtccaatcccgtgcatggcttgccctttcttccgggcacgtcctttaaggactctacgaaaacagccttccacagaagtcagacgctgagctacaggaacggctatgcaattgttcgacgtccaacagttgggataggcggagaccggctccagttcaaccagctgtcccaggctgagctggatgagttggccagtaaggcaccagtcttaacttatggccaacctaaacaagccccacctgcggattttattcctgcgcatgtggcctttgacaaaaaggtactgaaatttgatgcctatttccaagaagatgttcctatgtcaactgaggaacagtataggatccgtcaggtgaacatttactattatctagaagatgacagcatgtctgtcatagagcctgttgtagaaaattctggaatccttcaaggcaagttaataaaacgccagcggctagccaagaatgaccggggtgaccattaccattggaaagacctaaatcgaggaataaacatcacaatttatggcaaaactttccgcgttgttgactgtgaccaattcacacaggtatttttagaaagccaaggaattgagttaaatccaccagagaagatggctcttgatccttacactgaactccgaaaacagcctcttcgtaagtatgtcaccccatcagactttgatcaactcaagcaatttctcacctttgacaaacaggtaagtgacataggaaccacaataggcttacttatttccaaatgtgacctacatttattggcaaaaggtttgggtagctgtattggtaactattttgaaacattacagctataattgaactgtttggacacagtactgtctttctgctttcatcaagggttacaggtacaggaatgcctacatttcatatggagatccaaagaagatcgtggagttgcggagttgttttgtgaacctcaccaaacatttaaatctcaaagcaattcctgagctacatctgcttcccaccttacgtttccaattgacaatttctttcccttaaaatgagctaatttcatagactcctttgtgaaaccataaatcgattattaggaaatttcacaaatatgcatacatgtaggttgtaatgttaaaatgtttaatttcacagaagccccactacagatgcttccttgttaaatgttatattaatattggagtccagaatgttctgagcattttccaactctgttccaaccttcctaatcctctcccttgtgagctgatgtgtataagcagatttaaatccttccctttctgtactaaagggagaaagaaaaggaagagatcaccctcagtgcttctttgctgctccttttctttagacatttaaccccttttagttcagaaaatgtaaactagcactagcatggtcttttaaggattttgttcatatcagtcatatatctgttattattttgtatttaaagattgtgtttattcccacgatttgaagaagcctagccaaaaaaaaaaaaaaaaagattgtgtttatattattgctagaagatatgtgttgatgggaccaaaaaaagactggttaataaataaaaattttttctacactaattatatataaaccatattcacatgtacctttattaatatatatataccactatgtaaagaacttcattgctcttttaatttagcttctctttcactgactaatattttggatcaaagtgagctcttcttttttggcacaaacttataatcctattatttaattctttccagctgctgacatatagtacataatttcagatgttttagtatgtttgatgaatatttcttttttttcaatttaccccatctgaaattacttcatagtctttccagctagtctttccatcgttgatacataattgccaaagtagccaagttgaactccctacttttaggattcttgagtcactactttggattcttcaaaggtccttcgattctatgcaatctgggatgatacagacagcatgtatggtgaatgtcggacctacatcattcattactatcttatggatgatacggtggaaattcgagaggtccacgaacggaatgatgggagagatcctttcccactcctaatgaaccgccagcgtgtgcccaaagttttggtggaaaatgcaagagttgcctccttataacggttttggactagtggaagattctgctcagaattgttttgctctcattccaaaagctccaaaaaaagacgttattaaaatgctggtgaatgataacaaggtgcttcgttatttggctgtactggaatcccccatcccagaagacaaagaccgcagatttgtcttctcttactttctagctaccgacatgatcagtatctttgagcctcctgttcgcaattctggtatcattgggggcaagtaccttggcaggactaaagttgttaaaccatactctacagtggacaaccctgtctactatggccccagtgacttcttcattggtgctgtgattgaagtgtttggtcaccggttcatcatccttgatacagacgagtatgttttgaaatacatggagagcaacgctgcccagtattcaccagaagcactcgcgtcaattcagaaccatgtccgaaagcgagaagcgcctgctccagaagcagaaagcaagcaaactgaaaaggatccaggcgtgcaggaattggaagcattaatagacacaattcagaagcaactgaaagatcactcatgcaaagacaacattcgtgaggcatttcaaatttatgacaaggaagcttcaggatatgtggacagagacatgttctttaaaatctgtgaatcgcttaacgtcccagtggatgactccttggttaaggagttaatcaggatgtgctctcatggagaaggcaaaattaactactataactttgttcgtgctttctcaaactgacctgctgatgagaaaatgcaagacaatttttgatactggaactatgctttgaaatacaccttacactcttcatagaggcatttacagggttcctgaagttttatttctgttttggttcttatttcactcctactgaagtcgaaactaaattggatctaataggatctaagattggtgccttatttagggtgataggggtatagcaatgtctaattttgtgtgtcaaattgacttggccacagggggcccaaatatttcctttctttctttttaaaaaaataaatttttttagagatgggatctcactctgtcatacaggctggagtgtggtggcactatcctagttctatgaagcctcagactcctgggctcaagtgatcctcccacttcaacctccccagtagctgggacaacaggctcaagccaccatgcccagctaatttttaaaattattttgtagagacaaggtcttgctaggttgcctgaacttgtctcaaactcatgagctccagaaattctcccacctcagcctccaaaagtgctgggattataggcatgagccactgtgcccagcctcagatatttcattattctgggggtttctctgaaggtatttttcgatgagataaacatttgaatcagaagactaagtaaaacagatagtcctccctaatgtgggtgggcctcctccaatcatttgaagacatgagtagaataaaaaggctgacctttccccaggtaagagaattcctcctgcctgactggcttcaaattggaacatcagccttttcttgccttcagacacaaatggaaacatcagctgttggtctggagcctgctgaccttcagactggacctaaaccatcagctctcctaagtcttaggcctttggattcagactggaattatacctttagctctcctgggtctccagcttgccaatttaccctgcagatcttgggacttgtaagccttcataattgtgtgagcaatttcttataactctctctttctctctctctacatatatatatatatatatattttatatgtacacattcatacacacacacgcttatatgtatacatatagtatgtatatgtgtatatatattatgtatatacatatatgtgcacacatctctactaaaaatagaaaaattagccaggtgtggtggcatgtgcctgtagtcccagccactcgggaggcttaaatgggagaatcacttgaaccctggaggcagaggttgcagtgagccaggaccacgccactgcactccatccagcctgggtgacagagcaagactccatctcaaaaaaaaaaaggttagaaaaatgctgcttttagagagcctggccttgagagaggaaggaaagactagttgcagttaccattctctggtgagctctgactggctttttacaaacagggcttctctttggttgaagtcagccactaagttcatctttaaacatgctatctcaaattccccgaagccacccaaaatgtggtatgaatgaggatagagttacacagaattcagactgctttgccctctcagaacttctagggaacttcccttggtgtttccttccctaacgagctcagccacttgtaaccagcttattgaaagggctgtgaatgtattatgttgattccttttctgttccaggttattatcttgggaataacccatgttttgttttgttttaccctcagtcgctcataactatttaaaacagtatctcactttcaagtacagatgctcctctacttatggggctatgtctcaataaactcacgtaagtaaaaaatatcacaagttgaaaacacatttaataaccctgataagcccattgtaaagtaggcaaataagttggaccattgaaagttggggactatctgtattttagaagttttttcagcttaaaaattaccaagctctatccta

SEQ ID NO: 306637 - DNA, 5373 bp, Homo sapiens
cgtgggagttccggatgtttagcgttaccatggatcctggaggtgcccgcgaacactgcttgtcgcctgggcaaccggagaggacgaagcaggacctaggtggcggcggtggtaccggctgcaatggtgtccaatcccgtgcatggcttgccctttcttccgggcacgtcctttaaggactctacgaaaacagccttccacagaagtcagacgctgagctacaggaacggctatgcaattgttcgacgtccaacagttgggataggcggagaccggctccagttcaaccagctgtcccaggctgagctggatgagttggccagtaaggcaccagtcttaacttatggccaacctaaacaagccccacctgcggattttattcctgcgcatgtggcctttgacaaaaaggtactgaaatttgatgcctatttccaagaagatgttcctatgtcaactgaggaacagtataggatccgtcaggtgaacatttactattatctagaagatgacagcatgtctgtcatagagcctgttgtagaaaattctggaatccttcaaggcaagttaataaaacgccagcggctagccaagaatgaccggggtgaccattaccattggaaagacctaaatcgaggaataaacatcacaatttatggcaaaactttccgcgttgttgactgtgaccaattcacacaggtatttttagaaagccaaggaattgagttaaatccaccagagaagatggctcttgatccttacactgaactccgaaaacagcctcttcgtaagtatgtcaccccatcagactttgatcaactcaagcaatttctcacctttgacaaacaggtaagtgacataggaaccacaataggcttacttatttccaaatgtgacctacatttattggcaaaaggtttgggtagctgtattggtaactattttgaaacattacagctataattgaactgtttggacacagtactgtctttctgctttcatcaagggttacaggtacaggaatgcctacatttcatatggagatccaaagaagatcgtggagttgcggagttgttttgtgaacctcaccaaacatttaaatctcaaagcaattcctgagctacatctgcttcccaccttacgtttccaattgacaatttctttcccttaaaatgagctaatttcatagactcctttgtgaaaccataaatcgattattaggaaatttcacaaatatgcatacatgtaggttgtaatgttaaaatgtttaatttcacagaagccccactacagatgcttccttgttaaatgttatattaatattggagtccagaatgttctgagcattttccaactctgttccaaccttcctaatcctctcccttgtgagctgatgtgtataagcagatttaaatccttccctttctgtactaaagggagaaagaaaaggaagagatcaccctcagtgcttctttgctgctccttttctttagacatttaaccccttttagttcagaaaatgtaaactagcactagcatggtcttttaaggattttgttcatatcagtcatatatctgttattattttgtatttaaagattgtgtttattcccacgatttgaagaagcctagccaaaaaaaaaaaaaaaaagattgtgtttatattattgctagaagatatgtgttgatgggaccaaaaaaagactggttaataaataaaaattttttctacactaattatatataaaccatattcacatgtacctttattaatatatatataccactatgtaaagaacttcattgctcttttaatttagcttctctttcactgactaatattttggatcaaagtgagctcttcttttttggcacaaacttataatcctattatttaattctttccagctgctgacatatagtacataatttcagatgttttagtatgtttgatgaatatttcttttttttcaatttaccccatctgaaattacttcatagtctttccagctagtctttccatcgttgatacataattgccaaagtagccaagttgaactccctacttttaggattcttgagtcactactttggattcttcaaaggtccttcgattctatgcaatctgggatgatacagacagcatgtatggtgaatgtcggacctacatcattcattactatcttatggatgatacggtggaaattcgagaggtccacgaacggaatgatgggagagatcctttcccactcctaatgaaccgccagcgtgtgcccaaagttttggtggaaaatgcaaagaacttccctcagtgtgtgctagaaatctctgaccaagaagtgttggaatggtatactgctaaagacttcattgttgggaagtcactcactatccttgggagaactttcttcatttatgattgtgatccatttactcgacggtattacaaagagaagtttggaatcactgatttaccacgtattgatgtgagcaagcgggaaccacctccagtaaaacaggagttgcctccttataacggttttggactagtggaagattctgctcagaattgttttgctctcattccaaaagctccaaaaaaagacgttattaaaatgctggtgaatgataacaaggtgcttcgttatttggctgtactggaatcccccatcccagaagacaaagaccgcagatttgtcttctcttactttctagctaccgacatgatcagtatctttgagcctcctgttcgcaattctggtatcattgggggcaagtaccttggcaggactaaagttgttaaaccatactctacagtggacaaccctgtctactatggccccagtgacttcttcattggtgctgtgattgaagtgtttggtcaccggttcatcatccttgatacagacgagtatgttttgaaatacatggagagcaacgctgcccagtattcaccagaagcactcgcgtcaattcagaaccatgtccgaaagcgagaagcgcctgctccagaagcagaaagtctatcatgaacccttgtgaaatgaaatatttgaagacacagatatgaagggaccaaggaaaagctttgttcctaccccatctttcatgtacccacttcttaccctccactccccatagcaagcaaactgaaaaggatccaggcgtgcaggaattggaagcattaatagacacaattcagaagcaactgaaagatcactcatgcaaagacaacattcgtgaggcatttcaaatttatgacaaggaagcttcaggatatgtggacagagacatgttctttaaaatctgtgaatcgcttaacgtcccagtggatgactccttggttaaggagttaatcaggatgtgctctcatggagaaggcaaaattaactactataactttgttcgtgctttctcaaactgacctgctgatgagaaaatgcaagacaatttttgatactggaactatgctttgaaatacaccttacactcttcatagaggcatttacagggttcctgaagttttatttctgttttggttcttatttcactcctactgaagtcgaaactaaattggatctaataggatctaagattggtgccttatttagggtgataggggtatagcaatgtctaattttgtgtgtcaaattgacttggccacagggggcccaaatatttcctttctttctttttaaaaaaataaatttttttagagatgggatctcactctgtcatacaggctggagtgtggtggcactatcctagttctatgaagcctcagactcctgggctcaagtgatcctcccacttcaacctccccagtagctgggacaacaggctcaagccaccatgcccagctaatttttaaaattattttgtagagacaaggtcttgctaggttgcctgaacttgtctcaaactcatgagctccagaaattctcccacctcagcctccaaaagtgctgggattataggcatgagccactgtgcccagcctcagatatttcattattctgggggtttctctgaaggtatttttcgatgagataaacatttgaatcagaagactaagtaaaacagatagtcctccctaatgtgggtgggcctcctccaatcatttgaagacatgagtagaataaaaaggctgacctttccccaggtaagagaattcctcctgcctgactggcttcaaattggaacatcagccttttcttgccttcagacacaaatggaaacatcagctgttggtctggagcctgctgaccttcagactggacctaaaccatcagctctcctaagtcttaggcctttggattcagactggaattatacctttagctctcctgggtctccagcttgccaatttaccctgcagatcttgggacttgtaagccttcataattgtgtgagcaatttcttataactctctctttctctctctctacatatatatatatatatatattttatatgtacacattcatacacacacacgcttatatgtatacatatagtatgtatatgtgtatatatattatgtatatacatatatgtgcacacatctctactaaaaatagaaaaattagccaggtgtggtggcatgtgcctgtagtcccagccactcgggaggcttaaatgggagaatcacttgaaccctggaggcagaggttgcagtgagccaggaccacgccactgcactccatccagcctgggtgacagagcaagactccatctcaaaaaaaaaaaggttagaaaaatgctgcttttagagagcctggccttgagagaggaaggaaagactagttgcagttaccattctctggtgagctctgactggctttttacaaacagggcttctctttggttgaagtcagccactaagttcatctttaaacatgctatctcaaattccccgaagccacccaaaatgtggtatgaatgaggatagagttacacagaattcagactgctttgccctctcagaacttctagggaacttcccttggtgtttccttccctaacgagctcagccacttgtaaccagcttattgaaagggctgtgaatgtattatgttgattccttttctgttccaggttattatcttgggaataacccatgttttgttttgttttaccctcagtcgctcataactatttaaaacagtatctcactttcaagtacagatgctcctctacttatggggctatgtctcaataaactcacgtaagtaaaaaatatcacaagttgaaaacacatttaataaccctgataagcccattgtaaagtaggcaaataagttggaccattgaaagttggggactatctgtattttagaagttttttcagcttaaaaattaccaagctctatccta

SEQ ID NO: 306638 - DNA, 3374 bp, Homo sapiens
cgtgggagttccggatgtttagcgttaccatggatcctggaggtgcccgcgaacactgcttgtcgcctgggcaaccggagaggacgaagcaggacctaggtggcggcggtggtaccggctgcaatggtgtccaatcccgtgcatggcttgccctttcttccgggcacgtcctttaaggactctacgaaaacagccttccacagaagtcagacgctgagctacaggaacggctatgcaattgttcgacgtccaacagttgggataggcggagaccggctccagttcaaccagctgtcccaggctgagctggatgagttggccagtaaggcaccagtcttaacttatggccaacctaaacaagccccacctgcggattttattcctgcgcatgtggcctttgacaaaaaggtactgaaatttgatgcctatttccaagaagatgttcctatgtcaactgaggaacagtataggatccgtcaggtgaacatttactattatctagaagatgacagcatgtctgtcatagagcctgttgtagaaaattctggaatccttcaaggcaagttaataaaacgccagcggctagccaagaatgaccggggtgaccattaccattggaaagacctaaatcgaggaataaacatcacaatttatggcaaaactttccgcgttgttgactgtgaccaattcacacaggtatttttagaaagccaaggaattgagttaaatccaccagagaagatggctcttgatccttacactgaactccgaaaacagcctcttcgtaagtatgtcaccccatcagactttgatcaactcaagcaatttctcacctttgacaaacaggtaagtgacataggaaccacaataggcttacttatttccaaatgtgacctacatttattggcaaaaggtttgggtagctgtattggtaactattttgaaacattacagctataattgaactgtttggacacagtactgtctttctgctttcatcaagggttacaggtacaggaatgcctacatttcatatggagatccaaagaagatcgtggagttgcggagttgttttgtgaacctcaccaaacatttaaatctcaaagcaattcctgagctacatctgcttcccaccttacgtttccaattgacaatttctttcccttaaaatgagctaatttcatagactcctttgtgaaaccataaatcgattattaggaaatttcacaaatatgcatacatgtaggttgtaatgttaaaatgtttaatttcacagaagccccactacagatgcttccttgttaaatgttatattaatattggagtccagaatgttctgagcattttccaactctgttccaaccttcctaatcctctcccttgtgagctgatgtgtataagcagatttaaatccttccctttctgtactaaagggagaaagaaaaggaagagatcaccctcagtgcttctttgctgctccttttctttagacatttaaccccttttagttcagaaaatgtaaactagcactagcatggtcttttaaggattttgttcatatcagtcatatatctgttattattttgtatttaaagattgtgtttattcccacgatttgaagaagcctagccaaaaaaaaaaaaaaaaagattgtgtttatattattgctagaagatatgtgttgatgggaccaaaaaaagactggttaataaataaaaattttttctacactaattatatataaaccatattcacatgtacctttattaatatatatataccactatgtaaagaacttcattgctcttttaatttagcttctctttcactgactaatattttggatcaaagtgagctcttcttttttggcacaaacttataatcctattatttaattctttccagctgctgacatatagtacataatttcagatgttttagtatgtttgatgaatatttcttttttttcaatttaccccatctgaaattacttcatagtctttccagctagtctttccatcgttgatacataattgccaaagtagccaagttgaactccctacttttaggattcttgagtcactactttggattcttcaaaggtccttcgattctatgcaatctgggatgatacagacagcatgtatggtgaatgtcggacctacatcattcattactatcttatggatgatacggtggaaattcgagaggtccacgaacggaatgatgggagagatcctttcccactcctaatgaaccgccagcgtgtgcccaaagttttggtggaaaatgcaaagaacttccctcagtgtgtgctagaaatctctgaccaagaagtgttggaatggtatactgctaaagacttcattgttgggaagtcactcactatccttgggagaactttcttcatttatgattgtgatccatttactcgacggtattacaaagagaagtttggaatcactgatttaccacgtattgatgtgagcaagcgggaaccacctccagtaaaacaggagttgcctccttataacggttttggactagtggaagattctgctcagaattgttttgctctcattccaaaagctccaaaaaaagacgttattaaaatgctggtgaatgataacaaggtgcttcgttatttggctgtactggaatcccccatcccagaagacaaagaccgcagatttgtcttctcttactttctagctaccgacatgatcagtatctttgagcctcctgttcgcaattctggtatcattgggggcaagtaccttggcaggactaaagttgttaaaccatactctacagtggacaaccctgtctactatggccccagtgacttcttcattggtgctgtgattgaagtgtttggtcaccggttcatcatccttgatacagacgagtatgttttgaaatacatggagagcaacgctgcccagtattcaccagaagcactcgcgtcaattcagaaccatgtccgaaagcgagaagcgcctgctccagaagcagaaaggtgtgtgtttgattgctagggtttggcacactcaagatattcaggaagtaattcttgagaaaacaaatgagtaatcacattttagattttctgatttctctcaccaggtgggaattattagatataaacagaaggttccctgtgtcaatgtaatagctagtaacttagaactttttcaacttcatttgtttagcaaatacagttgacccttgaacaatgtgggagttaggggtaccagcctccctccacagctgaaaattcatgtataacttttgacaccccaaaacttaactactaatagcctactcttgactgtaagccttactgataacataaacagttgattaacacatat

SEQ ID NO: 306639 - DNA, 593 bp, Homo sapiens
  misc_feature (4)..(5): n is a, c, g, or t
gaanncctgcaaacccagcgcaactacggtcccccggtcagacccaggatggggccagaacggacaggggccgcgccgctgccgctgctgctggtgttagcgctcagtcaaggtaagcggggatttcgctctgcatcggctgcaggagggacccgcgcggcttcctggggctcgctggagggattgggcggaactagggagcgagctccgtgtgttccctcggattccacgtggactcgggctcccagccaccaggacctgcttggaaagagatacttcttcgttcccttcctgctatcccaggccttgcgtccccattaggcgcgtctcgccctgtctgttaagcaccctccaaagtcatctcagtgagtgtgtgtgtgtgtgtgtagggggttgagggaagcagggtatccaatgaagcatctcttccttcgggggagaatgtgggaactagattacagccttccaggaactgtgtggctgcttttacagaaatgaactctgcatatcttgctggggggtggttggggtgagcctgtatgtgtgtgtgttgtccgcgcgtgtgtgtcggaagagacccgaggtacgagcca

SEQ ID NO: 306640 - DNA, 7596 bp, Homo sapiens
  misc_feature (4)..(5): n is a, c, g, or t
gaanncctgcaaacccagcgcaactacggtcccccggtcagacccaggatggggccagaacggacaggggccgcgccgctgccgctgctgctggtgttagcgctcagtcaaggcattttaaattgttgtttggcctacaatgttggtctcccagaagcaaaaatattttccggtccttcaagtgaacagtttgggtatgcagtgcagcagtttataaatccaaaaggcaactggttactggttggttcaccctggagtggctttcctgagaaccgaatgggagatgtgtataaatgtcctgttgacctatccactgccacatgtgaaaaactaaatttgcaaacttcaacaagcattccaaatgttactgagatgaaaaccaacatgagcctcggcttgatcctcaccaggaacatgggaactggaggttttctcacatgtggtcctctgtgggcacagcaatgtgggaatcagtattacacaacgggtgtgtgttctgacatcagtcctgattttcagctctcagccagcttctcacctgcaactcagccctgcccttccctcatagatgttgtggttgtgtgtgatgaatcaaatagtatttatccttgggatgcagtaaagaattttttggaaaaatttgtacaaggcctggatataggccccacaaagacacaggtggggttaattcagtatgccaataatccaagagttgtgtttaacttgaacacatataaaaccaaagaagaaatgattgtagcaacatcccagacatcccaatatggtggggacctcacaaacacattcggagcaattcaatatgcaagaaaatatgcttattcagcagcttctggtgggcgacgaagtgctacgaaagtaatggtagttgtaactgacggtgaatcacatgatggttcaatgttgaaagctgtgattgatcaatgcaaccatgacaatatactgaggtttggcatagcagttcttgggtacttaaacagaaacgcccttgatactaaaaatttaataaaagaaataaaagcgatcgctagtattccaacagaaagatactttttcaatgtgtctgatgaagcagctctactagaaaaggctgggacattaggagaacaaattttcagcattgaaggtactgttcaaggaggagacaactttcagatggaaatgtcacaagtgggattcagtgcagattactcttctcaaaatgatattctgatgctgggtgcagtgggagcttttggctggagtgggaccattgtccagaagacatctcatggccatttgatctttcctaaacaagcctttgaccaaattctgcaggacagaaatcacagttcatatttaggttactctgtggctgcaatttctactggagaaagcactcactttgttgctggtgctcctcgggcaaattataccggccagatagtgctatatagtgtgaatgagaatggcaatatcacggttattcaggctcaccgaggtgaccagattggctcctattttggtagtgtgctgtgttcagttgatgtggataaagacaccattacagacgtgctcttggtaggtgcaccaatgtacatgagtgacctaaagaaagaggaaggaagagtctacctgtttactatcaaagagggcattttgggtcagcaccaatttcttgaaggccccgagggcattgaaaacactcgatttggttcagcaattgcagctctttcagacatcaacatggatggctttaatgatgtgattgttggttcaccactagaaaatcagaattctggagctgtatacatttacaatggtcatcagggcactatccgcacaaagtattcccagaaaatcttgggatccgatggagcctttaggagccatctccagtactttgggaggtccttggatggctatggagatttaaatggggattccatcaccgatgtgtctattggtgcctttggacaagtggttcaactctggtcacaaagtattgctgatgtagctatagaagcttcattcacaccagaaaaaatcactttggtcaacaagaatgctcagataattctcaaactctgcttcagtgcaaagttcagacctactaagcaaaacaatcaagtggccattgtatataacatcacacttgatgcagatggattttcatccagagtaacctccagggggttatttaaagaaaacaatgaaaggtgcctgcagaagaatatggtagtaaatcaagcacagagttgccccgagcacatcatttatatacaggagccctctgatgttgtcaactctttggatttgcgtgtggacatcagtctggaaaaccctggcactagccctgcccttgaagcctattctgagactgccaaggtcttcagtattcctttccacaaagactgtggtgaggatggactttgcatttctgatctagtcctagatgtccgacaaataccagctgctcaagaacaaccctttattgtcagcaaccaaaacaaaaggttaacattttcagtaacactgaaaaataaaagggaaagtgcatacaacactggaattgttgttgatttttcagaaaacttgttttttgcatcattctccctaccggttgatgggacagaagtaacatgccaggtggctgcatctcagaagtctgttgcctgcgatgtaggctaccctgctttaaagagagaacaacaggtgacttttactattaactttgacttcaatcttcaaaaccttcagaatcaggcgtctctcagtttccaagccttaagtgaaagccaagaagaaaacaaggctgataatttggtcaacctcaaaattcctctcctgtatgatgctgaaattcacttaacaagatctaccaacataaatttttatgaaatctcttcggatgggaatgttccttcaatcgtgcacagttttgaagatgttggtccaaaattcatcttctccctgaaggtaacaacaggaagtgttccagtaagcatggcaactgtaatcatccacatccctcagtataccaaagaaaagaacccactgatgtacctaactggggtgcaaacagacaaggctggtgacatcagttgtaatgcagatatcaatccactgaaaataggacaaacatcttcttctgtatctttcaaaagtgaaaatttcaggcacaccaaagaattgaactgcagaactgcttcctgtagtaatgttacctgctggttgaaagacgttcacatgaaaggagaatactttgttaatgtgactaccagaatttggaacgggactttcgcatcatcaacgttccagacagtacagctaacggcagctgcagaaatcaacacctataaccctgagatatatgtgattgaagataacactgttacgattcccctgatgataatgaaacctgatgagaaagccgaagtaccaacaggagttataataggaagtataattgctggaatccttttgctgttagctctggttgcaattttatggaagctcggcttcttcaaaagaaaatatgaaaagatgaccaaaaatccagatgagattgatgagaccacagagctcagtagctgaaccagcagacctacctgcagtgggaaccggcagcatcccagccagggtttgctgtttgcgtgcatggatttctttttaaatcccatattttttttatcatgtcgtaggtaaactaacctggtattttaagagaaaactgcaggtcagtttggaatgaagaaattgtggggggtgggggaggtgcggggggcaggtagggaaataatagggaaaatacctattttatatgatgggggaaaaaaagtaatctttaaactggctggcccagagtttacattctaatttgcattgtgtcagaaacatgaaatgcttccaagcatgacaacttttaaagaaaaatatgatactctcagattttaagggggaaaactgttctctttaaaatatttgtctttaaacagcaactacagaagtggaagtgcttgatatgtaagtacttccacttgtgtatattttaatgaatattgatgttaacaagaggggaaaacaaaacacaggttttttcaatttatgctgctcatccaaagttgccacagatgatacttccaagtgataattttatttataaactaggtaaaatttgttgttggttccttttagaccacggctgccccttccacaccccatcttgctctaatgatcaaaacatgcttgaataactgagcttagagtatacctcctatatgtccatttaagttaggagagggggcgatatagagactaaggcacaaaattttgtttaaaactcagaatataacatgtaaaatcccatctgctagaagcccatcctgtgccagaggaaggaaaaggaggaaatttcctttctcttttaggaggcacaacagttctcttctaggatttgtttggctgactggcagtaacctagtgaatttttgaaagatgagtaatttctttggcaaccttcctcctcccttactgaaccactctcccacctcctggtggtaccattattatagaagccctctacagcctgactttctctccagcggtccaaagttatcccctcctttacccctcatccaaagttcccactccttcaggacagctgctgtgcattagatattaggggggaaagtcatctgtttaatttacacacttgcatgaattactgtatataaactccttaacttcagggagctattttcatttagtgctaaacaagtaagaaaaataagctcgagtgaatttctaaatgttggaatgttatgggatgtaaacaatgtaaagtaagacatctcaggatttcaccagaagttacagatgaggcactggaagccaccaaattagcaggtgcaccttctgtggctgtcttgtttctgaagtacttaaacttccacaagagtgaatttgacctaggcaagtttgttcaaaaggtagatcctgagatgatttggtcagattgggataaggcccagcaatctgcattttaacaagcaccccagtcactaggatgcagatggaccacactttgagaaacaccacccatttctactttttgcaccttattttctctgttcctgagcccccacattctctaggagaaacttagaggaaaagggcacagacactacatatctaaagctttggacaagtccttgacctctataaacttcagagtcctcattataaaatgggaagactgagctggagttcagcagtgatgcttttagttttaaaagtctatgatctggacttcctataatacaaatacacaatcctccaagaatttgacttggaaaaaaatgtcaaaggaaaacaggttatctgcccatgtgcatatggacaaccttgactaccctggcctggcccgtggtggcagtccagggctatctgtactgtttacagaattactttgtagttgacaacacaaaacaaacaaaaaaggcataaaatgccagcggtttatagaaaaaacagcatggtattctccagttaggtatgccagagtccaattcttttaacagctgtgagaatttgctgcttcattccaacaaaattttatttaaaaaaaaaaaaaaaagactggagaaactagtcattagcttgataaagaatatttaacagctagtggtgctggtgtgtacctgaagctccagctacttgagagactgagacaggaagatcgcttgagcccaggagttcaagtccagcctaagcaacatagcaagaccctgtctcaaaaaaatgactatttaaaaagacaatgtggccaggcacggtggctcacacctgtaatcccaacactttgggaggctgaggccggtggatcacgaggtcaggagtttgagactagcctggccaacatggtgaaaccccatctctaataatataaaaattagctgggcgtagtagcaggtgcctgtaatcccagttactcgggaagctgaggcaggagaatcacttgaacccgggaggcagaggtttcagtgagccgagatcgcgccactgcactccagcctgggtgacagggcaagactctgtctcaaacaaacaaacaaaaaaaaagttagtactgtatatgtaaatactagcttttcaatgtgctatacaaacaattatagcacatccttccttttactctgtctcacctcctttaggtgagtacttccttaaataagtgctaaacatacatatacggaacttgaaagctttggttagccttgccttaggtaatcagcctagtttacactgtttccagggagtagttgaattactataaaccattagccacttgtctctgcaccatttatcacaccaggacagggtctctcaacctgggcgctactgtcatttggggccaggtgattcttccttgcaggggctgtcctgtaccttgtaggacagcagccctgtcctagaaggtatgtttagcgtatgtttagcagcattcctggcctctagctacccgatgccagagcatgctccccccgcagtcatgacaatcaaaaaatgtctccagacattgtcaaatgcctcctggggggcagtatttctcaagcacttttaagcaaaggtgagtattcatacaagaaatttagggggaaaaaacattgtttaaataaaagctatgtgttcctattcaacaatatttttgctttaaaagtaagtagagggcataaaagatgtcatattcaaatttccatttcataaatggtgtacagacaaggtctatagaatgtggtaaaaacttgactgcaacacaaggcttataaaatagtaagatagtaaaatagcttatgaagaaactacagagatttaaaattgtgcatgactcatttcagcagcaaaataagaactcctaactgaacagaaatttttctacctagcaatgttattcttgtaaaatagttacctattaaaactgtgaagagtaaaaaactaaagccaatttattatagtcacacaagtgattatactaaaaattattataaaggttataattttataatgtatttacctgtcctgatatatagctataacccaatatatgaaaatctcaaaaattaagacatcatcatacagaaggcaggattccttaaactgagatccctgatccatctttaatatttcaatttgcacacataaaacaatgcccttttgtgtacattcaggcatacccattttaatcaatttgaaaggttaatttaaacctctagaggtgaatgagaaacatgggggaaaagtatgaaataggtgaaaatcttaactatttctttgaactctaaagactgaaactgtagccattatgtaaataaagtttcatatgtacctgtttattttggcagattaagtcaaaatatgaatgtatatattgcataactatgttagaattgtatatattttaaagaaattgtcttggatattttcctttatacataatagataagtcttttttcaaatgtggtgtttgatgtttttgattaaatgtgttttgcctctttccacaaaaactgtaaaaataaatgcatgtttgtacaaaaa

SEQ ID NO: 306641 - DNA, 7514 bp, Homo sapiens
  misc_feature (4)..(5): n is a, c, g, or t
gaanncctgcaaacccagcgcaactacggtcccccggtcagacccaggatggggccagaacggacaggggccgcgccgctgccgctgctgctggtgttagcgctcagtcaaggcattttaaattgttgtttggcctacaatgttggtctcccagaagcaaaaatattttccggtccttcaagtgaacagtttgggtatgcagtgcagcagtttataaatccaaaaggcaactggttactggttggttcaccctggagtggctttcctgagaaccgaatgggagatgtgtataaatgtcctgttgacctatccactgccacatgtgaaaaactaaatttgcaaacttcaacaagcattccaaatgttactgagatgaaaaccaacatgagcctcggcttgatcctcaccaggaacatgggaactggaggttttctcacatgtggtcctctgtgggcacagcaatgtgggaatcagtattacacaacgggtgtgtgttctgacatcagtcctgattttcagctctcagccagcttctcacctgcaactcagccctgcccttccctcatagatgttgtggttgtgtgtgatgaatcaaatagtatttatccttgggatgcagtaaagaattttttggaaaaatttgtacaaggcctggatataggccccacaaagacacaggtggggttaattcagtatgccaataatccaagagttgtgtttaacttgaacacatataaaaccaaagaagaaatgattgtagcaacatcccagacatcccaatatggtggggacctcacaaacacattcggagcaattcaatatgcaagaaaatatgcttattcagcagcttctggtgggcgacgaagtgctacgaaagtaatggtagttgtaactgacggtgaatcacatgatggttcaatgttgaaagctgtgattgatcaatgcaaccatgacaatatactgaggtttggcatagcagttcttgggtacttaaacagaaacgcccttgatactaaaaatttaataaaagaaataaaagcgatcgctagtattccaacagaaagatactttttcaatgtgtctgatgaagcagctctactagaaaaggctgggacattaggagaacaaattttcagcattgaaggtactgttcaaggaggagacaactttcagatggaaatgtcacaagtgggattcagtgcagattactcttctcaaaatgatattctgatgctgggtgcagtgggagcttttggctggagtgggaccattgtccagaagacatctcatggccatttgatctttcctaaacaagcctttgaccaaattctgcaggacagaaatcacagttcatatttaggttactctgtggctgcaatttctactggagaaagcactcactttgttgctggtgctcctcgggcaaattataccggccagatagtgctatatagtgtgaatgagaatggcaatatcacggttattcaggctcaccgaggtgaccagattggctcctattttggtagtgtgctgtgttcagttgatgtggataaagacaccattacagacgtgctcttggtaggtgcaccaatgtacatgagtgacctaaagaaagaggaaggaagagtctacctgtttactatcaaagagggcattttgggtcagcaccaatttcttgaaggccccgagggcattgaaaacactcgatttggttcagcaattgcagctctttcagacatcaacatggatggctttaatgatgtgattgttggttcaccactagaaaatcagaattctggagctgtatacatttacaatggtcatcagggcactatccgcacaaagtattcccagaaaatcttgggatccgatggagcctttaggagccatctccagtactttgggaggtccttggatggctatggagatttaaatggggattccatcaccgatgtgtctattggtgcctttggacaagtggttcaactctggtcacaaagtattgctgatgtagctatagaagcttcattcacaccagaaaaaatcactttggtcaacaagaatgctcagataattctcaaactctgcttcagtgcaaagttcagacctactaagcaaaacaatcaagtggccattgtatataacatcacacttgatgcagatggattttcatccagagtaacctccagggggttatttaaagaaaacaatgaaaggtgcctgcagaagaatatggtagtaaatcaagcacagagttgccccgagcacatcatttatatacaggagccctctgatgttgtcaactctttggatttgcgtgtggacatcagtctggaaaaccctggcactagccctgcccttgaagcctattctgagactgccaaggtcttcagtattcctttccacaaagactgtggtgaggatggactttgcatttctgatctagtcctagatgtccgacaaataccagctgctcaagaacaaccctttattgtcagcaaccaaaacaaaaggttaacattttcagtaacactgaaaaataaaagggaaagtgcatacaacactggaattgttgttgatttttcagaaaacttgttttttgcatcattctccctaccggttgatgggacagaagtaacatgccaggtggctgcatctcagaagtctgttgcctgcgatgtaggctaccctgctttaaagagagaacaacaggtgacttttactattaactttgacttcaatcttcaaaaccttcagaatcaggcgtctctcagtttccaagccttaagtgaaagccaagaagaaaacaaggctgataatttggtcaacctcaaaattcctctcctgtatgatgctgaaattcacttaacaagatctaccaacataaatttttatgaaatctcttcggatgggaatgttccttcaatcgtgcacagttttgaagatgttggtccaaaattcatcttctccctgaaggtaacaacaggaagtgttccagtaagcatggcaactgtaatcatccacatccctcagtataccaaagaaaagaacccactgatgtacctaactggggtgcaaacagacaaggctggtgacatcagttgtaatgcagatatcaatccactgaaaataggacaaacatcttcttctgtatctttcaaaagtgaaaatttcaggcacaccaaagaattgaactgcagaactgcttcctgtagtaatgttacctgctggttgaaagacgttcacatgaaaggagaatactttgttaatgtgactaccagaatttggaacgggactttcgcatcatcaacgttccagacagtacagctaacggcagctgcagaaatcaacacctataaccctgagatatatgtgattgaagataacactgttacgattcccctgatgataatgaaacctgatgagaaagccgaagtaccaacaggagttataataggaagtataattgctggaatccttttgctgttagctctggttgcaattttatggaagctcggcttcttcaaaagaaaatatgaaaagatgaccaaaaatccagatgagattgatgagaccacagagctcagtagctgaaccagcagacctacctgcagtgggaaccggcagcatcccagccagggtttgctgtttgcgtgcatggatttctttttaaatcccatattttttttatcatgtcgtaggtaaactaacctggtattttaagagaaaactgcaggtcagtttggaatgaagaaattgtggggggtgggggaggtgcggggggcaggtagggaaataatagggaaaatacctattttatatgatgggggaaaaaaagtaatctttaaactggctggcccagagtttacattctaatttgcattgtgtcagaaacatgaaatgcttccaagcatgacaacttttaaagaaaaatatgatactctcagattttaagggggaaaactgttctctttaaaatatttgtctttaaacagcaactacagaagtggaagtgcttgatatgtaagtacttccacttgtgtatattttaatgaatattgatgttaacaagaggggaaaacaaaacacaggttttttcaatttatgctgctcatccaaagttgccacagatgatacttccaagtgataattttatttataaactaggtaaaatttgttgttggttccttttagaccacggctgccccttccacaccccatcttgctctaatgatcaaaacatgcttgaataactgagcttagagtatacctcctatatgtccatttaagttaggagagggggcgatatagagactaaggcacaaaattttgtttaaaactcagaatataacatgtaaaatcccatctgctagaagcccatcctgtgccagaggaaggaaaaggaggaaatttcctttctcttttaggaggcacaacagttctcttctaggatttgtttggctgactggcagtaacctagtgaatttttgaaagatgagtaatttctttggcaaccttcctcctcccttactgaaccactctcccacctcctggtggtaccattattatagaagccctctacagcctgactttctctccagcggtccaaagttatcccctcctttacccctcatccaaagttcccactccttcaggacagctgctgtgcattagatattaggggggaaagtcatctgtttaatttacacacttgcatgaattactgtatataaactccttaacttcagggagctattttcatttagtgctaaacaagtaagaaaaataagctcgagtgaatttctaaatgttggaatgttatgggatgtaaacaatgtaaagtaagacatctcaggatttcaccagaagttacagatgaggcactggaagccaccaaattagcaggtgcaccttctgtggctgtcttgtttctgaagtacttaaacttccacaagagtgaatttgacctaggcaagtttgttcaaaaggtagatcctgagatgatttggtcagattgggataaggcccagcaatctgcattttaacaagcaccccagtcactaggatgcagatggaccacactttgagaaacaccacccatttctactttttgcaccttattttctctgttcctgagcccccacattctctaggagaaacttagaggaaaagggcacagacactacatatctaaagctttggacaagtccttgacctctataaacttcagagtcctcattataaaatgggaagactgagctggagttcagcagtgatgcttttagttttaaaagtctatgatctggacttcctataatacaaatacacaatcctccaagaatttgacttggaaaaaaatgtcaaaggaaaacaggttatctgcccatgtgcatatggacaaccttgactaccctggcctggcccgtggtggcagtccagggctatctgtactgtttacagaattactttgtagttgacaacacaaaacaaacaaaaaaggcataaaatgccagcggtttatagaaaaaacagcatggtattctccagttaggtatgccagagtccaattcttttaacagctgtgagaatttgctgcttcattccaacaaaattttatttaaaaaaaaaaaaaaaagactggagaaactagtcattagcttgataaagaatatttaacagctagtggtgctggtgtgtacctgaagctccagctacttgagagactgagacaggaagatcgcttgagcccaggagttcaagtccagcctaagcaacatagcaagaccctgtctcaaaaaaatgactatttaaaaagacaatgtggccaggcacggtggctcacacctgtaatcccaacactttgggaggctgaggccggtggatcacgaggtcaggagtttgagactagcctggccaacatggtgaaaccccatctctaataatataaaaattagctgggcgtagtagcaggtgcctgtaatcccagttactcgggaagctgaggcaggagaatcacttgaacccgggaggcagaggtttcagtgagccgagatcgcgccactgcactccagcctgggtgacagggcaagactctgtctcaaacaaacaaacaaaaaaaaagttagtactgtatatgtaaatactagcttttcaatgtgctatacaaacaattatagcacatccttccttttactctgtctcacctcctttaggtgagtacttccttaaataagtgctaaacatacatatacggaacttgaaagctttggttagccttgccttaggtaatcagcctagtttacactgtttccagggagtagttgaattactataaaccattagccacttgtctctgcaccatttatcacaccaggacagggtctctcaacctgggcgctactgtcatttggggccaggtgattcttccttgcaggggctgtcctgtaccttgtaggacagcagccctgtcctagaaggtatgtttagcgtatgtttagcagcattcctggcctctagctacccgatgccagagcatgctccccccgcagtcatgacaatcaaaaaatgtctccagacattgtcaaatgcctcctggggggcagtatttctcaagcacttttaagcaaaggtgagtattcatacaagaaatttagggggaaaaaacattgtttaaataaaagctatgtgttcctattcaacaatatttttgctttaaaagtaagtagagggcataaaagatgtcatattcaaatttccatttcataaatggtgtacagacaaggtctatagaatgtggtaaaaacttgactgcaacacaaggcttataaaatagtaagatagtaaaatagcttatgaagaaactacagagatttaaaattgtgcatgactcatttcagcagcaaaataagaactcctaactgaacagaaatttttctacctagcaatgttattcttgtaaaatagttacctattaaaactgtgaagagtaaaaaactaaagccaatttattatagtcacacaagtgattatactaaaaattattataaaggttataattttataatgtatttacctgtcctgatatatagctataacccaatatatgaaaatctcaaaaattaagacatcatcatacagaaggcaggattccttaaactgagatccctgatccatctttaatatttcaatttgcacacataaaacaatgcccttttgtgtacattcaggcatacccattttaatcaatttgaaaggttaatttaaacctctagaggtgaatgagaaacatgggggaaaagtatgaaataggtgaaaatcttaactatttctttgaactctaaagactgaaactgtagccattatgtaaataaagtttcatatgtacctgtttattttggcagattaagtcaaaatatgaatgtatatattgcataactatgttagaattgtatatattttaaagaaattgtcttggatattttcctttatacataatagataagtcttttttcaaa

SEQ ID NO: 306642 - DNA, 7621 bp, Homo sapiens
  misc_feature (4)..(5): n is a, c, g, or t
gaanncctgcaaacccagcgcaactacggtcccccggtcagacccaggatggggccagaacggacaggggccgcgccgctgccgctgctgctggtgttagcgctcagtcaaggcattttaaattgttgtttggcctacaatgttggtctcccagaagcaaaaatattttccggtccttcaagtgaacagtttgggtatgcagtgcagcagtttataaatccaaaaggcaactggttactggttggttcaccctggagtggctttcctgagaaccgaatgggagatgtgtataaatgtcctgttgacctatccactgccacatgtgaaaaactaaatttgcaaacttcaacaagcattccaaatgttactgagatgaaaaccaacatgagcctcggcttgatcctcaccaggaacatgggaactggaggttttctcacatgtggtcctctgtgggcacagcaatgtgggaatcagtattacacaacgggtgtgtgttctgacatcagtcctgattttcagctctcagccagcttctcacctgcaactcagccctgcccttccctcatagatgttgtggttgtgtgtgatgaatcaaatagtatttatccttgggatgcagtaaagaattttttggaaaaatttgtacaaggcctggatataggccccacaaagacacaggtggggttaattcagtatgccaataatccaagagttgtgtttaacttgaacacatataaaaccaaagaagaaatgattgtagcaacatcccagacatcccaatatggtggggacctcacaaacacattcggagcaattcaatatgcaagaaaatatgcttattcagcagcttctggtgggcgacgaagtgctacgaaagtaatggtagttgtaactgacggtgaatcacatgatggttcaatgttgaaagctgtgattgatcaatgcaaccatgacaatatactgaggtttggcatagcagttcttgggtacttaaacagaaacgcccttgatactaaaaatttaataaaagaaataaaagcgatcgctagtattccaacagaaagatactttttcaatgtgtctgatgaagcagctctactagaaaaggctgggacattaggagaacaaattttcagcattgaaggtactgttcaaggaggagacaactttcagatggaaatgtcacaagtgggattcagtgcagattactcttctcaaaatgatattctgatgctgggtgcagtgggagcttttggctggagtgggaccattgtccagaagacatctcatggccatttgatctttcctaaacaagcctttgaccaaattctgcaggacagaaatcacagttcatatttaggttactctgtggctgcaatttctactggagaaagcactcactttgttgctggtgctcctcgggcaaattataccggccagatagtgctatatagtgtgaatgagaatggcaatatcacggttattcaggctcaccgaggtgaccagattggctcctattttggtagtgtgctgtgttcagttgatgtggataaagacaccattacagacgtgctcttggtaggtgcaccaatgtacatgagtgacctaaagaaagaggaaggaagagtctacctgtttactatcaaagagggcattttgggtcagcaccaatttcttgaaggccccgagggcattgaaaacactcgatttggttcagcaattgcagctctttcagacatcaacatggatggctttaatgatgtgattgttggttcaccactagaaaatcagaattctggagctgtatacatttacaatggtcatcagggcactatccgcacaaagtattcccagaaaatcttgggatccgatggagcctttaggagccatctccagtactttgggaggtccttggatggctatggagatttaaatggggattccatcaccgatgtgtctattggtgcctttggacaagtggttcaactctggtcacaaagtattgctgatgtagctatagaagcttcattcacaccagaaaaaatcactttggtcaacaagaatgctcagataattctcaaactctgcttcagtgcaaagttcagacctactaagcaaaacaatcaagtggccattgtatataacatcacacttgatgcagatggattttcatccagagtaacctccagggggttatttaaagaaaacaatgaaaggtgcctgcagaagaatatggtagtaaatcaagcacagagttgccccgagcacatcatttatatacaggagccctctgatgttgtcaactctttggatttgcgtgtggacatcagtctggaaaaccctggcactagccctgcccttgaagcctattctgagactgccaaggtcttcagtattcctttccacaaagactgtggtgaggatggactttgcatttctgatctagtcctagatgtccgacaaataccagctgctcaagaacaaccctttattgtcagcaaccaaaacaaaaggttaacattttcagtaacactgaaaaataaaagggaaagtgcatacaacactggaattgttgttgatttttcagaaaacttgttttttgcatcattctccctaccggttgatgggacagaagtaacatgccaggtggctgcatctcagaagtctgttgcctgcgatgtaggctaccctgctttaaagagagaacaacaggtgacttttactattaactttgacttcaatcttcaaaaccttcagaatcaggcgtctctcagtttccaagccttaagtgaaagccaagaagaaaacaaggctgataatttggtcaacctcaaaattcctctcctgtatgatgctgaaattcacttaacaagatctaccaacataaatttttatgaaatctcttcggatgggaatgttccttcaatcgtgcacagttttgaagatgttggtccaaaattcatcttctccctgaaggtaacaacaggaagtgttccagtaagcatggcaactgtaatcatccacatccctcagtataccaaagaaaagaacccactgatgtacctaactggggtgcaaacagacaaggctggtgacatcagttgtaatgcagatatcaatccactgaaaataggacaaacatcttcttctgtatctttcaaaagtgaaaatttcaggcacaccaaagaattgaactgcagaactgcttcctgtagtaatgttacctgctggttgaaagacgttcacatgaaaggagaatactttgttaatgtgactaccagaatttggaacgggactttcgcatcatcaacgttccagacagtacagctaacggcagctgcagaaatcaacacctataaccctgagatatatgtgattgaagataacactgttacgattcccctgatgataatgaaacctgatgagaaagccgaagtaccaacaggagttataataggaagtataattgctggaatccttttgctgttagctctggttgcaattttatggaagctcggcttcttcaaaagaaaatatgaaaagatgaccaaaaatccagatgagattgatgagaccacagagctcagtagctgaaccagcagacctacctgcagtgggaaccggcagcatcccagccagggtttgctgtttgcgtgcatggatttctttttaaatcccatattttttttatcatgtcgtaggtaaactaacctggtattttaagagaaaactgcaggtcagtttggaatgaagaaattgtggggggtgggggaggtgcggggggcaggtagggaaataatagggaaaatacctattttatatgatgggggaaaaaaagtaatctttaaactggctggcccagagtttacattctaatttgcattgtgtcagaaacatgaaatgcttccaagcatgacaacttttaaagaaaaatatgatactctcagattttaagggggaaaactgttctctttaaaatatttgtctttaaacagcaactacagaagtggaagtgcttgatatgtaagtacttccacttgtgtatattttaatgaatattgatgttaacaagaggggaaaacaaaacacaggttttttcaatttatgctgctcatccaaagttgccacagatgatacttccaagtgataattttatttataaactaggtaaaatttgttgttggttccttttagaccacggctgccccttccacaccccatcttgctctaatgatcaaaacatgcttgaataactgagcttagagtatacctcctatatgtccatttaagttaggagagggggcgatatagagactaaggcacaaaattttgtttaaaactcagaatataacatgtaaaatcccatctgctagaagcccatcctgtgccagaggaaggaaaaggaggaaatttcctttctcttttaggaggcacaacagttctcttctaggatttgtttggctgactggcagtaacctagtgaatttttgaaagatgagtaatttctttggcaaccttcctcctcccttactgaaccactctcccacctcctggtggtaccattattatagaagccctctacagcctgactttctctccagcggtccaaagttatcccctcctttacccctcatccaaagttcccactccttcaggacagctgctgtgcattagatattaggggggaaagtcatctgtttaatttacacacttgcatgaattactgtatataaactccttaacttcagggagctattttcatttagtgctaaacaagtaagaaaaataagctcgagtgaatttctaaatgttggaatgttatgggatgtaaacaatgtaaagtaagacatctcaggatttcaccagaagttacagatgaggcactggaagccaccaaattagcaggtgcaccttctgtggctgtcttgtttctgaagtacttaaacttccacaagagtgaatttgacctaggcaagtttgttcaaaaggtagatcctgagatgatttggtcagattgggataaggcccagcaatctgcattttaacaagcaccccagtcactaggatgcagatggaccacactttgagaaacaccacccatttctactttttgcaccttattttctctgttcctgagcccccacattctctaggagaaacttagaggaaaagggcacagacactacatatctaaagctttggacaagtccttgacctctataaacttcagagtcctcattataaaatgggaagactgagctggagttcagcagtgatgcttttagttttaaaagtctatgatctggacttcctataatacaaatacacaatcctccaagaatttgacttggaaaaaaatgtcaaaggaaaacaggttatctgcccatgtgcatatggacaaccttgactaccctggcctggcccgtggtggcagtccagggctatctgtactgtttacagaattactttgtagttgacaacacaaaacaaacaaaaaaggcataaaatgccagcggtttatagaaaaaacagcatggtattctccagttaggtatgccagagtccaattcttttaacagctgtgagaatttgctgcttcattccaacaaaattttatttaaaaaaaaaaaaaaaagactggagaaactagtcattagcttgataaagaatatttaacagctagtggtgctggtgtgtacctgaagctccagctacttgagagactgagacaggaagatcgcttgagcccaggagttcaagtccagcctaagcaacatagcaagaccctgtctcaaaaaaatgactatttaaaaagacaatgtggccaggcacggtggctcacacctgtaatcccaacactttgggaggctgaggccggtggatcacgaggtcaggagtttgagactagcctggccaacatggtgaaaccccatctctaataatataaaaattagctgggcgtagtagcaggtgcctgtaatcccagttactcgggaagctgaggcaggagaatcacttgaacccgggaggcagaggtttcagtgagccgagatcgcgccactgcactccagcctgggtgacagggcaagactctgtctcaaacaaacaaacaaaaaaaaagttagtactgtatatgtaaatactagcttttcaatgtgctatacaaacaattatagcacatccttccttttactctgtctcacctcctttaggtgagtacttccttaaataagtgctaaacatacatatacggaacttgaaagctttggttagccttgccttaggtaatcagcctagtttacactgtttccagggagtagttgaattactataaaccattagccacttgtctctgcaccatttatcacaccaggacagggtctctcaacctgggcgctactgtcatttggggccaggtgattcttccttgcaggggctgtcctgtaccttgtaggacagcagccctgtcctagaaggtatgtttagcgtatgtttagcagcattcctggcctctagctacccgatgccagagcatgctccccccgcagtcatgacaatcaaaaaatgtctccagacattgtcaaatgcctcctggggggcagtatttctcaagcacttttaagcaaaggtgagtattcatacaagaaatttagggggaaaaaacattgtttaaataaaagctatgtgttcctattcaacaatatttttgctttaaaagtaagtagagggcataaaagatgtcatattcaaatttccatttcataaatggtgtacagacaaggtctatagaatgtggtaaaaacttgactgcaacacaaggcttataaaatagtaagatagtaaaatagcttatgaagaaactacagagatttaaaattgtgcatgactcatttcagcagcaaaataagaactcctaactgaacagaaatttttctacctagcaatgttattcttgtaaaatagttacctattaaaactgtgaagagtaaaaaactaaagccaatttattatagtcacacaagtgattatactaaaaattattataaaggttataattttataatgtatttacctgtcctgatatatagctataacccaatatatgaaaatctcaaaaattaagacatcatcatacagaaggcaggattccttaaactgagatccctgatccatctttaatatttcaatttgcacacataaaacaattatataaacaactttgtaggactatgcccttttgtgtacattcaggcatacccattttaatcaatttgaaaggttaatttaaacctctagaggtgaatgagaaacatgggggaaaagtatgaaataggtgaaaatcttaactatttctttgaactctaaagactgaaactgtagccattatgtaaataaagtttcatatgtacctgtttattttggcagattaagtcaaaatatgaatgtatatattgcataactatgttagaattgtatatattttaaagaaattgtcttggatattttcctttatacataatagataagtcttttttcaaatgtggtgtttgatgtttttgattaaatgtgttttgcctctttccacaaaaactgtaaaaataaatgcatgtttgtacaaaaa

SEQ ID NO: 306643 - DNA, 7542 bp, Homo sapiens
  misc_feature (4)..(5): n is a, c, g, or t
gaanncctgcaaacccagcgcaactacggtcccccggtcagacccaggatggggccagaacggacaggggccgcgccgctgccgctgctgctggtgttagcgctcagtcaaggcattttaaattgttgtttggcctacaatgttggtctcccagaagcaaaaatattttccggtccttcaagtgaacagtttgggtatgcagtgcagcagtttataaatccaaaaggcaactggttactggttggttcaccctggagtggctttcctgagaaccgaatgggagatgtgtataaatgtcctgttgacctatccactgccacatgtgaaaaactaaatttgcaaacttcaacaagcattccaaatgttactgagatgaaaaccaacatgagcctcggcttgatcctcaccaggaacatgggaactggaggttttctcacatgtggtcctctgtgggcacagcaatgtgggaatcagtattacacaacgggtgtgtgttctgacatcagtcctgattttcagctctcagccagcttctcacctgcaactcagccctgcccttccctcatagatgttgtggttgtgtgtgatgaatcaaatagtatttatccttgggatgcagtaaagaattttttggaaaaatttgtacaaggcctggatataggccccacaaagacacaggtggggttaattcagtatgccaataatccaagagttgtgtttaacttgaacacatataaaaccaaagaagaaatgattgtagcaacatcccagacatcccaatatggtggggacctcacaaacacattcggagcaattcaatatgcaagaaaatatgcttattcagcagcttctggtgggcgacgaagtgctacgaaagtaatggtagttgtaactgacggtgaatcacatgatggttcaatgttgaaagctgtgattgatcaatgcaaccatgacaatatactgaggtttggcatagcagttcttgggtacttaaacagaaacgcccttgatactaaaaatttaataaaagaaataaaagcgatcgctagtattccaacagaaagatactttttcaatgtgtctgatgaagcagctctactagaaaaggctgggacattaggagaacaaattttcagcattgaaggtactgttcaaggaggagacaactttcagatggaaatgtcacaagtgggattcagtgcagattactcttctcaaaatgatattctgatgctgggtgcagtgggagcttttggctggagtgggaccattgtccagaagacatctcatggccatttgatctttcctaaacaagcctttgaccaaattctgcaggacagaaatcacagttcatatttaggttactctgtggctgcaatttctactggagaaagcactcactttgttgctggtgctcctcgggcaaattataccggccagatagtgctatatagtgtgaatgagaatggcaatatcacggttattcaggctcaccgaggtgaccagattggctcctattttggtagtgtgctgtgttcagttgatgtggataaagacaccattacagacgtgctcttggtaggtgcaccaatgtacatgagtgacctaaagaaagaggaaggaagagtctacctgtttactatcaaagagggcattttgggtcagcaccaatttcttgaaggccccgagggcattgaaaacactcgatttggttcagcaattgcagctctttcagacatcaacatggatggctttaatgatgtgattgttggttcaccactagaaaatcagaattctggagctgtatacatttacaatggtcatcagggcactatccgcacaaagtattcccagaaaatcttgggatccgatggagcctttaggagccatctccagtactttgggaggtccttggatggctatggagatttaaatggggattccatcaccgatgtgtctattggtgcctttggacaagtggttcaactctggtcacaaagtattgctgatgtagctatagaagcttcattcacaccagaaaaaatcactttggtcaacaagaatgctcagataattctcaaactctgcttcagtgcaaagttcagacctactaagcaaaacaatcaagtggccattgtatataacatcacacttgatgcagatggattttcatccagagtaacctccagggggttatttaaagaaaacaatgaaaggtgcctgcagaagaatatggtagtaaatcaagcacagagttgccccgagcacatcatttatatacaggagccctctgatgttgtcaactctttggatttgcgtgtggacatcagtctggaaaaccctggcactagccctgcccttgaagcctattctgagactgccaaggtcttcagtattcctttccacaaagactgtggtgaggatggactttgcatttctgatctagtcctagatgtccgacaaataccagctgctcaagaacaaccctttattgtcagcaaccaaaacaaaaggttaacattttcagtaacactgaaaaataaaagggaaagtgcatacaacactggaattgttgttgatttttcagaaaacttgttttttgcatcattctccctaccggttgatgggacagaagtaacatgccaggtggctgcatctcagaagtctgttgcctgcgatgtaggctaccctgctttaaagagagaacaacaggtgacttttactattaactttgacttcaatcttcaaaaccttcagaatcaggcgtctctcagtttccaagccttaagtgaaagccaagaagaaaacaaggctgataatttggtcaacctcaaaattcctctcctgtatgatgctgaaattcacttaacaagatctaccaacataaatttttatgaaatctcttcggatgggaatgttccttcaatcgtgcacagttttgaagatgttggtccaaaattcatcttctccctgaaggtaacaacaggaagtgttccagtaagcatggcaactgtaatcatccacatccctcagtataccaaagaaaagaacccactgatgtacctaactggggtgcaaacagacaaggctggtgacatcagttgtaatgcagatatcaatccactgaaaataggacaaacatcttcttctgtatctttcaaaagtgaaaatttcaggcacaccaaagaattgaactgcagaactgcttcctgtagtaatgttacctgctggttgaaagacgttcacatgaaaggagaatactttgttaatgtgactaccagaatttggaacgggactttcgcatcatcaacgttccagacagtacagctaacggcagctgcagaaatcaacacctataaccctgagatatatgtgattgaagataacactgttacgattcccctgatgataatgaaacctgatgagaaagccgaagtaccaacaggagttataataggaagtataattgctggaatccttttgctgttagctctggttgcaattttatggaagctcggcttcttcaaaagaaaatatgaaaagatgaccaaaaatccagatgagattgatgagaccacagagctcagtagctgaaccagcagacctacctgcagtgggaaccggcagcatcccagccagggtttgctgtttgcgtgcatggatttctttttaaatcccatattttttttatcatgtcgtaggtaaactaacctggtattttaagagaaaactgcaggtcagtttggaatgaagaaattgtggggggtgggggaggtgcggggggcaggtagggaaataatagggaaaatacctattttatatgatgggggaaaaaaagtaatctttaaactggctggcccagagtttacattctaatttgcattgtgtcagaaacatgaaatgcttccaagcatgacaacttttaaagaaaaatatgatactctcagattttaagggggaaaactgttctctttaaaatatttgtctttaaacagcaactacagaagtggaagtgcttgatatgtaagtacttccacttgtgtatattttaatgaatattgatgttaacaagaggggaaaacaaaacacaggttttttcaatttatgctgctcatccaaagttgccacagatgatacttccaagtgataattttatttataaactaggtaaaatttgttgttggttccttttagaccacggctgccccttccacaccccatcttgctctaatgatcaaaacatgcttgaataactgagcttagagtatacctcctatatgtccatttaagttaggagagggggcgatatagagactaaggcacaaaattttgtttaaaactcagaatataacatgtaaaatcccatctgctagaagcccatcctgtgccagaggaaggtttgtttggctgactggcagtaacctagtgaatttttgaaagatgagtaatttctttggcaaccttcctcctcccttactgaaccactctcccacctcctggtggtaccattattatagaagccctctacagcctgactttctctccagcggtccaaagttatcccctcctttacccctcatccaaagttcccactccttcaggacagctgctgtgcattagatattaggggggaaagtcatctgtttaatttacacacttgcatgaattactgtatataaactccttaacttcagggagctattttcatttagtgctaaacaagtaagaaaaataagctcgagtgaatttctaaatgttggaatgttatgggatgtaaacaatgtaaagtaagacatctcaggatttcaccagaagttacagatgaggcactggaagccaccaaattagcaggtgcaccttctgtggctgtcttgtttctgaagtacttaaacttccacaagagtgaatttgacctaggcaagtttgttcaaaaggtagatcctgagatgatttggtcagattgggataaggcccagcaatctgcattttaacaagcaccccagtcactaggatgcagatggaccacactttgagaaacaccacccatttctactttttgcaccttattttctctgttcctgagcccccacattctctaggagaaacttagaggaaaagggcacagacactacatatctaaagctttggacaagtccttgacctctataaacttcagagtcctcattataaaatgggaagactgagctggagttcagcagtgatgcttttagttttaaaagtctatgatctggacttcctataatacaaatacacaatcctccaagaatttgacttggaaaaaaatgtcaaaggaaaacaggttatctgcccatgtgcatatggacaaccttgactaccctggcctggcccgtggtggcagtccagggctatctgtactgtttacagaattactttgtagttgacaacacaaaacaaacaaaaaaggcataaaatgccagcggtttatagaaaaaacagcatggtattctccagttaggtatgccagagtccaattcttttaacagctgtgagaatttgctgcttcattccaacaaaattttatttaaaaaaaaaaaaaaaagactggagaaactagtcattagcttgataaagaatatttaacagctagtggtgctggtgtgtacctgaagctccagctacttgagagactgagacaggaagatcgcttgagcccaggagttcaagtccagcctaagcaacatagcaagaccctgtctcaaaaaaatgactatttaaaaagacaatgtggccaggcacggtggctcacacctgtaatcccaacactttgggaggctgaggccggtggatcacgaggtcaggagtttgagactagcctggccaacatggtgaaaccccatctctaataatataaaaattagctgggcgtagtagcaggtgcctgtaatcccagttactcgggaagctgaggcaggagaatcacttgaacccgggaggcagaggtttcagtgagccgagatcgcgccactgcactccagcctgggtgacagggcaagactctgtctcaaacaaacaaacaaaaaaaaagttagtactgtatatgtaaatactagcttttcaatgtgctatacaaacaattatagcacatccttccttttactctgtctcacctcctttaggtgagtacttccttaaataagtgctaaacatacatatacggaacttgaaagctttggttagccttgccttaggtaatcagcctagtttacactgtttccagggagtagttgaattactataaaccattagccacttgtctctgcaccatttatcacaccaggacagggtctctcaacctgggcgctactgtcatttggggccaggtgattcttccttgcaggggctgtcctgtaccttgtaggacagcagccctgtcctagaaggtatgtttagcgtatgtttagcagcattcctggcctctagctacccgatgccagagcatgctccccccgcagtcatgacaatcaaaaaatgtctccagacattgtcaaatgcctcctggggggcagtatttctcaagcacttttaagcaaaggtgagtattcatacaagaaatttagggggaaaaaacattgtttaaataaaagctatgtgttcctattcaacaatatttttgctttaaaagtaagtagagggcataaaagatgtcatattcaaatttccatttcataaatggtgtacagacaaggtctatagaatgtggtaaaaacttgactgcaacacaaggcttataaaatagtaagatagtaaaatagcttatgaagaaactacagagatttaaaattgtgcatgactcatttcagcagcaaaataagaactcctaactgaacagaaatttttctacctagcaatgttattcttgtaaaatagttacctattaaaactgtgaagagtaaaaaactaaagccaatttattatagtcacacaagtgattatactaaaaattattataaaggttataattttataatgtatttacctgtcctgatatatagctataacccaatatatgaaaatctcaaaaattaagacatcatcatacagaaggcaggattccttaaactgagatccctgatccatctttaatatttcaatttgcacacataaaacaatgcccttttgtgtacattcaggcatacccattttaatcaatttgaaaggttaatttaaacctctagaggtgaatgagaaacatgggggaaaagtatgaaataggtgaaaatcttaactatttctttgaactctaaagactgaaactgtagccattatgtaaataaagtttcatatgtacctgtttattttggcagattaagtcaaaatatgaatgtatatattgcataactatgttagaattgtatatattttaaagaaattgtcttggatattttcctttatacataatagataagtcttttttcaaatgtggtgtttgatgtttttgattaaatgtgttttgcctctttccacaaaaactgtaaaaataaatgcatgtttgtacaaaaa

SEQ ID NO: 306644 - DNA, 4901 bp, Homo sapiens
  misc_feature (4)..(5): n is a, c, g, or t
gaanncctgcaaacccagcgcaactacggtcccccggtcagacccaggatggggccagaacggacaggggccgcgccgctgccgctgctgctggtgttagcgctcagtcaaggcattttaaattgttgtttggcctacaatgttggtctcccagaagcaaaaatattttccggtccttcaagtgaacagtttgggtatgcagtgcagcagtttataaatccaaaaggcaactggttactggttggttcaccctggagtggctttcctgagaaccgaatgggagatgtgtataaatgtcctgttgacctatccactgccacatgtgaaaaactaaatttgcaaacttcaacaagcattccaaatgttactgagatgaaaaccaacatgagcctcggcttgatcctcaccaggaacatgggaactggaggttttctcacatgtggtcctctgtgggcacagcaatgtgggaatcagtattacacaacgggtgtgtgttctgacatcagtcctgattttcagctctcagccagcttctcacctgcaactcagccctgcccttccctcatagatgttgtggttgtgtgtgatgaatcaaatagtatttatccttgggatgcagtaaagaattttttggaaaaatttgtacaaggcctggatataggccccacaaagacacaggtggggttaattcagtatgccaataatccaagagttgtgtttaacttgaacacatataaaaccaaagaagaaatgattgtagcaacatcccagacatcccaatatggtggggacctcacaaacacattcggagcaattcaatatgcaagaaaatatgcttattcagcagcttctggtgggcgacgaagtgctacgaaagtaatggtagttgtaactgacggtgaatcacatgatggttcaatgttgaaagctgtgattgatcaatgcaaccatgacaatatactgaggtttggcatagcagttcttgggtacttaaacagaaacgcccttgatactaaaaatttaataaaagaaataaaagcgatcgctagtattccaacagaaagatactttttcaatgtgtctgatgaagcagctctactagaaaaggctgggacattaggagaacaaattttcagcattgaaggtactgttcaaggaggagacaactttcagatggaaatgtcacaagtgggattcagtgcagattactcttctcaaaatgatattctgatgctgggtgcagtgggagcttttggctggagtgggaccattgtccagaagacatctcatggccatttgatctttcctaaacaagcctttgaccaaattctgcaggacagaaatcacagttcatatttaggttactctgtggctgcaatttctactggagaaagcactcactttgttgctggtgctcctcgggcaaattataccggccagatagtgctatatagtgtgaatgagaatggcaatatcacggttattcaggctcaccgaggtgaccagattggctcctattttggtagtgtgctgtgttcagttgatgtggataaagacaccattacagacgtgctcttggtaggtgcaccaatgtacatgagtgacctaaagaaagaggaaggaagagtctacctgtttactatcaaagagggcattttgggtcagcaccaatttcttgaaggccccgagggcattgaaaacactcgatttggttcagcaattgcagctctttcagacatcaacatggatggctttaatgatgtgattgttggttcaccactagaaaatcagaattctggagctgtatacatttacaatggtcatcagggcactatccgcacaaagtattcccagaaaatcttgggatccgatggagcctttaggagccatctccagtactttgggaggtccttggatggctatggagatttaaatggggattccatcaccgatgtgtctattggtgcctttggacaagtggttcaactctggtcacaaagtattgctgatgtagctatagaagcttcattcacaccagaaaaaatcactttggtcaacaagaatgctcagataattctcaaactctgcttcagtgcaaagttcagacctactaagcaaaacaatcaagtggccattgtatataacatcacacttgatgcagatggattttcatccagagtaacctccagggggttatttaaagaaaacaatgaaaggtgcctgcagaagaatatggtagtaaatcaagcacagagttgccccgagcacatcatttatatacaggagccctctgatgttgtcaactctttggatttgcgtgtggacatcagtctggaaaaccctggcactagccctgcccttgaagcctattctgagactgccaaggtcttcagtattcctttccacaaagactgtggtgaggatggactttgcatttctgatctagtcctagatgtccgacaaataccagctgctcaagaacaaccctttattgtcagcaaccaaaacaaaaggttaacattttcagtaacactgaaaaataaaagggaaagtgcatacaacactggaattgttgttgatttttcagaaaacttgttttttgcatcattctccctaccggttgatgggacagaagtaacatgccaggtggctgcatctcagaagtctgttgcctgcgatgtaggctaccctgctttaaagagagaacaacaggtgacttttactattaactttgacttcaatcttcaaaaccttcagaatcaggcgtctctcagtttccaagccttaagtgaaagccaagaagaaaacaaggctgataatttggtcaacctcaaaattcctctcctgtatgatgctgaaattcacttaacaagatctaccaacataaatttttatgaaatctcttcggatgggaatgttccttcaatcgtgcacagttttgaagatgttggtccaaaattcatcttctccctgaaggtaacaacaggaagtgttccagtaagcatggcaactgtaatcatccacatccctcagtataccaaagaaaagaacccactgatgtacctaactggggtgcaaacagacaaggctggtgacatcagttgtaatgcagatatcaatccactgaaaataggacaaacatcttcttctgtatctttcaaaagtgaaaatttcaggcacaccaaagaattgaactgcagaactgcttcctgtagtaatgttacctgctggttgaaagacgttcacatgaaaggagaatactttgttaatgtgactaccagaatttggaacgggactttcgcatcatcaacgttccagacagtacagctaacggcagctgcagaaatcaacacctataaccctgagatatatgtgattgaagataacactgttacgattcccctgatgataatgaaacctgatgagaaagccgaagtaccaacaggagttataataggaagtataattgctggaatccttttgctgttagctctggttgcaattttatggaagctcggcttcttcaaaagaaaatatgaaaagatgaccaaaaatccagatgagattgatgagaccacagagctcagtagctgaaccagcagacctacctgcagtgggaaccggcagcatcccagccagggtttgctgtttgcgtgcatggatttctttttaaatcccatattttttttatcatgtcgtaggtaaactaacctggtattttaagagaaaactgcaggtcagtttggaatgaagaaattgtggggggtgggggaggtgcggggggcaggtagggaaataatagggaaaatacctattttatatgatgggggaaaaaaagtaatctttaaactggctggcccagagtttacattctaatttgcattgtgtcagaaacatgaaatgcttccaagcatgacaacttttaaagaaaaatatgatactctcagattttaagggggaaaactgttctctttaaaatatttgtctttaaacagcaactacagaagtggaagtgcttgatatgtaagtacttccacttgtgtatattttaatgaatattgatgttaacaagaggggaaaacaaaacacaggttttttcaatttatgctgctcatccaaagttgccacagatgatacttccaagtgataattttatttataaactaggtaaaatttgttgttggttccttttagaccacggctgccccttccacaccccatcttgctctaatgatcaaaacatgcttgaataactgagcttagagtatacctcctatatgtccatttaagttaggagagggggcgatatagagactaaggcacaaaattttgtttaaaactcagaatataacatgtaaaatcccatctgctagaagcccatcctgtgccagaggaaggaaaaggaggaaatttcctttctcttttaggaggcacaacagttctcttctaggatttgtttggctgactggcagtaacctagtgaatttttgaaagatgagtaatttctttggcaaccttcctcctcccttactgaaccactctcccacctcctggtggtaccattattatagaagccctctacagcctgactttctctccagcggtccaaagttatcccctcctttacccctcatccaaagttcccactccttcaggacagctgctgtgcattagatattaggggggaaagtcatctgtttaatttacacacttgcatgaattactgtatataaactccttaacttcagggagctattttcatttagtgctaaacaagtaagaaaaataagctcgagtgaatttctaaatgttggaatgttatgcgacgtcgtcaatgtgatatcggacatcgactgtatctcagcagacagctctgatcatgcttacagaattcatccgca

SEQ ID NO: 306645 - DNA, 2175 bp, Homo sapiens
  misc_feature (4)..(5): n is a, c, g, or t
gaanncctgcaaacccagcgcaactacggtcccccggtcagacccaggatggggccagaacggacaggggccgcgccgctgccgctgctgctggtgttagcgctcagtcaaggcattttaaattgttgtttggcctacaatgttggtctcccagaagcaaaaatattttccggtccttcaagtgaacagtttgggtatgcagtgcagcagtttataaatccaaaaggcaactggttactggttggttcaccctggagtggctttcctgagaaccgaatgggagatgtgtataaatgtcctgttgacctatccactgccacatgtgaaaaactaaatttgcaaacttcaacaagcattccaaatgttactgagatgaaaaccaacatgagcctcggcttgatcctcaccaggaacatgggaactggaggttttctcacatgtggtcctctgtgggcacagcaatgtgggaatcagtattacacaacgggtgtgtgttctgacatcagtcctgattttcagctctcagccagcttctcacctgcaactcagccctgcccttccctcatagatgttgtggttgtgtgtgatgaatcaaatagtatttatccttgggatgcagtaaagaattttttggaaaaatttgtacaaggcctggatataggccccacaaagacacaggtggggttaattcagtatgccaataatccaagagttgtgtttaacttgaacacatataaaaccaaagaagaaatgattgtagcaacatcccagacatcccaatatggtggggacctcacaaacacattcggagcaattcaatatgcaagaaaatatgcttattcagcagcttctggtgggcgacgaagtgctacgaaagtaatggtagttgtaactgacggtgaatcacatgatggttcaatgttgaaagctgtgattgatcaatgcaaccatgacaatatactgaggtttggcatagcagttcttgggtacttaaacagaaacgcccttgatactaaaaatttaataaaagaaataaaagcgatcgctagtattccaacagaaagatactttttcaatgtgtctgatgaagcagctctactagaaaaggctgggacattaggagaacaaattttcagcattgaaggtactgttcaaggaggagacaactttcagatggaaatgtcacaagtgggattcagtgcagattactcttctcaaaatgatattctgatgctgggtgcagtgggagcttttggctggagtgggaccattgtccagaagacatctcatggccatttgatctttcctaaacaagcctttgaccaaattctgcaggacagaaatcacagttcatatttaggttactctgtggctgcaatttctactggagaaagcactcactttgttgctggtgctcctcgggcaaattataccggccagatagtgctatatagtgtgaatgagaatggcaatatcacggttattcaggctcaccgaggtgaccagattggctcctattttggtagtgtgctgtgttcagttgatgtggataaagacaccattacagacgtgctcttggtaggtgcaccaatgtacatgagtgacctaaagaaagaggaaggaagagtctacctgtttactatcaaagagggcattttgggtcagcaccaatttcttgaaggccccgagggcattgaaaacactcgatttggttcagcaattgcagctctttcagacatcaacatggatggctttaatgatgtgattgttggttcaccactagaaaatcagaattctggagctgtatacatttacaatggtcatcagggcactatccgcacaaagtattcccagaaaatcttgggatccgatggagcctttaggagccatctccagtactttgggaggtccttggatggctatggagatttaaatggggattccatcaccgatgtgtctattggtgcctttggacaagtggttcaactctggagttgaagattcagagagaacagtgtgaaggtcatgtgattcaaggtcaaaaataagtatattgggccggcaagggaatagaatcagaaagaagttgtttattcaatcaagaatctccattcatttgtctctgtcaaaaaatgtgctttaaatgtacaaatatttgaagaacagaaaaataat

SEQ ID NO: 306646 - DNA, 366 bp, Homo sapiens
caaaggaatttatgttagtcttagaaacatacattggacgataagcccataggcaagcatttctttttatttggtgcttttgtaactaaaagtaaaatttactttaacctaagctataagatacttaaataaaagaaatattaaccttcaagaacaaaagcaaactaaaatatttggctttacaaacatcatccaacagatctaccaacataaatttttatgaaatctcttcggatgggaatgttccttcaatcgtgcacagttttgaagatgttggtccaaaattcatcttctccctgaaggttggtaagcctgtcataaggatggcaaatccaggagaaagtgagaagaaaaaaaatgagtctg

SEQ ID NO: 306647 - DNA, 717 bp, Homo sapiens
tcatatcatgccatgtacacttacatcatcatatgtgctttcccacttccctctgcctagaaaactccatgtccttcttactttgcaatttgaatgatattttaactttctaagccttcctgactctcctgctctctgatcactcagcctttgggacttgcctctattacaatttattttactatagaagcttaattatttattctccctgcctctacccctcctgccttttgctatgacaaacctcacatacctacaaaaggtttgccttataagtatgtctttgaccccctggcatcagaaacacctggaatgctaatttaaattgctgtgttctggatcacatcctagacattacttcagaatctctagaaatgggtctcagggatctgtatttcaaaggcattttcttggagattcttgtgcacactaagatttaagaaccaggtgttagatggtgttagaacctgagggaaggaactgtgctctctgtcttcatgttccaagcactttgcaaatagtaaacactcaatttttgtgtattgaatgagcaagtaaatgttcagtgtaatattagaagtatatgaatcctaggaattctaagtttaacatgttttattactccagattggctcctattttggtagtgtgctgtgttcagttgatgtggataaagacaccattacagacgtgctcttggtaggtgcaccaatgtac

SEQ ID NO: 306648 - DNA, 271 bp, Homo sapiens
ttttcttttaatatctttaagtaaacgaggaatttttaatcacttttaaaaattgttttccctttgaaagcttcaacaagcattccaaatgttactgagatgaaaaccaacatgagcctcggcttgatcctcaccaggaacatgggaactggaggttttctcgtgagtgtttactttacaaatcattattcctctcaagaaagtacatagacagtagtgtcttctcaccatccctcccaatctgaggatttagatgtttagaacttgcttt

SEQ ID NO: 306649 - DNA, 683 bp, Homo sapiens
  misc_feature (30)..(30): n is a, c, g, or t
  misc_feature (65)..(65): n is a, c, g, or t
ttcatggaatctggtgtttattacactcgngggagagaggaggtcactcggtccagcggtggccnagtgtggggctgtcacacgtagtaaaggcgcatgggtcctcggcccgcgcactgtgtgacctggaagaacacagctcctggtcctcgcctcctccgctgtctccctggagttcttgcaagtcggccaggatgtctcaggctgagtttgagaaagctgcagaggaggttaggcaccttaagaccaagccatcggatgaggagatgctgttcatctatggccactacaaacaagcaactgtgggcgacataaatacagaacggcccgggatgttggacttcacgggcaaggccaagtgggatgcctggaatgagctgaaagggacttccaaggaagatgccatgaaagcttacatcaacaaagtagaagagctaaagaaaaaatacgggatatgagagactggatttggttactgtgccatgtgtttatcctaaactgagacaatgccttgtttttttctaataccgtggatggtgggaattcgggaaaataaccagttaaaccagctactcaaggctgctcaccatacggctctaacagattaggggctaaaacgattactgactttccttgagtagtttttatctgaaatcaattaaaagtgtatttgttactttaaa

SEQ ID NO: 306650 - DNA, 608 bp, Homo sapiens
agcagggttggggcgagtggaccgcgcctctaaaggcgcttgccagtgcaatctgggcgatcgcttcctggtcctcgcctcctccgctgtctccctggagttcttgcaagtcggccaggatgtctcaggctgagtttgagaaagctgcagaggaggttaggcaccttaagaccaagccatcggatgaggagatgctgttcatctatggccactacaaacaagcaactgtgggcgacataaatacagaacggcccgggatgttggacttcacgggcaaggccaagtgggatgcctggaatgagctgaaagggacttccaaggaagatgccatgaaagcttacatcaacaaagtagaagagctaaagaaaaaatacgggatatgagagactggatttggttactgtgccatgtgtttatcctaaactgagacaatgccttgtttttttctaataccgtggatggtgggaattcgggaaaataaccagttaaaccagctactcaaggctgctcaccatacggctctaacagattaggggctaaaacgattactgactttccttgagtagtttttatctgaaatcaattaaaagtgtatttgttactttaaa

SEQ ID NO: 306651 - DNA, 702 bp, Homo sapiens
agcagggttggggcgagtggaccgcgcctctaaaggcgcttgccagtgcaatctgggcgatcgcttcctggtcctcgcctcctccgctgtctccctggagttcttgcaagtcggccaggatgtctcaggctgagtttgagaaagctgcagaggaggttaggcaccttaagaccaagccatcggatgaggagatgctgttcatctatggccactacaaacaagcaactgtgggcgacataaatacagaacggcccgggatgttggacttcacgggcaaggccaagtgggatgcctggaatgagctgaaagggacttccaaggaagatgccatgaaagcttacatcaacaaagtagaagagctaaagaaaaaatacgggatatgagagactggatttggttactgtgccatgtgtttatcctaaactgagacaatgccttgtttttttctaataccgtggatggtgggaattcgggaaaataaccagttaaaccagctactcaaggctgctcaccatacggctctaacagattaggggctaaaacgattactgactttccttgagtagtttttatctgaaatcaattaaaagtgtatttgttactttaaaacaacaaaccaaccctcgaggcggggcccgtacccatttcgccctatagggagtcggataccaatcaatgcccggcgtttaccgtcgggcttgg

SEQ ID NO: 306652 - DNA, 747 bp, Homo sapiens
agcagggttggggcgagtggaccgcgcctctaaaggcgcttgccagtgcaatctgggcgatcgcttcctggtcctcgcctcctccgctgtctccctggagttcttgcaagtcggccaggatgtctcaggctgagtttgagaaagctgcagaggaggttaggcaccttaagaccaagccatcggatgaggagatgctgttcatctatggccactacaaacaagcaactgtgggcgacataaatacagaacggcccgggatgttggacttcacgggcaaggccaagtgggatgcctggaatgagctgaaagggacttccaaggaagatgccatgaaagcttacatcaacaaagtagaagagctaaagaaaaaatacgggatatgagagactggatttggttactgtgccatgtgtttatcctaaactgagacaatgccttgtttttttctaataccgtggatggtgggaattcgggaaaataaccagttaaaccagctactcaaggctgctcaccatacggctctaacagattaggggctaaaacgattactgactttccttgagtagtttttatctgaaatcaattaaaagtgtatttgttactttaaaacagaactaactaccataccacacaagagaaccaaacaacactctgtgtttccggacgcccctgtggcccctctgaaaaaaacttttcttagaaacccaatttcttgttgggaggacccgggggcccccagtaatggtg

SEQ ID NO: 306653 - DNA, 707 bp, Homo sapiens
agcagggttggggcgagtggaccgcgcctctaaaggcgcttgccagtgcaatctgggcgatcgcttcctggtcctcgcctcctccgctgtctccctggagttcttgcaagtcggccaggatgtctcaggctgagtttgagaaagctgcagaggaggttaggcaccttaagaccaagccatcggatgaggagatgctgttcatctatggccactacaaacaagcaactgtgggcgacataaatacagaacggcccgggatgttggacttcacgggcaaggccaagtgggatgcctggaatgagctgaaagggacttccaaggaagatgccatgaaagcttacatcaacaaagtagaagagctaaagaaaaaatacgggatatgagagactggatttggttactgtgccatgtgtttatcctaaactgagacaatgccttgtttttttctaataccgtggatggtgggaattcgggaaaataaccagttaaaccagctactcaaggctgctcaccatacggctctaacagattaggggctaaaacgattactgactttccttgagtagtttttatctgaaatcaattaaaagtgtatttgttactttaaataccactcgctacccagcccacccctctcctcccaacatgccggccgcttcgcccaatcgacttagactcgccaagctaatccatgcgcccgttcgccc

SEQ ID NO: 306654 - DNA, 537 bp, Homo sapiens
agcagggttggggcgagtggaccgcgcctctaaaggcgcttgccagtgcaatctgggcgatcgcttcctggtcctcgcctcctccgctgtctccctggagttcttgcaagtcggccaggatgtctcaggctgagtttgagaaagctgcagaggaggttaggcaccttaagaccaagccatcggatgaggagatgctgttcatctatggccactacaaacaagcaactgtgggcgacataaatacagaacggcccgggatgttggacttcacgggcaaggccaagtgggatgcctggaatgagctgaaagggacttccaaggaagatgccatgaaagcttacatcaacaaagtagaagagctaaagaaaaaatacgggatatgagagactggatttggttactgtgccatgtgtttatcctaaactgagacaatgccttgtttttttctaataccgtggatggtgggaattcgggaaaatgactttccttgagtagtttttatctgaaatcaattaaaagtgtatttgttactttaaa

SEQ ID NO: 306655 - DNA, 975 bp, Homo sapiens
agtgaaataggacaacagggagatggtgagtgtgtttcccaactgcagatgacaacaggtctataagcataaagtcatcatataacttaaagaaaccttaccctcggtgaaatctcccacagatcagcaagaaatagactaacaattcggtagaaaaatggggctaggatataaacagttcataggaaaggacacctgatatcattaatgattagggagagaaattgggtagctaacagcaggggtgagagagaaactttatagtattttcctctgtagcttttgaattttaagacatatgaatggattttttttttaattgtaattaaagtataatttttttaaaagagaaattttggagtcatttaacttgtaagacaaaggctatcttgtaataagaatactgttcttcctatttgctctagattttaagtttggattggcatacattggttttcttagggcagaacccactctactagacctatttaaccccatgacagagcctagaaggaacaggtgtaatagaagatggcatttatggcaagaaggttgatcaagttctccattagaatttgaaccagatctaatgccttttcttcccttgtttaagaacggcccgggatgttggacttcacgggcaaggccaagtgggatgcctggaatgagctgaaagggacttccaaggaagatgccatgaaagcttacatcaacaaagtagaagagctaaagaaaaaatacgggatatgagagactggatttggttactgtgccatgtgtttatcctaaactgagacaatgccttgtttttttctaataccgtggatggtgggaattcgggaaaataaccagttaaaccagctactcaaggctgctcaccatacggctctaacagattaggggctaaaacgattactgactttccttgagtagtttttatctgaaatcaattaaaagtgtatttgttactttaaa

SEQ ID NO: 306656 - DNA, 688 bp, Homo sapiens
  misc_feature (399)..(399): n is a, c, g, or t
  misc_feature (403)..(403): n is a, c, g, or t
agcagggttggggcgagtggaccgcgcctctaaaggcgcttgccagtgcaatctgggcgatcgcttcctggtcctcgcctcctccgctgtctccctggagttcttgcaagtcggccaggatgtctcaggctgagtttgagaaagctgcagaggaggttaggcaccttaagaccaagccatcggatgaggagatgctgttcatctatggccactacaaacaagcaactgtgggcgacataaatacagaacggcccgggatgttggacttcacgggcaaggccaagtgggatgcctggaatgagctgaaagggacttccaaggaagatgccatgaaagcttacatcaacaaagtagaagagctaaagaaaaaaaaaaaaaaaaaaaaaaaaaaaaatttgngggnggccttgggcctttggaaaaggttttttagcccattccggtgggcgcgcgcgcgggggcccaagtgtggggcacagtgggcacccagttgggccaataagcgcgtggtccacacagaggggagacaccgcggggcccatgacacacagcgcggcggggatttctctccccaattttaaaaaaaccggccgcgtggggacaccccggagcgggtttcgggaccaaaacccccaagagggaggggcccagagggccaatcacggggcctctattcaaccgcggggcg

SEQ ID NO: 306657 - DNA, 461 bp, Homo sapiens
caggttctgtggatactgtctcctgtaattagtagaatctcaactttattaagtgagaaactgagcctaggagagttacagcagagctgcctggggctctggaggctgcttgtttcctaccatgctacctccctgacacataatcctgtcgattccttacagggacttccaaggaagatgccatgaaagcttacatcaacaaagtagaagagctaaagaaaaaatacgggatatgagagactggatttggttactgtgccatgtgtttatcctaaactgagacaatgccttgtttttttctaataccgtggatggtgggaattcgggaaaataaccagttaaaccagctactcaaggctgctcaccatacggctctaacagattaggggctaaaacgattactgactttccttgagtagtttttatctgaaatcaattaaaagtgtatttgttactttaaa

SEQ ID NO: 306658 - DNA, 664 bp, Homo sapiens
agcagggttggggcgagtggaccgcgcctctaaaggcgcttgccagtgcaatctgggcgatcgcttcctggtcctcgcctcctccgctgtctccctggagttcttgcaagtcggccaggatgtctcaggctgagtttgagaaagctgcagaggaggttaggcaccttaagaccaagccatcggatgaggagatgctgttcatctatggccactacaaacaagcaactgtgggcgacataaatacagaacggcccgggatgttggacttcacgggcaaggccaagtgggatgcctggaatgagctgaaagggacttccaaggaagatgccatgaaagcttacatcaacaaagtagaagagctaaagaaaaaatacgggatatgagagactggatttggttactgtgccatgtgtttatcctaaactgagacaatgccttgtttttttctaataccgtggatggtgggaattcgggaaaataaccagttaaaccagctactcaaggctgctcaccatacggctctaacagattaggggctaaaacgattactgactttccttgagtagtttttatctgaaatcaattaaaagtgtatttgttactttaaaaaaaagtcgacgcggccgcgaatttagtagtagtagtagtagtagtaggcggccgc

SEQ ID NO: 306659 - DNA, 744 bp, Homo sapiens
  misc_feature (627)..(627): n is a, c, g, or t
  misc_feature (652)..(652): n is a, c, g, or t
  misc_feature (694)..(694): n is a, c, g, or t
agcagggttggggcgagtggaccgcgcctctaaaggcgcttgccagtgcaatctgggcgatcgcttcctggtcctcgcctcctccgctgtctccctggagttcttgcaagtcggccaggatgtctcaggctgagtttgagaaagctgcagaggaggttaggcaccttaagaccaagccatcggatgaggagatgctgttcatctatggccactacaaacaagcaactgtgggcgacataaatacagaacggcccgggatgttggacttcacgggcaaggccaagtgggatgcctggaatgagctgaaagggacttccaaggaagatgccatgaaagcttacatcaacaaagtagaagagctaaagaaaaaatacgggatatgagagactggatttggttactgtgccatgtgtttatcctaaactgagacaatgccttgtttttttctaataccgtggatggtgggaattcgggaaaataaccagttaaaccagctactcaaggctgctcaccatacggctctaacagattaggggctaaaacgattactgactttccttgagtagtttttatctgaaatcaattaaaagtgtatttgttactttaaaaaaaaaacaacaaaaaaanctcgagggggggcccggtaccccanttcgcccaatggggagtcgaataccattccactgcccggcgnttaacaccgtccggactgggaccttgcggtaccccacttttcgccttggg

SEQ ID NO: 306660 - DNA, 881 bp, Homo sapiens
  misc_feature (641)..(641): n is a, c, g, or t
  misc_feature (645)..(645): n is a, c, g, or t
agcagggttggggcgagtggaccgcgcctctaaaggcgcttgccagtgcaatctgggcgatcgcttcctggtcctcgcctcctccgctgtctccctggagttcttgcaagtcggccaggatgtctcaggctgagtttgagaaagctgcagaggaggttaggcaccttaagaccaagccatcggatgaggagatgctgttcatctatggccactacaaacaagcaactgtgggcgacataaatacagaacggcccgggatgttggacttcacgggcaaggccaagtgggatgcctggaatgagctgaaagggacttccaaggaagatgccatgaaagcttacatcaacaaagtagaagagctaaagaaaaaatacgggatatgagagactggatttggttactgtgccatgtgtttatcctaaactgagacaatgccttgtttttttctaataccgtggatggtgggaattcgggaaaataaccagttaaaccagctactcaaggctgctcaccatacggctctaacagattaggggctaaaacgattactgactttccttgagtagtttttatctgaaatcaattaaaagtgtatttgttactttaaaaaaaaaaaaaaaaaaaaaaaaaaaaaaatttgngggnggcggggcccggagaaaggtttttaaaacacctcgggtggggggcggcggggcgccacgtagggaccggggaaccgcgggcacagcgggtcccaagaaacccggggccatacaccaggggggggtgtcccccccataaaacacgcccgggcagaacgcaggcggcgtgggacaaatcccaaagggcgtcagaacgacccgcggcccacacccgcgctcagggagcggaaaaaatag

SEQ ID NO: 306661 - DNA, 694 bp, Homo sapiens
agcagggttggggcgagtggaccgcgcctctaaaggcgcttgccagtgcaatctgggcgatcgcttcctggtcctcgcctcctccgctgtctccctggagttcttgcaagtcggccaggatgtctcagtgtagacccttgtctgagaccgagctatgtggggcgacctctggctcctcccgcctgcctctgccaatccgggcactgggacagaggctgagtttgagaaagctgcagaggaggttaggcaccttaagaccaagccatcggatgaggagatgctgttcatctatggccactacaaacaagcaactgtgggcgacataaatacagaacggcccgggatgttggacttcacgggcaaggccaagtgggatgcctggaatgagctgaaagggacttccaaggaagatgccatgaaagcttacatcaacaaagtagaagagctaaagaaaaaatacgggatatgagagactggatttggttactgtgccatgtgtttatcctaaactgagacaatgccttgtttttttctaataccgtggatggtgggaattcgggaaaataaccagttaaaccagctactcaaggctgctcaccatacggctctaacagattaggggctaaaacgattactgactttccttgagtagtttttatctgaaatcaattaaaagtgtatttgttactttaaa

SEQ ID NO: 306662 - DNA, 700 bp, Homo sapiens
ggctgcgaaggtgcagcgggcgggaggcccgttgggggctcagccggctgccagaagctctcgggctctttccttccgtgcccctcacttgctcatgggcccatgcctagccctgattcgttggacagagcctttgtagacccttgtctgagaccgagctatgtggggcgacctctggctcctcccgcctgcctctgccaatccgggcactgggacagaggctgagtttgagaaagctgcagaggaggttaggcaccttaagaccaagccatcggatgaggagatgctgttcatctatggccactacaaacaagcaactgtgggcgacataaatacagaacggcccgggatgttggacttcacgggcaaggccaagtgggatgcctggaatgagctgaaagggacttccaaggaagatgccatgaaagcttacatcaacaaagtagaagagctaaagaaaaaatacgggatatgagagactggatttggttactgtgccatgtgtttatcctaaactgagacaatgccttgtttttttctaataccgtggatggtgggaattcgggaaaataaccagttaaaccagctactcaaggctgctcaccatacggctctaacagattaggggctaaaacgattactgactttccttgagtagtttttatctgaaatcaattaaaagtgtatttgttactttaaa

SEQ ID NO: 306663 - DNA, 737 bp, Homo sapiens
agggaggggaccaacgggctccggcgctgacaccgcggcactcatgccctgtcccctttcagctgtttccagcatactgtgccccgtctgtcctcaggccagggcttcgctgaagccccggccactccctagtacctggcccggtggtggccaggcagttggccgcgctgcttctcccgcagaggggacccccactgggggcgaaggcttggcctgccctcttcactgctgtatttccagacctgatgcctgcgtttgctgagtttgagaaagctgcagaggaggttaggcaccttaagaccaagccatcggatgaggagatgctgttcatctatggccactacaaacaagcaactgtgggcgacataaatacagaacggcccgggatgttggacttcacgggcaaggccaagtgggatgcctggaatgagctgaaagggacttccaaggaagatgccatgaaagcttacatcaacaaagtagaagagctaaagaaaaaatacgggatatgagagactggatttggttactgtgccatgtgtttatcctaaactgagacaatgccttgtttttttctaataccgtggatggtgggaattcgggaaaataaccagttaaaccagctactcaaggctgctcaccatacggctctaacagattaggggctaaaacgattactgactttccttgagtagtttttatctgaaatcaattaaaagtgtatttgttactttaaa

SEQ ID NO: 306664 - DNA, 863 bp, Homo sapiens
ggctgcgaaggtgcagcgggcgggaggcccgttgggggctcagccggctgccagaagctctcgggctctttccttccgtgcccctcacttgctcatgggcccatgcctagccctgattcgttggacagagccttgtgagcgggattttccgtttggggatttctaaatctgctgcccaccccgcaactgccggaaagttgcccatggggtggacttcgctgtgtagcgggagaggggtgggagtcgagggtgcttgatggagagatgggggaaggggttgcacggattggaggagcgaggagactcagtccccatcccgaagcacagggcaggacgtcgcggcggagtggggaagcgaggagtccgtggccgagagcttggaggctgagtttgagaaagctgcagaggaggttaggcaccttaagaccaagccatcggatgaggagatgctgttcatctatggccactacaaacaagcaactgtgggcgacataaatacagaacggcccgggatgttggacttcacgggcaaggccaagtgggatgcctggaatgagctgaaagggacttccaaggaagatgccatgaaagcttacatcaacaaagtagaagagctaaagaaaaaatacgggatatgagagactggatttggttactgtgccatgtgtttatcctaaactgagacaatgccttgtttttttctaataccgtggatggtgggaattcgggaaaataaccagttaaaccagctactcaaggctgctcaccatacggctctaacagattaggggctaaaacgattactgactttccttgagtagtttttatctgaaatcaattaaaagtgtatttgttactttaaa

SEQ ID NO: 306665 - DNA, 614 bp, Homo sapiens
ggctgcgaaggtgcagcgggcgggaggcccgttgggggctcagccggctgccagaagctctcgggctctttccttccgtgcccctcacttgctcatgggcccatgcctagccctgattcgttggacagagccttgctgagtttgagaaagctgcagaggaggttaggcaccttaagaccaagccatcggatgaggagatgctgttcatctatggccactacaaacaagcaactgtgggcgacataaatacagaacggcccgggatgttggacttcacgggcaaggccaagtgggatgcctggaatgagctgaaagggacttccaaggaagatgccatgaaagcttacatcaacaaagtagaagagctaaagaaaaaatacgggatatgagagactggatttggttactgtgccatgtgtttatcctaaactgagacaatgccttgtttttttctaataccgtggatggtgggaattcgggaaaataaccagttaaaccagctactcaaggctgctcaccatacggctctaacagattaggggctaaaacgattactgactttccttgagtagtttttatctgaaatcaattaaaagtgtatttgttactttaaa

SEQ ID NO: 306666 - DNA, 579 bp, Homo sapiens
acattcttggatgatatctatgtgcctagatttactcattggtcaatatttcttcttagttgtgcccggagatcttgagcgtcggacaggatgtctcaggctgagtttgagaaagctgcagaggaggttaggcaccttaagaccaagccatcggatgaggagatgctgttcatctatggccactacaaacaagcaactgtgggcgacataaatacagaacggcccgggatgttggacttcacgggcaaggccaagtgggatgcctggaatgagctgaaagggacttccaaggaagatgccatgaaagcttacatcaacaaagtagaagagctaaagaaaaaatacgggatatgagagactggatttggttactgtgccatgtgtttatcctaaactgagacaatgccttgtttttttctaataccgtggatggtgggaattcgggaaaataaccagttaaaccagctactcaaggctgctcaccatacggctctaacagattaggggctaaaacgattactgactttccttgagtagtttttatctgaaatcaattaaaagtgtatttgttactttaaa

SEQ ID NO: 306667 - DNA, 514 bp, Homo sapiens
  misc_feature (489)..(490): n is a, c, g, or t
  misc_feature (496)..(496): n is a, c, g, or t
  misc_feature (503)..(503): n is a, c, g, or t
  misc_feature (505)..(505): n is a, c, g, or t
  misc_feature (514)..(514): n is a, c, g, or t
agcagggttggggcgagtggaccgcgcctctaaaggcgcttgccagtgcaatctgggcgatcgcttcctggtcctcgcctcctccgctgtctccctggagttcttgcaagtcggccaggatgtctcaggctgagtttgagaaagctgcagaggaggttaggcaccttaagaccaagccatcggatgaggagatgctgttcatctatggccactacaaacaagcaactgtgggcgacataaatacagaacggcccgggatgttggacttcacgggcaaggccaagtgggatgcctggaatgagctgaaagggacttccaaggaagatgccatgaaagcttacatcaacaaagtagaagagctaaagaaaaaatacgggatatgagagactggatttggttactgtgccatgtgtttatcctaaactgagacaatgccttgtttttttctaataccgtggatggtgggaattcgggaaaattaggggctannacgatnactggancntttttttcn

SEQ ID NO: 306668 - DNA, 641 bp, Homo sapiens
agcagggttggggcgagtggaccgcgcctctaaaggcgcttgccagtgcaatctgggcgatcgcttcctggtcctcgcctcctccgctgtctccctggagttcttgcaagtcggccaggatgtctcaggctgagtttgagaaagctgcagaggaggttaggcaccttaagaccaagccatcggatgaggagatgctgttcatctatggccactacaaacaagcaactgtgggcgacataaatacagaacggcccgggatgttggacttcacgggcaaggccaagtgggatgcctggaatgagctgaaagggacttccaaggaagatgccatgaaagcttacatcaacaaagtagaagagctaaagaaaaaatacgggatatgagagactggatttggttactgtgccatgtgtttatcctaaactgagacaatgccttgtttttttctaataccgtggatggtgggaattcgggaaaaggggcctggtggggcccgggcagggcatgttttcgaagcatggagggagtggttacagggctgggctgggctctgtagactgcagggttggtttggagcatttggacccacctgctctgctcctggtgactttgggttcagatcacagggctcctgccaccca

SEQ ID NO: 306669 - DNA, 541 bp, Homo sapiens
agcagggttggggcgagtggaccgcgcctctaaaggcgcttgccagtgcaatctgggcgatcgcttcctggtcctcgcctcctccgctgtctccctggagttcttgcaagtcggccaggatgtctcaggctgagtttgagaaagctgcagaggaggttaggcaccttaagaccaagccatcggatgaggagatgctgttcatctatggccactacaaacaagcaactgtgggcgacataaatacagaacggcccgggatgttggacttcacgggcaaggccaagtgggatgcctggaatgagctgaaagggacttccaaggaagatgccatgaaagcttacatcaacaaagtagaagagctaaagaaaaaatacgggatatgagagactggatttggttactgtgccatgtgtttatcctaaactgagacaatgccttgtttttttctaataccgtggatggtgggaattcgggaaaatcccatccagtgaaatccccgtgaatcccacgttgcaccagtgaatccacgtagcgggcaggt

SEQ ID NO: 306670 - DNA, 437 bp, Homo sapiens
caacaaatgaaagaagaggattttgtgttatcacatatactgatgaagagccagtaaaaaaattgttaagtacagaacggcccgggatgttggacttcacgggcaaggccaagtgggatgcctggaatgagctgaaagggacttccaaggaagatgccatgaaagcttacatcaacaaagtagaagagctaaagaaaaaatacgggatatgagagactggatttggttactgtgccatgtgtttatcctaaactgagacaatgccttgtttttttctaataccgtggatggtgggaattcgggaaaataaccagttaaaccagctactcaaggctgctcaccatacggctctaacagattaggggctaaaacgattactgactttccttgagtagtttttatctgaaatcaattaaaagtgtatttgttactttaaa

SEQ ID NO: 306671 - DNA, 719 bp, Homo sapiens
agcagggttggggcgagtggaccgcgcctctaaaggcgcttgccagtgcaatctgggcgatcgcttcctggtcctcgcctcctccgctgtctccctggagttcttgcaagtcggccaggatgtctcagtgtagacccttgtctgagaccgagctatgtggggcgacctctggctcctcccgcctgcctctgccaatccgggcactgggacagaggctgagtttgagaaagctgcagaggaggttaggcaccttaagaccaagccatcggatgaggagatgctgttcatctatggccactacaaacaagcaactgtgggcgacataaatacagaacggcccgggatgttggacttcacgggcaaggccaagtgggatgcctggaatgagctgaaagggacttccaaggaagatgccatgaaagcttacatcaacaaagtagaagagctaaagaaaaaatacgggatatgagagactggatttggttactgtgccatgtgtttatcctaaactgagacaatgccttgtttttttctaataccgtggatggtgggaattcgggaaaataaccagttaaaccagctactcaaggctgctcaccatacggctctaacagattaggggctaaaacgattactgactttccttgagtagtttttatctgaaatcaattaaaagtgtatttgttactttaaataactttagtgatctgagttcttga

SEQ ID NO: 306672 - DNA, 543 bp, Homo sapiens
agcagggttggggcgagtggaccgcgcctctaaaggcgcttgccagtgcaatctgggcgatcgcttcctggtcctcgcctcctccgctgtctccctggagttcttgcaagtcggccaggatgtctcaggctgagtttgagaaagctgcagaggaggttaggcaccttaagaccaagccatcggatgaggagatgctgttcatctatggccactacaaacaagcaactgtgggcgacataaatacagaacggcccgggatgttggacttcacgggcaaggccaagtgggatgcctggaatgagctgaaagggacttccaaggaagatgccatgaaagcttacatcaacaaagtagaagagctaaagaatgccttgtttttttctaataccgtggatggtgggaattcgggaaaataaccagttaaaccagctactcaaggctgctcaccatacggctctaacagattaggggctaaaacgattactgactttccttgagtagtttttatctgaaatcaattaaaagtgtatttgttactttaaa

SEQ ID NO: 306673 - DNA, 1248 bp, Homo sapiens
  misc_feature (1008)..(1008): n is a, c, g, or t
  misc_feature (1012)..(1012): n is a, c, g, or t
agtgaaataggacaacagggagatggtgagtgtgtttcccaactgcagatgacaacaggtctataagcataaagtcatcatataacttaaagaaaccttaccctcggtgaaatctcccacagatcagcaagaaatagactaacaattcggtagaaaaatggggctaggatataaacagttcataggaaaggacacctgatatcattaatgattagggagagaaattgggtagctaacagcaggggtgagagagaaactttatagtattttcctctgtagcttttgaattttaagacatatgaatggattttttttttaattgtaattaaagtataatttttttaaaagagaaattttggagtcatttaacttgtaagacaaaggctatcttgtaataagaatactgttcttcctatttgctctagattttaagtttggattggcatacattggttttcttagggcagaacccactctactagacctatttaaccccatgacagagcctagaaggaacaggtgtaatagaagatggcatttatggcaagaaggttgatcaagttctccattagaatttgaaccagatctaatgccttttcttcccttgtttaagaacggcccgggatgttggacttcacgggcaaggccaagtgggatgcctggaatgagctgaaagggacttccaaggaagatgccatgaaagcttacatcaacaaagtagaagagctaaagaaaaaatacgggatatgagagactggatttggttactgtgccatgtgtttatcctaaactgagacaatgccttgtttttttctaataccgtggatggtgggaattcgggaaaataaccagttaaaccagctactcaaggctgctcaccatacggctctaacagattaggggctaaaacgattactgactttccttgagtagtttttatctgaaatcaattaaaagtgtatttgttactttaaaaaaaaaaaaaaaaaaaaaaaaaaaaaaatttgngggnggcggggcccggagaaaggtttttaaaacacctcgggtggggggcggcggggcgccacgtagggaccggggaaccgcgggcacagcgggtcccaagaaacccggggccatacaccaggggggggtgtcccccccataaaacacgcccgggcagaacgcaggcggcgtgggacaaatcccaaagggcgtcagaacgacccgcggcccacacccgcgctcagggagcggaaaaaatag

SEQ ID NO: 306674 - DNA, 628 bp, Homo sapiens
cgggggactgccagcatatacccctttacctggctgtggcaagtctaaatataaataaatatgtcatttatgaatgataataaagagagaatatgattcttactcagcatatactagtttgtgtgggataaatgcactattcaagctagctcctggtcctcgcctcctccgctgtctccctggagttcttgcaagtcggccaggatgtctcaggctgagtttgagaaagctgcagaggaggttaggcaccttaagaccaagccatcggatgaggagatgctgttcatctatggccactacaaacaagcaactgtgggcgacataaatacagaacggcccgggatgttggacttcacgggcaaggccaagtgggatgcctggaatgagctgaaagggacttccaaggaagatgccatgaaagcttacatcaacaaagtagaagagctaaagaatgccttgtttttttctaataccgtggatggtgggaattcgggaaaataaccagttaaaccagctactcaaggctgctcaccatacggctctaacagattaggggctaaaacgattactgactttccttgagtagtttttatctgaaatcaattaaaagtgtatttgttactttaaa

SEQ ID NO: 306675 - DNA, 618 bp, Homo sapiens
gtccatccgatgagacggatgctctgatgctctgaggcttctgggaggctgggccctggaggcaacgtgctgcaggcgcactctgtcagagtgaacagcaccgcgagacaggccaggctcgtggctcggaagacaaaccccacacacactcaaggggtcgaaaacaaaccccacacgagggctctcacctccttctcctaggtagtatttattttcagcacctgtttgatgcagtttttaatcctctacctattgcactgttgtgactcgttggccattatttgatttttgtacgaaaaaaagctttgttatagaaatcagcatactatttttttaaatctggagagaagatattctggtgactgaaagtatggtcgggtgtcagatataaatgtgcaaatgccttcttgctgtcctgtcggtctcagtacgttcactttatagctgctggcaatatcgaaggttccttttttgtttgtgtaaactctaatttctatcaaggtgtcatggatttttaaaattagtatttcattacaaatgtctcagcattggttaactaatttttgccaggaccattattgatcaagcaaataaattcaacagccatttgggaaaaag

SEQ ID NO: 306676 - DNA, 627 bp, Homo sapiens
  misc_feature (476)..(476): n is a, c, g, or t
gtccatccgatgagacggatgctctgatgctctgaggcttctgggaggctgggccctggaggcaacgtgctgcaggcgcactctgtcagagtgaacagcaccgcgagacaggccaggctcgtggctcggaagacaaaccccacacacactcaaggggtcgaaaacaaaccccacacgagggctctcacctccttctcctaggtagtatttattttcagcacctgtttgatgcagtttttaatcctctacctattgcactgttgtgactcgttggccattatttgatttttgtacgaaaaaaagctttgttatagaaatcagcatactatttttttaaatctggagagaagatattctggtgactgaaagtatggtcgggtgtcagatataaatgtgcaaatgccttcttgctgtcctgtcggtctcagtacgttcactttatagctgctggcaatatcgaaggttccttttttttnttttttttttttttcccaaatgggctgttgattttatttgcttgatcaataatgtccttgcaaaaattagttaccaatgctgagacatttgaaatgaattctaattttaaaaaatcatgacacttggttagaatttgagttaccacaacca

SEQ ID NO: 306677 - DNA, 588 bp, Homo sapiens
cagagtccaaacagtgcccagagtccaaacagtgctcagagtccaaacagtgcccagagtccaaacagtgccgcgagacaggccaggctcgtggctcggaagacaaaccccacacacactcaaggggtcgaaaacaaaccccacacgagggctctcacctccttctcctaggtagtatttattttcagcacctgtttgatgcagtttttaatcctctacctattgcactgttgtgactcgttggccattatttgatttttgtacgaaaaaaagctttgttatagaaatcagcatactatttttttaaatctggagagaagatattctggtgactgaaagtatggtcgggtgtcagatataaatgtgcaaatgccttcttgctgtcctgtcggtctcagtacgttcactttatagctgctggcaatatcgaaggttccttttttgtttgtgtaaactctaatttctatcaaggtgtcatggatttttaaaattagtatttcattacaaatgtctcagcattggttaactaatttttgccaggaccattattgatcaagcaaataaattcaacagccatttgggaaaaag

SEQ ID NO: 306678 - DNA, 1284 bp, Homo sapiens
cagagtccaaacagtgcccagagtccaaacagtgctcagagtccaaacagtgcccagagtccaaacagtgccgcgagacaggccaggctcgtggctcggaagacaaaccccacacacactcaaggggtcgaaaacaaaccccacacgagggctctcacctccttctcctaggtagtatttattttcagcacctgtttgatgcagtttttaatcctctacctattgcactgttgtgactcgttggccattatttgatttttgtacgaaaaaaagctttgttatagaaatcagcatactatttttttaaatctggagagaagatattctggtgactgaaagtatggtcgggtgtcagatataaatgtgcaaatgccttcttgctgtcctgtcggtctcagtacgttcactttatagctgctggcaatatcgaaggttccttttttgtttgtgtaaactctaatttctatcaaggtgtcatggatttttaaaattagtatttcattacaaatgtctcagcattggttaactaatttttgccaggaccattattgatcaagcaaataaattcaacagccatttgggaaaaaggcttctagtttttttgtacacattctttctgtgaggagattgagtactctgcagctggcgaggagttggttgaggcacttcttcaaggccaagggggaacacagtgttttgtttccagctcactttgtacccctcacctctgcagacacggggagaaccccggacccctggcatgcatgctggcggggcatgcctcccttccacaagcccatgctgctgcagagggagcctgtgtttgcaaaacccagtggactgggctgggtctgctgtctgagcaagctcctggctccggtgggaactgcacacaaagtccactggcctggcttggcccaggcattgcaattgaccagacatttgcatttcatacggtaaatgaggaccttcagcacagcaaccataatcagcatgtctgggatagactgctctagaatagaaatgaagtgtccattgcttcgttgcttagcaattcccataatatctgtcatgaaggttaagaaacacgagacacaataccaaaaaaggggcgcgcacaaaattcacggagggcgccaaaacggtacaccttttgacaagggccccacggggcataacactgacgcgaggatcacagatccggaacgcgacggcacgcgaacacctcggcgacgacaccgcactaggcggcactgatggacgccggagagtgaattataaaag

SEQ ID NO: 306679 - DNA, 1234 bp, Homo sapiens
cagagtccaaacagtgcccagagtccaaacagtgctcagagtccaaacagtgcccagagtccaaacagtgccgcgagacaggccaggctcgtggctcggaagacaaaccccacacacactcaaggggtcgaaaacaaaccccacacgagggctctcacctccttctcctaggtagtatttattttcagcacctgtttgatgcagtttttaatcctctacctattgcactgttgtgactcgttggccattatttgatttttgtacgaaaaaaagctttgttatagaaatcagcatactatttttttaaatctggagagaagatattctggtgactgaaagtatggtcgggtgtcagatataaatgtgcaaatgccttcttgctgtcctgtcggtctcagtacgttcactttatagctgctggcaatatcgaaggttccttttttgtttgtgtaaactctaatttctatcaaggtgtcatggatttttaaaattagtatttcattacaaatgtctcagcattggttaactaatttttgccaggaccattattgatcaagcaaataaattcaacagccatttgggaaaaaggcagctggcgaggagttggttgaggcacttcttcaaggccaagggggaacacagtgttttgtttccagctcactttgtacccctcacctctgcagacacggggagaaccccggacccctggcatgcatgctggcggggcatgcctcccttccacaagcccatgctgctgcagagggagcctgtgtttgcaaaacccagtggactgggctgggtctgctgtctgagcaagctcctggctccggtgggaactgcacacaaagtccactggcctggcttggcccaggcattgcaattgaccagacatttgcatttcatacggtaaatgaggaccttcagcacagcaaccataatcagcatgtctgggatagactgctctagaatagaaatgaagtgtccattgcttcgttgcttagcaattcccataatatctgtcatgaaggttaagaaacacgagacacaataccaaaaaaggggcgcgcacaaaattcacggagggcgccaaaacggtacaccttttgacaagggccccacggggcataacactgacgcgaggatcacagatccggaacgcgacggcacgcgaacacctcggcgacgacaccgcactaggcggcactgatggacgccggagagtgaattataaaag

SEQ ID NO: 306680 - DNA, 541 bp, Homo sapiens
cagagtccaaacagtgcccagagtccaaacagtgctcagagtccaaacagtgcccagagtccaaacagtgccgcgagacaggccaggctcgtggctcggaagacaaaccccacacacactcaaggggtcgaaaacaaaccccacacgagggctctcacctccttctcctaggtagtatttattttcagcacctgtttgatgcagtttttaatcctctacctattgcactgttgtgactcgttggccattatttgatttttgtacgaaaaaaagctttgttatagaaatcagcatactatttttttaaatctggagagaagatattctggtgactgaaagtatggtcgggtgtcagatataaatgtgcaaatgccttcttgctgtcctgtcggtctcagtacgttcactttatagctgctggcaatatcgaaggttccttttttagtgaaatcatagctaatcaatactatcattttattagtatgagttgagcaaatatccatgcataagtgctagagtgcaacacctttagaaatatcaa

SEQ ID NO: 306681 - DNA, 862 bp, Homo sapiens
cctgagtagctgggactacaggcgcccgccaccacgcctggctaatttttttgtatttttagtagagacggggtttcaccatgttagccaggatgatctcgatatcctgacctcatgatcggctcgcctcggcctcccaaagtgctgggattacaggcatgagccaccgcgcctggcctgaccttgttgatttctatacaaagacatttcagttgcaactattcccttagaacataggcatatagtatagctaccttaagggaatgtaatatgtcaagacctagatttatgaagtaagaataacgagaatcctcacattgcagaagtactcactgcagatttctgtgtgaccacaataatacctgacatgattttctgtgcacactacacttgtatttatattgttcttgacctgtaaaattatggtgcccaggagagaaagttttctcttttcatgcttgccaacatttaaaaaattaaagagttatatatatatgatgctacaaaggatggtgattaacaaaggctttgtgttgctacttagatcatccagcgggaggtattcactatgaaatgtgcatagaatgtccacctactttcagtgacaagagagaacaaatatcagaaaatccaacagaagccacagatattggtaatttgtttaataaataatttttagtaagtagttaacactggcaggaatgagaaaagctcatttgccattgtgaaatgacacttgccaagaataaaacatgattttccaaagttgcttggactagtcatgaaataaatgaaatacttaattctatttcacattgagattaaaaactaaaatagaaaactgcagtataaaaaatctttt

SEQ ID NO: 306682 - DNA, 586 bp, Homo sapiens
cctgccaggtggtggttgtctgaaaatttatttcatttcctttcagtttaatgttagaaattaccctgctggtacctagagtccattttcatccattgttttttaaaataaatgttcttaagctgtctatttaaccttacttacgcttcattagaaaatacctgtgtgtcaaccatacatattttatgaatttttttctcgtagttgatcacagccgagttaaattgacattaaagactccttcacaagattcagactatatcaatgcaaattttataaaggtatgtactaactttaaatggtgtttctctgccatattaatgtctttctacatactagttttgtaaaaactttttgaattgctcaaacatgataccaacagcaaaagaaataaaaataaagccactgccctggcacaatgtttttatatgctttccttctagccttcttattcatatagataaatagtttctacttagttttgtgatagcagagataacattttcttttttatttcttctttcccatggaagtcttacctattactaaattattttctcagttatccctttggacaaaatgaaca

SEQ ID NO: 306683 - DNA, 595 bp, Homo sapiens
taaaatggtgttaaacgcattcaatatttaaataattataaatatatttttaattaatagtgctatttataattaggtaaatatcctaaaagtgatattttaatataatttcagaagtcacaaagtaaatctgtaagatttacatgatttaattcaaaccaaaaacatcatgttaattggaaccaatttaatttgttgctgtatagttagcccttgtttggaaagtctaattttgataatttctttaacttacacatttaatattgaaactacttttttaggcaagccaattatacttctcggtgcaaaattcttgaaatctgtattttattaaaaagtaaaattgtgtttaactgatacgttctttatctcactccccaccatcactttttagatcattgtaatggcctgccgagaatttgagatgggaaggaaaaaatgtgagcgctattggcctttgtatggagaagaccccataacgtttgcaccatttaaaatttcttgtgtaagtatccatttttgtaaacacttttttcagaaaattggcatgctatactgatgaataattaaattataatgtggtatgaacccaggc

SEQ ID NO: 306684 - DNA, 602 bp, Homo sapiens
aacacagctgtatgttccttcatgcagtagcccatgcttttcagtgctcatccagaaacatttactccaaggagaaatagcataacattttaaaattttaagcctaattaaaaaacaattgtttgcttttcctctgatgctgaaaatgataggccttgatttcttgggatatatacccataacagacccagctttctattatttgtatataaaatgaatgtattgtaataggtattaaatgtcttcctcgtagggcttgataacctctgaaaatgagaaatgtgatcatccagcgggaggtattcactatgaaatgtgcatagaatgtccacctactttcagtgacaagagagaacaaatatcagaaaatccaacagaagccacagatattggtaatttgtttaataaataatttttagtaagtagttaacactggcaggaatgagaaaagctcatttgccattgtgaaatgacacttgccaagaataaaacatgattttccaaagttgcttggactagtcatgaaataaatgaaatacttaattctatttcacattgagattaaaaactaaaatagaaaactgcagtataaaaaatctttt

SEQ ID NO: 306685 - DNA, 3922 bp, Homo sapiens
catctgtctacttggaaaggctaaagatcctccgacagcgatgtggtctggacaacacaaagcaagatgaccgacctcctttgacctctttgctctccaaaccagcagttcctactgtcgcctcttccacagacatgctccacagcaaactctctcagctccgggagtcacgggagcagcaccagcattcagacctggattctaaccagactcactcttcaggagggagccgcggggcttggcggggtcgggagggagggacgtgctgggggaacgagctggggaagacggagcgggctctgtgccgggcgggcgggcggcgggggggccagcgaccgcagccggggggacgcgggaggatggagcaagtggagatcctgaggaaattcatccagagggtccaggccatgaagagtcctgaccacaatggggaggacaacttcgcccgggacttcatgcggttaagaagattgtctaccaaatatagaacagaaaagatatatcccacagccactggagaaaaagaagaaaatgttaaaaagaacagatacaaggacatactgccatttgatcacagccgagttaaattgacattaaagactccttcacaagattcagactatatcaatgcaaattttataaagggcgtctatgggccaaaagcatatgtagcaactcaaggacctttagcaaatacagtaatagatttttggaggatgatatgggagtataatgttgtgatcattgtaatggcctgccgagaatttgagatgggaaggaaaaaatgtgagcgctattggcctttgtatggagaagaccccataacgtttgcaccatttaaaatttcttgtgaggatgaacaagcaagaacagactacttcatcaggacactcttacttgaatttcaaaatgaatctcgtaggctgtatcagtttcattatgtgaactggccagaccatgatgttccttcatcatttgattctattctggacatgataagcttaatgaggaaatatcaagaacatgaagatgttcctatttgtattcattgcagtgcaggctgtggaagaacaggtgccatttgtgccatagattatacgtggaatttactaaaagctgggaaaataccagaggaatttaatgtatttaatttaatacaagaaatgagaacacaaaggcattctgcagtacaaacaaaggagcaatatgaacttgttcatagagctattgcccaactgtttgaaaaacagctacaactatatgaaattcatggagctcagaaaattgctgatggagtgaatgaaattaacactgaaaacatgatcagctccatagagcctgaaaaacaagattctcctcctccaaaaccaccaaggacccgcagttgccttgttgaaggggatgctaaagaagaaatactgcagccaccggaacctcatccagtgccacccatcttgacaccttctcccccttcagcttttccaacagtcactactgtgtggcaggacaatgatagataccatccaaagccagtgttgcatatggtttcatcagaacaacattcagcagacctcaacagaaactatagtaaatcaacagaacttccagggaaaaatgaatcaacaattgaacagatagataaaaaattggaacgaaatttaagttttgagattaagaaggtccctctccaagagggaccaaaaagttttgatgggaacacacttttgaataggggacatgcaattaaaattaaatctgcttcaccttgtatagctgataaaatctctaagccacaggaattaagttcagatctaaatgtcggtgatacttcccagaattcttgtgtggactgcagtgtaacacaatcaaacaaagtttcagttactccaccagaagaatcccagaattcagacacacctccaaggccagaccgcttgcctcttgatgagaaaggacatgtaacgtggtcatttcatggacctgaaaatgccatacccatacctgatttatctgaaggcaattcctcagatatcaactatcaaactaggaaaactgtgagtttaacaccaagtcctacaacacaagttgaaacacctgatcttgtggatcatgataacacttcaccactcttcagaacacccctcagttttactaatccacttcactctgatgactcagactcagatgaaagaaactctgatggtgctgtgacccagaataaaactaatatttcaacagcaagtgccacagtttctgctgccactagtactgaaagcatttctactaggaaagtattgccaatgtccattgctagacataatatagcaggaacaacacattcaggtgctgaaaaagatgttgatgttagtgaagattcacctcctcccctacctgaaagaactcctgaatcgtttgtgttagcaagtgaacataatacacctgtaagatcggaatggagtgaacttcaaagtcaggaacgatctgaacaaaaaaagtctgaaggcttgataacctctgaaaatgagaaatgtgatcatccagcgggaggtattcactatgaaatgtgcatagaatgtccacctactttcagtgacaagagagaacaaatatcagaaaatccaacagaagccacagatattggttttggtaatcgatgtggaaaacccaaaggaccaagagatccaccttcagaatggacatgattcagggagctagaagacactttaagttatactggaaaattcaggtgccactgaaagccagatttatagtattccatctttaatatgtgggactaacagcagtgtagattgttaccttaatattttttgctgggaccatctacctgccttatactacacttaggaaaaagtattacatatggtttattttgaaacttcaagtattattgccttaatgtctcttaaccctgttacacgctgcttgtagacatgttaatatagtaatacctttatgatatattgagtttaaggactactctttttctgttttatcatgtatgcattattttgtatatgtacagggcaagtaggtatataatttgataaagttgcaattgaaatattattaacagaagatgtaagaaatttctgcatggtctaaatctttgtgtactttatttgtaaattatttgccctggagttttagaaaatagtttctgaattttaaacttgctggattcatgcagccagctttgcaggttatcagagatcaaagattgtaataataattttgtaaattgtaagcaaaaagttatttttatattatatacagtctaattgttcatcctaattgttcctgttttcatctagtcagagattcagtaagtgccttggaacaatattgaattctcttagcttgtgtgtgtttctttaatatttgaactcaagtgggattagaagactatcaaaatacatgtatgtttcaggatatttgacctgtcattaaaaaaaacaaacagttttacagtgttcgtgccgaattcggcacgagtcacactgctttcaagctggactgagccagtttcattttgggaaagaaacgctgtgtccagaactcagcagctccatttattttttccagtcgaaagaaactgatctttaggcagtttttacttggccagaaagcagtgctgaatacttgaaactgtgtggtctgttctacttaatgttctgtcagaatgttcttttgtaggcagtatgtcatgatgtaatcatctatctccttgtctgtttccaagttacactgtgaagtttgcgacccttttaaggtggtcatcaaagacacagattccttgtttaaccaagtgtcccaaagcatgtacctgaagttatatcattttttattttaaaaagatatgcagcttatattttgaaaactattaaaacatatgcccctgtta

SEQ ID NO: 306686 - DNA, 3844 bp, Homo sapiens
cccgtggggagaggcggctgcggctgcggctgcggctgctggcggggggtgggggggaggaggaaccgggaagggggggcagggcgagcggagagctagctgtgttcctgaggcgcagccgccgcctagggcggtggggaggaggagggagccgcggggcttggcggggtcgggagggagggacgtgctgggggaacgagctggggaagacggagcgggctctgtgccgggcgggcgggcggcgggggggccagcgaccgcagccggggggacgcgggaggatggagcaagtggagatcctgaggaaattcatccagagggtccaggccatgaagagtcctgaccacaatggggaggacaacttcgcccgggacttcatgcggttaagaagattgtctaccaaatatagaacagaaaagatatatcccacagccactggagaaaaagaagaaaatgttaaaaagaacagatacaaggacatactgccatttgatcacagccgagttaaattgacattaaagactccttcacaagattcagactatatcaatgcaaattttataaagggcgtctatgggccaaaagcatatgtagcaactcaaggacctttagcaaatacagtaatagatttttggaggatgatatgggagtataatgttgtgatcattgtaatggcctgccgagaatttgagatgggaaggaaaaaatgtgagcgctattggcctttgtatggagaagaccccataacgtttgcaccatttaaaatttcttgtgaggatgaacaagcaagaacagactacttcatcaggacactcttacttgaatttcaaaatgaatctcgtaggctgtatcagtttcattatgtgaactggccagaccatgatgttccttcatcatttgattctattctggacatgataagcttaatgaggaaatatcaagaacatgaagatgttcctatttgtattcattgcagtgcaggctgtggaagaacaggtgccatttgtgccatagattatacgtggaatttactaaaagctgggaaaataccagaggaatttaatgtatttaatttaatacaagaaatgagaacacaaaggcattctgcagtacaaacaaaggagcaatatgaacttgttcatagagctattgcccaactgtttgaaaaacagctacaactatatgaaattcatggagctcagaaaattgctgatggagtgaatgaaattaacactgaaaacatgatcagctccatagagcctgaaaaacaagattctcctcctccaaaaccaccaaggacccgcagttgccttgttgaaggggatgctaaagaagaaatactgcagccaccggaacctcatccagtgccacccatcttgacaccttctcccccttcagcttttccaacagtcactactgtgtggcaggacaatgatagataccatccaaagccagtgttgcatatggtttcatcagaacaacattcagcagacctcaacagaaactatagtaaatcaacagaacttccagggaaaaatgaatcaacaattgaacagatagataaaaaattggaacgaaatttaagttttgagattaagaaggtccctctccaagagggaccaaaaagttttgatgggaacacacttttgaataggggacatgcaattaaaattaaatctgcttcaccttgtatagctgataaaatctctaagccacaggaattaagttcagatctaaatgtcggtgatacttcccagaattcttgtgtggactgcagtgtaacacaatcaaacaaagtttcagttactccaccagaagaatcccagaattcagacacacctccaaggccagaccgcttgcctcttgatgagaaaggacatgtaacgtggtcatttcatggacctgaaaatgccatacccatacctgatttatctgaaggcaattcctcagatatcaactatcaaactaggaaaactgtgagtttaacaccaagtcctacaacacaagttgaaacacctgatcttgtggatcatgataacacttcaccactcttcagaacacccctcagttttactaatccacttcactctgatgactcagactcagatgaaagaaactctgatggtgctgtgacccagaataaaactaatatttcaacagcaagtgccacagtttctgctgccactagtactgaaagcatttctactaggaaagtattgccaatgtccattgctagacataatatagcaggaacaacacattcaggtgctgaaaaagatgttgatgttagtgaagattcacctcctcccctacctgaaagaactcctgaatcgtttgtgttagcaagtgaacataatacacctgtaagatcggaatggagtgaacttcaaagtcaggaacgatctgaacaaaaaaagtctgaaggcttgataacctctgaaaatgagaaatgtgatcatccagcgggaggtattcactatgaaatgtgcatagaatgtccacctactttcagtgacaagagagaacaaatatcagaaaatccaacagaagccacagatattggttttggtaatcgatgtggaaaacccaaaggaccaagagatccaccttcagaatggacatgattcagggagctagaagacactttaagttatactggaaaattcaggtgccactgaaagccagatttatagtattccatctttaatatgtgggactaacagcagtgtagattgttaccttaatattttttgctgggaccatctacctgccttatactacacttaggaaaaagtattacatatggtttattttgaaacttcaagtattattgccttaatgtctcttaaccctgttacacgctgcttgtagacatgttaatatagtaatacctttatgatatattgagtttaaggactactctttttctgttttatcatgtatgcattattttgtatatgtacagggcaagtaggtatataatttgataaagttgcaattgaaatattattaacagaagatgtaagaaatttctgcatggtctaaatctttgtgtactttatttgtaaattatttgccctggagttttagaaaatagtttctgaattttaaacttgctggattcatgcagccagctttgcaggttatcagagatcaaagattgtaataataattttgtaaattgtaagcaaaaagttatttttatattatatacagtctaattgttcatcctaattgttcctgttttcatctagtcagagattcagtaagtgccttggaacaatattgaattctcttagcttgtgtgtgtttctttaatatttgaactcaagtgggattagaagactatcaaaatacatgtatgtttcaggatatttgacctgtcattaaaaaaaacaaacagttttacagtgttcgtgccgaattcggcacgagtcacactgctttcaagctggactgagccagtttcattttgggaaagaaacgctgtgtccagaactcagcagctccatttattttttccagtcgaaagaaactgatctttaggcagtttttacttggccagaaagcagtgctgaatacttgaaactgtgtggtctgttctacttaatgttctgtcagaatgttcttttgtaggcagtatgtcatgatgtaatcatctatctccttgtctgtttccaagttacactgtgaagtttgcgacccttttaaggtggtcatcaaagacacagattccttgtttaaccaagtgtcccaaagcatgtacctgaagttatatcattttttattttaaaaagatatgcagcttatattttgaaaactattaaaacatatgcccctgtta

SEQ ID NO: 306687 - DNA, 3506 bp, Homo sapiens
aggagtgcagatcgtggctgacagaggaacgggggtattgagcggttaagaagattgtctaccaaatatagaacagaaaagatatatcccacagccactggagaaaaagaagaaaatgttaaaaagaacagatacaaggacatactgccatttgatcacagccgagttaaattgacattaaagactccttcacaagattcagactatatcaatgcaaattttataaagggcgtctatgggccaaaagcatatgtagcaactcaaggacctttagcaaatacagtaatagatttttggaggatgatatgggagtataatgttgtgatcattgtaatggcctgccgagaatttgagatgggaaggaaaaaatgtgagcgctattggcctttgtatggagaagaccccataacgtttgcaccatttaaaatttcttgtgaggatgaacaagcaagaacagactacttcatcaggacactcttacttgaatttcaaaatgaatctcgtaggctgtatcagtttcattatgtgaactggccagaccatgatgttccttcatcatttgattctattctggacatgataagcttaatgaggaaatatcaagaacatgaagatgttcctatttgtattcattgcagtgcaggctgtggaagaacaggtgccatttgtgccatagattatacgtggaatttactaaaagctgggaaaataccagaggaatttaatgtatttaatttaatacaagaaatgagaacacaaaggcattctgcagtacaaacaaaggagcaatatgaacttgttcatagagctattgcccaactgtttgaaaaacagctacaactatatgaaattcatggagctcagaaaattgctgatggagtgaatgaaattaacactgaaaacatgatcagctccatagagcctgaaaaacaagattctcctcctccaaaaccaccaaggacccgcagttgccttgttgaaggggatgctaaagaagaaatactgcagccaccggaacctcatccagtgccacccatcttgacaccttctcccccttcagcttttccaacagtcactactgtgtggcaggacaatgatagataccatccaaagccagtgttgcatatggtttcatcagaacaacattcagcagacctcaacagaaactatagtaaatcaacagaacttccagggaaaaatgaatcaacaattgaacagatagataaaaaattggaacgaaatttaagttttgagattaagaaggtccctctccaagagggaccaaaaagttttgatgggaacacacttttgaataggggacatgcaattaaaattaaatctgcttcaccttgtatagctgataaaatctctaagccacaggaattaagttcagatctaaatgtcggtgatacttcccagaattcttgtgtggactgcagtgtaacacaatcaaacaaagtttcagttactccaccagaagaatcccagaattcagacacacctccaaggccagaccgcttgcctcttgatgagaaaggacatgtaacgtggtcatttcatggacctgaaaatgccatacccatacctgatttatctgaaggcaattcctcagatatcaactatcaaactaggaaaactgtgagtttaacaccaagtcctacaacacaagttgaaacacctgatcttgtggatcatgataacacttcaccactcttcagaacacccctcagttttactaatccacttcactctgatgactcagactcagatgaaagaaactctgatggtgctgtgacccagaataaaactaatatttcaacagcaagtgccacagtttctgctgccactagtactgaaagcatttctactaggaaagtattgccaatgtccattgctagacataatatagcaggaacaacacattcaggtgctgaaaaagatgttgatgttagtgaagattcacctcctcccctacctgaaagaactcctgaatcgtttgtgttagcaagtgaacataatacacctgtaagatcggaatggagtgaacttcaaagtcaggaacgatctgaacaaaaaaagtctgaaggcttgataacctctgaaaatgagaaatgtgatcatccagcgggaggtattcactatgaaatgtgcatagaatgtccacctactttcagtgacaagagagaacaaatatcagaaaatccaacagaagccacagatattggttttggtaatcgatgtggaaaacccaaaggaccaagagatccaccttcagaatggacatgattcagggagctagaagacactttaagttatactggaaaattcaggtgccactgaaagccagatttatagtattccatctttaatatgtgggactaacagcagtgtagattgttaccttaatattttttgctgggaccatctacctgccttatactacacttaggaaaaagtattacatatggtttattttgaaacttcaagtattattgccttaatgtctcttaaccctgttacacgctgcttgtagacatgttaatatagtaatacctttatgatatattgagtttaaggactactctttttctgttttatcatgtatgcattattttgtatatgtacagggcaagtaggtatataatttgataaagttgcaattgaaatattattaacagaagatgtaagaaatttctgcatggtctaaatctttgtgtactttatttgtaaattatttgccctggagttttagaaaatagtttctgaattttaaacttgctggattcatgcagccagctttgcaggttatcagagatcaaagattgtaataataattttgtaaattgtaagcaaaaagttatttttatattatatacagtctaattgttcatcctaattgttcctgttttcatctagtcagagattcagtaagtgccttggaacaatattgaattctcttagcttgtgtgtgtttctttaatatttgaactcaagtgggattagaagactatcaaaatacatgtatgtttcaggatatttgacctgtcattaaaaaaaacaaacagttttacagtgttcgtgccgaattcggcacgagtcacactgctttcaagctggactgagccagtttcattttgggaaagaaacgctgtgtccagaactcagcagctccatttattttttccagtcgaaagaaactgatctttaggcagtttttacttggccagaaagcagtgctgaatacttgaaactgtgtggtctgttctacttaatgttctgtcagaatgttcttttgtaggcagtatgtcatgatgtaatcatctatctccttgtctgtttccaagttacactgtgaagtttgcgacccttttaaggtggtcatcaaagacacagattccttgtttaaccaagtgtcccaaagcatgtacctgaagttatatcattttttattttaaaaagatatgcagcttatattttgaaaactattaaaacatatgcccctgtta

SEQ ID NO: 306688 - DNA, 3845 bp, Homo sapiens
catctgtctacttggaaaggctaaagatcctccgacagcgatgtggtctggacaacacaaagcaagatgaccgacctcctttgacctctttgctctccaaaccagcagttcctactgtcgcctcttccacagacatgctccacagcaaactctctcagctccgggagtcacgggagcagcaccagcattcagacctggattctaaccagactcactcttcaggagggagccgcggggcttggcggggtcgggagggagggacgtgctgggggaacgagctggggaagacggagcgggctctgtgccgggcgggcgggcggcgggggggccagcgaccgcagccggggggacgcgggaggatggagcaagtggagatcctgaggaaattcatccagagggtccaggccatgaagagtcctgaccacaatggggaggacaacttcgcccgggacttcatgcggttaagaagattgtctaccaaatatagaacagaaaagatatatcccacagccactggagaaaaagaagaaaatgttaaaaagaacagatacaaggacatactgccatggcgtctatgggccaaaagcatatgtagcaactcaaggacctttagcaaatacagtaatagatttttggaggatgatatgggagtataatgttgtgatcattgtaatggcctgccgagaatttgagatgggaaggaaaaaatgtgagcgctattggcctttgtatggagaagaccccataacgtttgcaccatttaaaatttcttgtgaggatgaacaagcaagaacagactacttcatcaggacactcttacttgaatttcaaaatgaatctcgtaggctgtatcagtttcattatgtgaactggccagaccatgatgttccttcatcatttgattctattctggacatgataagcttaatgaggaaatatcaagaacatgaagatgttcctatttgtattcattgcagtgcaggctgtggaagaacaggtgccatttgtgccatagattatacgtggaatttactaaaagctgggaaaataccagaggaatttaatgtatttaatttaatacaagaaatgagaacacaaaggcattctgcagtacaaacaaaggagcaatatgaacttgttcatagagctattgcccaactgtttgaaaaacagctacaactatatgaaattcatggagctcagaaaattgctgatggagtgaatgaaattaacactgaaaacatgatcagctccatagagcctgaaaaacaagattctcctcctccaaaaccaccaaggacccgcagttgccttgttgaaggggatgctaaagaagaaatactgcagccaccggaacctcatccagtgccacccatcttgacaccttctcccccttcagcttttccaacagtcactactgtgtggcaggacaatgatagataccatccaaagccagtgttgcatatggtttcatcagaacaacattcagcagacctcaacagaaactatagtaaatcaacagaacttccagggaaaaatgaatcaacaattgaacagatagataaaaaattggaacgaaatttaagttttgagattaagaaggtccctctccaagagggaccaaaaagttttgatgggaacacacttttgaataggggacatgcaattaaaattaaatctgcttcaccttgtatagctgataaaatctctaagccacaggaattaagttcagatctaaatgtcggtgatacttcccagaattcttgtgtggactgcagtgtaacacaatcaaacaaagtttcagttactccaccagaagaatcccagaattcagacacacctccaaggccagaccgcttgcctcttgatgagaaaggacatgtaacgtggtcatttcatggacctgaaaatgccatacccatacctgatttatctgaaggcaattcctcagatatcaactatcaaactaggaaaactgtgagtttaacaccaagtcctacaacacaagttgaaacacctgatcttgtggatcatgataacacttcaccactcttcagaacacccctcagttttactaatccacttcactctgatgactcagactcagatgaaagaaactctgatggtgctgtgacccagaataaaactaatatttcaacagcaagtgccacagtttctgctgccactagtactgaaagcatttctactaggaaagtattgccaatgtccattgctagacataatatagcaggaacaacacattcaggtgctgaaaaagatgttgatgttagtgaagattcacctcctcccctacctgaaagaactcctgaatcgtttgtgttagcaagtgaacataatacacctgtaagatcggaatggagtgaacttcaaagtcaggaacgatctgaacaaaaaaagtctgaaggcttgataacctctgaaaatgagaaatgtgatcatccagcgggaggtattcactatgaaatgtgcatagaatgtccacctactttcagtgacaagagagaacaaatatcagaaaatccaacagaagccacagatattggttttggtaatcgatgtggaaaacccaaaggaccaagagatccaccttcagaatggacatgattcagggagctagaagacactttaagttatactggaaaattcaggtgccactgaaagccagatttatagtattccatctttaatatgtgggactaacagcagtgtagattgttaccttaatattttttgctgggaccatctacctgccttatactacacttaggaaaaagtattacatatggtttattttgaaacttcaagtattattgccttaatgtctcttaaccctgttacacgctgcttgtagacatgttaatatagtaatacctttatgatatattgagtttaaggactactctttttctgttttatcatgtatgcattattttgtatatgtacagggcaagtaggtatataatttgataaagttgcaattgaaatattattaacagaagatgtaagaaatttctgcatggtctaaatctttgtgtactttatttgtaaattatttgccctggagttttagaaaatagtttctgaattttaaacttgctggattcatgcagccagctttgcaggttatcagagatcaaagattgtaataataattttgtaaattgtaagcaaaaagttatttttatattatatacagtctaattgttcatcctaattgttcctgttttcatctagtcagagattcagtaagtgccttggaacaatattgaattctcttagcttgtgtgtgtttctttaatatttgaactcaagtgggattagaagactatcaaaatacatgtatgtttcaggatatttgacctgtcattaaaaaaaacaaacagttttacagtgttcgtgccgaattcggcacgagtcacactgctttcaagctggactgagccagtttcattttgggaaagaaacgctgtgtccagaactcagcagctccatttattttttccagtcgaaagaaactgatctttaggcagtttttacttggccagaaagcagtgctgaatacttgaaactgtgtggtctgttctacttaatgttctgtcagaatgttcttttgtaggcagtatgtcatgatgtaatcatctatctccttgtctgtttccaagttacactgtgaagtttgcgacccttttaaggtggtcatcaaagacacagattccttgtttaaccaagtgtcccaaagcatgtacctgaagttatatcattttttattttaaaaagatatgcagcttatattttgaaaactattaaaacatatgcccctgtta

SEQ ID NO: 306689 - DNA, 3885 bp, Homo sapiens
catctgtctacttggaaaggctaaagatcctccgacagcgatgtggtctggacaacacaaagcaagatgaccgacctcctttgacctctttgctctccaaaccagcagttcctactgtcgcctcttccacagacatgctccacagcaaactctctcagctccgggagtcacgggagcagcaccagcattcagacctggattctaaccagactcactcttcaggagggagccgcggggcttggcggggtcgggagggagggacgtgctgggggaacgagctggggaagacggagcgggctctgtgccgggcgggcgggcggcgggggggccagcgaccgcagccggggggacgcgggaggatggagcaagtggagatcctgaggaaattcatccagagggtccaggccatgaagagtcctgaccacaatggggaggacaacttcgcccgggacttcatgcggttaagaagattgtctaccaaatatagaacagaaaagatatatcccacagccactggagaaaaagaagaaaatgttaaaaagaacagatacaaggacatactgccatttgatcacagccgagttaaattgacattaaagactccttcacaagattcagactatatcaatgcaaattttataaagggcgtctatgggccaaaagcatatgtagcaactcaaggacctttagcaaatacagtaatagatttttggaggatgatatgggagtataatgttgtgatcattgtaatggcctgccgagaatttgagatgggaaggaaaaaatgtgagcgctattggcctttgtatggagaagaccccataacgtttgcaccatttaaaatttcttgtgaggatgaacaagcaagaacagactacttcatcaggacactcttacttgaatttcaaaatgaatctcgtaggctgtatcagtttcattatgtgaactggccagaccatgatgttccttcatcatttgattctattctggacatgataagcttaatgaggaaatatcaagaacatgaagatgttcctatttgtattcattgcagtgcaggctgtggaagaacaggtgccatttgtgccatagattatacgtggaatttactaaaagctgggaaaataccagaggaatttaatgtatttaatttaatacaagaaatgagaacacaaaggcattctgcagtacaaacaaaggagcaatatgaacttgttcatagagctattgcccaactgtttgaaaaacagctacaactatatgaaattcatggagctcagaaaattgctgatggagtgagcctgaaaaacaagattctcctcctccaaaaccaccaaggacccgcagttgccttgttgaaggggatgctaaagaagaaatactgcagccaccggaacctcatccagtgccacccatcttgacaccttctcccccttcagcttttccaacagtcactactgtgtggcaggacaatgatagataccatccaaagccagtgttgcatatggtttcatcagaacaacattcagcagacctcaacagaaactatagtaaatcaacagaacttccagggaaaaatgaatcaacaattgaacagatagataaaaaattggaacgaaatttaagttttgagattaagaaggtccctctccaagagggaccaaaaagttttgatgggaacacacttttgaataggggacatgcaattaaaattaaatctgcttcaccttgtatagctgataaaatctctaagccacaggaattaagttcagatctaaatgtcggtgatacttcccagaattcttgtgtggactgcagtgtaacacaatcaaacaaagtttcagttactccaccagaagaatcccagaattcagacacacctccaaggccagaccgcttgcctcttgatgagaaaggacatgtaacgtggtcatttcatggacctgaaaatgccatacccatacctgatttatctgaaggcaattcctcagatatcaactatcaaactaggaaaactgtgagtttaacaccaagtcctacaacacaagttgaaacacctgatcttgtggatcatgataacacttcaccactcttcagaacacccctcagttttactaatccacttcactctgatgactcagactcagatgaaagaaactctgatggtgctgtgacccagaataaaactaatatttcaacagcaagtgccacagtttctgctgccactagtactgaaagcatttctactaggaaagtattgccaatgtccattgctagacataatatagcaggaacaacacattcaggtgctgaaaaagatgttgatgttagtgaagattcacctcctcccctacctgaaagaactcctgaatcgtttgtgttagcaagtgaacataatacacctgtaagatcggaatggagtgaacttcaaagtcaggaacgatctgaacaaaaaaagtctgaaggcttgataacctctgaaaatgagaaatgtgatcatccagcgggaggtattcactatgaaatgtgcatagaatgtccacctactttcagtgacaagagagaacaaatatcagaaaatccaacagaagccacagatattggttttggtaatcgatgtggaaaacccaaaggaccaagagatccaccttcagaatggacatgattcagggagctagaagacactttaagttatactggaaaattcaggtgccactgaaagccagatttatagtattccatctttaatatgtgggactaacagcagtgtagattgttaccttaatattttttgctgggaccatctacctgccttatactacacttaggaaaaagtattacatatggtttattttgaaacttcaagtattattgccttaatgtctcttaaccctgttacacgctgcttgtagacatgttaatatagtaatacctttatgatatattgagtttaaggactactctttttctgttttatcatgtatgcattattttgtatatgtacagggcaagtaggtatataatttgataaagttgcaattgaaatattattaacagaagatgtaagaaatttctgcatggtctaaatctttgtgtactttatttgtaaattatttgccctggagttttagaaaatagtttctgaattttaaacttgctggattcatgcagccagctttgcaggttatcagagatcaaagattgtaataataattttgtaaattgtaagcaaaaagttatttttatattatatacagtctaattgttcatcctaattgttcctgttttcatctagtcagagattcagtaagtgccttggaacaatattgaattctcttagcttgtgtgtgtttctttaatatttgaactcaagtgggattagaagactatcaaaatacatgtatgtttcaggatatttgacctgtcattaaaaaaaacaaacagttttacagtgttcgtgccgaattcggcacgagtcacactgctttcaagctggactgagccagtttcattttgggaaagaaacgctgtgtccagaactcagcagctccatttattttttccagtcgaaagaaactgatctttaggcagtttttacttggccagaaagcagtgctgaatacttgaaactgtgtggtctgttctacttaatgttctgtcagaatgttcttttgtaggcagtatgtcatgatgtaatcatctatctccttgtctgtttccaagttacactgtgaagtttgcgacccttttaaggtggtcatcaaagacacagattccttgtttaaccaagtgtcccaaagcatgtacctgaagttatatcattttttattttaaaaagatatgcagcttatattttgaaaactattaaaacatatgcccctgtta

SEQ ID NO: 306690 - DNA, 3918 bp, Homo sapiens
catctgtctacttggaaaggctaaagatcctccgacagcgatgtggtctggacaacacaaagcaagatgaccgacctcctttgacctctttgctctccaaaccagcagttcctactgtcgcctcttccacagacatgctccacagcaaactctctcagctccgggagtcacgggagcagcaccagcattcagacctggattctaaccagactcactcttcaggagggagccgcggggcttggcggggtcgggagggagggacgtgctgggggaacgagctggggaagacggagcgggctctgtgccgggcgggcgggcggcgggggggccagcgaccgcagccggggggacgcgggaggatggagcaagtggagatcctgaggaaattcatccagagggtccaggccatgaagagtcctgaccacaatggggaggacaacttcgcccgggacttcatgctggacctggtggcacgcatctgtaattccagctactcaggaggctgaggcacaagaattgcttgaacctgggaagccgaggttgcagtgggccgagatcgcaccactgcactccagcctgggcaacagagtgagatcctgtctcaaaacaaacaaacaaagtgctgtgcggttaagaagattgtctaccaaatatagaacagaaaagatatatcccacagccactggagaaaaagaagaaaatgttaaaaagaacagatacaaggacatactgccatatcattgtaatggcctgccgagaatttgagatgggaaggaaaaaatgtgagcgctattggcctttgtatggagaagaccccataacgtttgcaccatttaaaatttcttgtgaggatgaacaagcaagaacagactacttcatcaggacactcttacttgaatttcaaaatgaatctcgtaggctgtatcagtttcattatgtgaactggccagaccatgatgttccttcatcatttgattctattctggacatgataagcttaatgaggaaatatcaagaacatgaagatgttcctatttgtattcattgcagtgcaggctgtggaagaacaggtgccatttgtgccatagattatacgtggaatttactaaaagctgggaaaataccagaggaatttaatgtatttaatttaatacaagaaatgagaacacaaaggcattctgcagtacaaacaaaggagcaatatgaacttgttcatagagctattgcccaactgtttgaaaaacagctacaactatatgaaattcatggagctcagaaaattgctgatggagtgaatgaaattaacactgaaaacatgatcagctccatagagcctgaaaaacaagattctcctcctccaaaaccaccaaggacccgcagttgccttgttgaaggggatgctaaagaagaaatactgcagccaccggaacctcatccagtgccacccatcttgacaccttctcccccttcagcttttccaacagtcactactgtgtggcaggacaatgatagataccatccaaagccagtgttgcatatggtttcatcagaacaacattcagcagacctcaacagaaactatagtaaatcaacagaacttccagggaaaaatgaatcaacaattgaacagatagataaaaaattggaacgaaatttaagttttgagattaagaaggtccctctccaagagggaccaaaaagttttgatgggaacacacttttgaataggggacatgcaattaaaattaaatctgcttcaccttgtatagctgataaaatctctaagccacaggaattaagttcagatctaaatgtcggtgatacttcccagaattcttgtgtggactgcagtgtaacacaatcaaacaaagtttcagttactccaccagaagaatcccagaattcagacacacctccaaggccagaccgcttgcctcttgatgagaaaggacatgtaacgtggtcatttcatggacctgaaaatgccatacccatacctgatttatctgaaggcaattcctcagatatcaactatcaaactaggaaaactgtgagtttaacaccaagtcctacaacacaagttgaaacacctgatcttgtggatcatgataacacttcaccactcttcagaacacccctcagttttactaatccacttcactctgatgactcagactcagatgaaagaaactctgatggtgctgtgacccagaataaaactaatatttcaacagcaagtgccacagtttctgctgccactagtactgaaagcatttctactaggaaagtattgccaatgtccattgctagacataatatagcaggaacaacacattcaggtgctgaaaaagatgttgatgttagtgaagattcacctcctcccctacctgaaagaactcctgaatcgtttgtgttagcaagtgaacataatacacctgtaagatcggaatggagtgaacttcaaagtcaggaacgatctgaacaaaaaaagtctgaaggcttgataacctctgaaaatgagaaatgtgatcatccagcgggaggtattcactatgaaatgtgcatagaatgtccacctactttcagtgacaagagagaacaaatatcagaaaatccaacagaagccacagatattggttttggtaatcgatgtggaaaacccaaaggaccaagagatccaccttcagaatggacatgattcagggagctagaagacactttaagttatactggaaaattcaggtgccactgaaagccagatttatagtattccatctttaatatgtgggactaacagcagtgtagattgttaccttaatattttttgctgggaccatctacctgccttatactacacttaggaaaaagtattacatatggtttattttgaaacttcaagtattattgccttaatgtctcttaaccctgttacacgctgcttgtagacatgttaatatagtaatacctttatgatatattgagtttaaggactactctttttctgttttatcatgtatgcattattttgtatatgtacagggcaagtaggtatataatttgataaagttgcaattgaaatattattaacagaagatgtaagaaatttctgcatggtctaaatctttgtgtactttatttgtaaattatttgccctggagttttagaaaatagtttctgaattttaaacttgctggattcatgcagccagctttgcaggttatcagagatcaaagattgtaataataattttgtaaattgtaagcaaaaagttatttttatattatatacagtctaattgttcatcctaattgttcctgttttcatctagtcagagattcagtaagtgccttggaacaatattgaattctcttagcttgtgtgtgtttctttaatatttgaactcaagtgggattagaagactatcaaaatacatgtatgtttcaggatatttgacctgtcattaaaaaaaacaaacagttttacagtgttcgtgccgaattcggcacgagtcacactgctttcaagctggactgagccagtttcattttgggaaagaaacgctgtgtccagaactcagcagctccatttattttttccagtcgaaagaaactgatctttaggcagtttttacttggccagaaagcagtgctgaatacttgaaactgtgtggtctgttctacttaatgttctgtcagaatgttcttttgtaggcagtatgtcatgatgtaatcatctatctccttgtctgtttccaagttacactgtgaagtttgcgacccttttaaggtggtcatcaaagacacagattccttgtttaaccaagtgtcccaaagcatgtacctgaagttatatcattttttattttaaaaagatatgcagcttatattttgaaaactattaaaacatatgcccctgtta

SEQ ID NO: 306691 - DNA, 3576 bp, Homo sapiens
taaaatggtgttaaacgcattcaatatttaaataattataaatatatttttaattaatagtgctatttataattaggtaaatatcctaaaagtgatattttaatataatttcagaagtcacaaagtaaatctgtaagatttacatgatttaattcaaaccaaaaacatcatgttaattggaaccaatttaatttgttgctgtatagttagcccttgtttggaaagtctaattttgataatttctttaacttacacatttaatattgaaactacttttttaggcaagccaattatacttctcggtgcaaaattcttgaaatctgtattttattaaaaagtaaaattgtgtttaactgatacgttctttatctcactccccaccatcactttttagatcattgtaatggcctgccgagaatttgagatgggaaggaaaaaatgtgagcgctattggcctttgtatggagaagaccccataacgtttgcaccatttaaaatttcttgtgaggatgaacaagcaagaacagactacttcatcaggacactcttacttgaatttcaaaatgaatctcgtaggctgtatcagtttcattatgtgaactggccagaccatgatgttccttcatcatttgattctattctggacatgataagcttaatgaggaaatatcaagaacatgaagatgttcctatttgtattcattgcagtgcaggctgtggaagaacaggtgccatttgtgccatagattatacgtggaatttactaaaagctgggaaaataccagaggaatttaatgtatttaatttaatacaagaaatgagaacacaaaggcattctgcagtacaaacaaaggagcaatatgaacttgttcatagagctattgcccaactgtttgaaaaacagctacaactatatgaaattcatggagctcagaaaattgctgatggagtgaatgaaattaacactgaaaacatgatcagctccatagagcctgaaaaacaagattctcctcctccaaaaccaccaaggacccgcagttgccttgttgaaggggatgctaaagaagaaatactgcagccaccggaacctcatccagtgccacccatcttgacaccttctcccccttcagcttttccaacagtcactactgtgtggcaggacaatgatagataccatccaaagccagtgttgcatatggtttcatcagaacaacattcagcagacctcaacagaaactatagtaaatcaacagaacttccagggaaaaatgaatcaacaattgaacagatagataaaaaattggaacgaaatttaagttttgagattaagaaggtccctctccaagagggaccaaaaagttttgatgggaacacacttttgaataggggacatgcaattaaaattaaatctgcttcaccttgtatagctgataaaatctctaagccacaggaattaagttcagatctaaatgtcggtgatacttcccagaattcttgtgtggactgcagtgtaacacaatcaaacaaagtttcagttactccaccagaagaatcccagaattcagacacacctccaaggccagaccgcttgcctcttgatgagaaaggacatgtaacgtggtcatttcatggacctgaaaatgccatacccatacctgatttatctgaaggcaattcctcagatatcaactatcaaactaggaaaactgtgagtttaacaccaagtcctacaacacaagttgaaacacctgatcttgtggatcatgataacacttcaccactcttcagaacacccctcagttttactaatccacttcactctgatgactcagactcagatgaaagaaactctgatggtgctgtgacccagaataaaactaatatttcaacagcaagtgccacagtttctgctgccactagtactgaaagcatttctactaggaaagtattgccaatgtccattgctagacataatatagcaggaacaacacattcaggtgctgaaaaagatgttgatgttagtgaagattcacctcctcccctacctgaaagaactcctgaatcgtttgtgttagcaagtgaacataatacacctgtaagatcggaatggagtgaacttcaaagtcaggaacgatctgaacaaaaaaagtctgaaggcttgataacctctgaaaatgagaaatgtgatcatccagcgggaggtattcactatgaaatgtgcatagaatgtccacctactttcagtgacaagagagaacaaatatcagaaaatccaacagaagccacagatattggttttggtaatcgatgtggaaaacccaaaggaccaagagatccaccttcagaatggacatgattcagggagctagaagacactttaagttatactggaaaattcaggtgccactgaaagccagatttatagtattccatctttaatatgtgggactaacagcagtgtagattgttaccttaatattttttgctgggaccatctacctgccttatactacacttaggaaaaagtattacatatggtttattttgaaacttcaagtattattgccttaatgtctcttaaccctgttacacgctgcttgtagacatgttaatatagtaatacctttatgatatattgagtttaaggactactctttttctgttttatcatgtatgcattattttgtatatgtacagggcaagtaggtatataatttgataaagttgcaattgaaatattattaacagaagatgtaagaaatttctgcatggtctaaatctttgtgtactttatttgtaaattatttgccctggagttttagaaaatagtttctgaattttaaacttgctggattcatgcagccagctttgcaggttatcagagatcaaagattgtaataataattttgtaaattgtaagcaaaaagttatttttatattatatacagtctaattgttcatcctaattgttcctgttttcatctagtcagagattcagtaagtgccttggaacaatattgaattctcttagcttgtgtgtgtttctttaatatttgaactcaagtgggattagaagactatcaaaatacatgtatgtttcaggatatttgacctgtcattaaaaaaaacaaacagttttacagtgttcgtgccgaattcggcacgagtcacactgctttcaagctggactgagccagtttcattttgggaaagaaacgctgtgtccagaactcagcagctccatttattttttccagtcgaaagaaactgatctttaggcagtttttacttggccagaaagcagtgctgaatacttgaaactgtgtggtctgttctacttaatgttctgtcagaatgttcttttgtaggcagtatgtcatgatgtaatcatctatctccttgtctgtttccaagttacactgtgaagtttgcgacccttttaaggtggtcatcaaagacacagattccttgtttaaccaagtgtcccaaagcatgtacctgaagttatatcattttttattttaaaaagatatgcagcttatattttgaaaactattaaaacatatgcccctgtta

SEQ ID NO: 306692 - DNA, 3977 bp, Homo sapiens
  misc_feature (2275)..(2275): n is a, c, g, or t
catctgtctacttggaaaggctaaagatcctccgacagcgatgtggtctggacaacacaaagcaagatgaccgacctcctttgacctctttgctctccaaaccagcagttcctactgtcgcctcttccacagacatgctccacagcaaactctctcagctccgggagtcacgggagcagcaccagcattcagacctggattctaaccagactcactcttcaggagggagccgcggggcttggcggggtcgggagggagggacgtgctgggggaacgagctggggaagacggagcgggctctgtgccgggcgggcgggcggcgggggggccagcgaccgcagccggggggacgcgggaggatggagcaagtggagatcctgaggaaattcatccagagggtccaggccatgaagagtcctgaccacaatggggaggacaacttcgcccgggacttcatgcggttaagaagattgtctaccaaatatagaacagaaaagatatatcccacagccactggagaaaaagaagaaaatgttaaaaagaacagatacaaggacatactgccatttgatcacagccgagttaaattgacattaaagactccttcacaagattcagactatatcaatgcaaattttataaagggcgtctatgggccaaaagcatatgtagcaactcaaggacctttagcaaatacagtaatagatttttggaggatgatatgggagtataatgttgtgatcattgtaatggcctgccgagaatttgagatgggaaggaaaaaatgtgagcgctattggcctttgtatggagaagaccccataacgtttgcaccatttaaaatttcttgtgaggatgaacaagcaagaacagactacttcatcaggacactcttacttgaatttcaaaatgaatctcgtaggctgtatcagtttcattatgtgaactggccagaccatgatgttccttcatcatttgattctattctggacatgataagcttaatgaggaaatatcaagaacatgaagatgttcctatttgtattcattgcagtgcaggctgtggaagaacaggtgccatttgtgccatagattatacgtggaatttactaaaagctgggaaaataccagaggaatttaatgtatttaatttaatacaagaaatgagaacacaaaggcattctgcagtacaaacaaaggagcaatatgaacttgttcatagagctattgcccaactgtttgaaaaacagctacaactatatgaaattcatggagctcagaaaattgctgatggagtgaatgaaattaacactgaaaacatgatcagctccatagagcctgaaaaacaagattctcctcctccaaaaccaccaaggacccgcagttgccttgttgaaggggatgctaaagaagaaatactgcagccaccggaacctcatccagtgccacccatcttgacaccttctcccccttcagcttttccaacagtcactactgtgtggcaggacaatgatagataccatccaaagccagtgttgcatatggtttcatcagaacaacattcagcagacctcaacagaaactatagtaaatcaacagaacttccagggaaaaatgaatcaacaattgaacagatagataaaaaattggaacgaaatttaagttttgagattaagaaggtccctctccaagagggaccaaaaagttttgatgggaacacacttttgaataggggacatgcaattaaaattaaatctgcttcaccttgtatagctgataaaatctctaagccacaggaattaagttcagatctaaatgtcggtgatacttcccagaattcttgtgtggactgcagtgtaacacaatcaaacaaagtttcagttactccaccagaagaatcccagaattcagacacacctccaaggccagaccgcttgcctcttgatgagaaaggacatgtaacgtggtcatttcatggacctgaaaatgccatacccatacctgatttatctgaaggcaattcctcagatatcaactatcaaactaggaaaactgtgagtttaacaccaagtcctacaacacaagttgaaacacctgatcttgtggatcatgataacacttcaccactcttcagaacacccctcagttttactaatccacttcactctgatgactcagactcagatgaaagaaactctgatggtgctgtgacccaggaattatacactcaatattatacaaacgacgcgaggtggccacacgtattcgttggctngccaactagttacctgaatgaggcgattctcggtaacgttacgagaaaacgtgatttgctcatactgatccgagtatgtctagaacagtaaactactagtcatggaactaacagcacttcagcgtgctgaaaaagatgttgatgttagtgaagattcacctcctcccctacctgaaagaactcctgaatcgtttgtgttagcaagtgaacataatacacctgtaagatcggaatggagtgaacttcaaagtcaggaacgatctgaacaaaaaaagtctgaaggcttgataacctctgaaaatgagaaatgtgatcatccagcgggaggtattcactatgaaatgtgcatagaatgtccacctactttcagtgacaagagagaacaaatatcagaaaatccaacagaagccacagatattggttttggtaatcgatgtggaaaacccaaaggaccaagagatccaccttcagaatggacatgattcagggagctagaagacactttaagttatactggaaaattcaggtgccactgaaagccagatttatagtattccatctttaatatgtgggactaacagcagtgtagattgttaccttaatattttttgctgggaccatctacctgccttatactacacttaggaaaaagtattacatatggtttattttgaaacttcaagtattattgccttaatgtctcttaaccctgttacacgctgcttgtagacatgttaatatagtaatacctttatgatatattgagtttaaggactactctttttctgttttatcatgtatgcattattttgtatatgtacagggcaagtaggtatataatttgataaagttgcaattgaaatattattaacagaagatgtaagaaatttctgcatggtctaaatctttgtgtactttatttgtaaattatttgccctggagttttagaaaatagtttctgaattttaaacttgctggattcatgcagccagctttgcaggttatcagagatcaaagattgtaataataattttgtaaattgtaagcaaaaagttatttttatattatatacagtctaattgttcatcctaattgttcctgttttcatctagtcagagattcagtaagtgccttggaacaatattgaattctcttagcttgtgtgtgtttctttaatatttgaactcaagtgggattagaagactatcaaaatacatgtatgtttcaggatatttgacctgtcattaaaaaaaacaaacagttttacagtgttcgtgccgaattcggcacgagtcacactgctttcaagctggactgagccagtttcattttgggaaagaaacgctgtgtccagaactcagcagctccatttattttttccagtcgaaagaaactgatctttaggcagtttttacttggccagaaagcagtgctgaatacttgaaactgtgtggtctgttctacttaatgttctgtcagaatgttcttttgtaggcagtatgtcatgatgtaatcatctatctccttgtctgtttccaagttacactgtgaagtttgcgacccttttaaggtggtcatcaaagacacagattccttgtttaaccaagtgtcccaaagcatgtacctgaagttatatcattttttattttaaaaagatatgcagcttatattttgaaaactattaaaacatatgcccctgtta

SEQ ID NO: 306693 - DNA, 3868 bp, Homo sapiens
catctgtctacttggaaaggctaaagatcctccgacagcgatgtggtctggacaacacaaagcaagatgaccgacctcctttgacctctttgctctccaaaccagcagttcctactgtcgcctcttccacagacatgctccacagcaaactctctcagctccgggagtcacgggagcagcaccagcattcagacctggattctaaccagactcactcttcaggagggagccgcggggcttggcggggtcgggagggagggacgtgctgggggaacgagctggggaagacggagcgggctctgtgccgggcgggcgggcggcgggggggccagcgaccgcagccggggggacgcgggaggatggagcaagtggagatcctgaggaaattcatccagagggtccaggccatgaagagtcctgaccacaatggggaggacaacttcgcccgggacttcatgcggttaagaagattgtctaccaaatatagaacagaaaagatatatcccacagccactggagaaaaagaagaaaatgttaaaaagaacagatacaaggacatactgccatttgatcacagccgagttaaattgacattaaagactccttcacaagattcagactatatcaatgcaaattttataaagggcgtctatgggccaaaagcatatgtagcaactcaaggacctttagcaaatacagtaatagatttttggaggatgatatgggagtataatgttgtgatcattgtaatggcctgccgagaatttgagatgggaaggaaaaaatgtgagcgctattggcctttgtatggagaagaccccataacgtttgcaccatttaaaatttcttgtgaggatgaacaagcaagaacagactacttcatcaggacactcttacttgaatttcaaaatgaatctcgtaggctgtatcagtttcattatgtgaactggccagaccatgatgttccttcatcatttgattctattctggacatgataagcttaatgaggaaatatcaagaacatgaagatgttcctatttgtattcattgcagtgcaggctgtggaagaacaggtgccatttgtgccatagattatacgtggaatttactaaaagctgggaaaataccagaggaatttaatgtatttaatttaatacaagaaatgagaacacaaaggcattctgcagtacaaacaaaggagcaatatgaacttgttcatagagctattgcccaactgtttgaaaaacagctacaactatatgaaattcatggagctcagaaaattgctgatggagtgaatgaaattaacactgaaaacatgatcagctccatagagcctgaaaaacaagattctcctcctccaaaaccaccaaggacccgcagttgccttgttgaaggggatgctaaagaagaaatactgcagccaccggaacctcatccagtgccacccatcttgacaccttctcccccttcagcttttccaacagtcactactgtgtggcaggacaatgatagataccatccaaagccagtgttgcatatggtttcatcagaacaacattcagcagacctcaacagaaactatagtaaatcaacagaacttccagggaaaaatgaatcaacaattgaacagatagataaaaaattggaacgaaatttaagttttgagattaagaaggtccctctccaagagggaccaaaaagttttgatgggaacacacttttgaataggggacatgcaattaaaattaaatctgcttcaccttgtatagctgataaaatctctaagccacaggaattaagttcagatctaaatgtcggtgatacttcccagaattcttgtgtggactgcagtgtaacacaatcaaacaaagtttcagttactccaccagaagaatcccagaattcagacacacctccaaggccagaccgcttgcctcttgatgagaaaggacatgtaacgtggtcatttcatggacctgaaaatgccatacccatacctgatttatctgaaggcaattcctcagatatcaactatcaaactaggaaaactgtgagtttaacaccaagtcctacaacacaagttgaaacacctgatcttgtggatcatgataacacttcaccactcttcagaacacccctcagttttactaatccacttcactctgatgactcagactcagatgaaagaaactctgatggtgctgtgacccagaataaaactaatatttcaacagcaagtgccacagtttctgctgccactagtactgaaagcatttctactaggaaagtattgccaatgtccattgctagacataatatagcaggaacaacacattcaggtgctgaaaaagatgttgatgttagtgaagattcacctcctcccctacctgaaagaactcctgaatcgtttgtgttagcaagtgaacataatacacctgtaagatcggaatggagtgaacttcaaagtcaggaacgatctgaacaaaaaaagtctgaaggcttgataacctctgaaaatgagaaatgtgatcatccagcgggaggtattcactatgaaatgtgcatagaatgtccacctactttcagtgacaagagagaacaaatatcagaaaatccaacagaagccacagatattggttttggtaatcgatgtggaaaacccaaaggaccaagagatccaccttcagaatggacatgattcagggagctagaagacactttaagttatacttgggactaacagcagtgtagattgttaccttaatattttttgctgggaccatctacctgccttatactacacttaggaaaaagtattacatatggtttattttgaaacttcaagtattattgccttaatgtctcttaaccctgttacacgctgcttgtagacatgttaatatagtaatacctttatgatatattgagtttaaggactactctttttctgttttatcatgtatgcattattttgtatatgtacagggcaagtaggtatataatttgataaagttgcaattgaaatattattaacagaagatgtaagaaatttctgcatggtctaaatctttgtgtactttatttgtaaattatttgccctggagttttagaaaatagtttctgaattttaaacttgctggattcatgcagccagctttgcaggttatcagagatcaaagattgtaataataattttgtaaattgtaagcaaaaagttatttttatattatatacagtctaattgttcatcctaattgttcctgttttcatctagtcagagattcagtaagtgccttggaacaatattgaattctcttagcttgtgtgtgtttctttaatatttgaactcaagtgggattagaagactatcaaaatacatgtatgtttcaggatatttgacctgtcattaaaaaaaacaaacagttttacagtgttcgtgccgaattcggcacgagtcacactgctttcaagctggactgagccagtttcattttgggaaagaaacgctgtgtccagaactcagcagctccatttattttttccagtcgaaagaaactgatctttaggcagtttttacttggccagaaagcagtgctgaatacttgaaactgtgtggtctgttctacttaatgttctgtcagaatgttcttttgtaggcagtatgtcatgatgtaatcatctatctccttgtctgtttccaagttacactgtgaagtttgcgacccttttaaggtggtcatcaaagacacagattccttgtttaaccaagtgtcccaaagcatgtacctgaagttatatcattttttattttaaaaagatatgcagcttatattttgaaaactattaaaacatatgcccctgtta

SEQ ID NO: 306694 - DNA, 3946 bp, Homo sapiens
  misc_feature (3187)..(3187): n is a, c, g, or t
catctgtctacttggaaaggctaaagatcctccgacagcgatgtggtctggacaacacaaagcaagatgaccgacctcctttgacctctttgctctccaaaccagcagttcctactgtcgcctcttccacagacatgctccacagcaaactctctcagctccgggagtcacgggagcagcaccagcattcagacctggattctaaccagactcactcttcaggagggagccgcggggcttggcggggtcgggagggagggacgtgctgggggaacgagctggggaagacggagcgggctctgtgccgggcgggcgggcggcgggggggccagcgaccgcagccggggggacgcgggaggatggagcaagtggagatcctgaggaaattcatccagagggtccaggccatgaagagtcctgaccacaatggggaggacaacttcgcccgggacttcatgcggttaagaagattgtctaccaaatatagaacagaaaagatatatcccacagccactggagaaaaagaagaaaatgttaaaaagaacagatacaaggacatactgccatttgatcacagccgagttaaattgacattaaagactccttcacaagattcagactatatcaatgcaaattttataaagggcgtctatgggccaaaagcatatgtagcaactcaaggacctttagcaaatacagtaatagatttttggaggatgatatgggagtataatgttgtgatcattgtaatggcctgccgagaatttgagatgggaaggaaaaaatgtgagcgctattggcctttgtatggagaagaccccataacgtttgcaccatttaaaatttcttgtgaggatgaacaagcaagaacagactacttcatcaggacactcttacttgaatttcaaaatgaatctcgtaggctgtatcagtttcattatgtgaactggccagaccatgatgttccttcatcatttgattctattctggacatgataagcttaatgaggaaatatcaagaacatgaagatgttcctatttgtattcattgcagtgcaggctgtggaagaacaggtgccatttgtgccatagattatacgtggaatttactaaaagctgggaaaataccagaggaatttaatgtatttaatttaatacaagaaatgagaacacaaaggcattctgcagtacaaacaaaggagcaatatgaacttgttcatagagctattgcccaactgtttgaaaaacagctacaactatatgaaattcatggagctcagaaaattgctgatggagtgaatgaaattaacactgaaaacatgatcagctccatagagcctgaaaaacaagattctcctcctccaaaaccaccaaggacccgcagttgccttgttgaaggggatgctaaagaagaaatactgcagccaccggaacctcatccagtgccacccatcttgacaccttctcccccttcagcttttccaacagtcactactgtgtggcaggacaatgatagataccatccaaagccagtgttgcatatggtttcatcagaacaacattcagcagacctcaacagaaactatagtaaatcaacagaacttccagggaaaaatgaatcaacaattgaacagatagataaaaaattggaacgaaatttaagttttgagattaagaaggtccctctccaagagggaccaaaaagttttgatgggaacacacttttgaataggggacatgcaattaaaattaaatctgcttcaccttgtatagctgataaaatctctaagccacaggaattaagttcagatctaaatgtcggtgatacttcccagaattcttgtgtggactgcagtgtaacacaatcaaacaaagtttcagttactccaccagaagaatcccagaattcagacacacctccaaggccagaccgcttgcctcttgatgagaaaggacatgtaacgtggtcatttcatggacctgaaaatgccatacccatacctgatttatctgaaggcaattcctcagatatcaactatcaaactaggaaaactgtgagtttaacaccaagtcctacaacacaagttgaaacacctgatcttgtggatcatgataacacttcaccactcttcagaacacccctcagttttactaatccacttcactctgatgactcagactcagatgaaagaaactctgatggtgctgtgacccagaataaaactaatatttcaacagcaagtgccacagtttctgctgccactagtactgaaagcatttctactaggaaagtattgccaatgtccattgctagacataatatagcaggaacaacacattcaggtgctgaaaaagatgttgatgttagtgaagattcacctcctcccctacctgaaagaactcctgaatcgtttgtgttagcaagtgaacataatacacctgtaagatcggaatggagtgaacttcaaagtcaggaacgatctgaacaaaaaaagtctgaaggcttgataacctctgaaaatgagaaatgtgatcatccagcgggaggtattcactatgaaatgtgcatagaatgtccacctactttcagtgacaagagagaacaaatatcagaaaatccaacagaagccacagatattggttttggtaatcgatgtggaaaacccaaaggaccaagagatccaccttcagaatggacatgattcagggagctagaagacactttaagttatactggaaaattcaggtgccactgaaagccagatttatagtattccatctttaatatgtgggactaacagcagtgtagattgttaccttaatattttttgctgggaccatctacctgccttatactacacttaggaaaaagtattacatatggtttattttgaaacttcaagtattattgccttaatgtctcttaaccctgttacacgctgcttgtagacatgttaatatagtaatacctttatgatatattgagtttaaggactactctttttctgttttatcatgtatgcattattttgtatatgtacagggcaagtaggtatataatttgataaagttgcaattgaaatattattaacagaagatgtaagaaatttctgcatggtctaaatctttgtgtactttatttgtaaattatttgccctggagttttagaaaatagtttctaaaactncagggcaaataatttctgaattttaaacttgctggattcatgcagccagctttgcaggttatcagagatcaaagattgtaataataattttgtaaattgtaagcaaaaagttatttttatattatatacagtctaattgttcatcctaattgttcctgttttcatctagtcagagattcagtaagtgccttggaacaatattgaattctcttagcttgtgtgtgtttctttaatatttgaactcaagtgggattagaagactatcaaaatacatgtatgtttcaggatatttgacctgtcattaaaaaaaacaaacagttttacagtgttcgtgccgaattcggcacgagtcacactgctttcaagctggactgagccagtttcattttgggaaagaaacgctgtgtccagaactcagcagctccatttattttttccagtcgaaagaaactgatctttaggcagtttttacttggccagaaagcagtgctgaatacttgaaactgtgtggtctgttctacttaatgttctgtcagaatgttcttttgtaggcagtatgtcatgatgtaatcatctatctccttgtctgtttccaagttacactgtgaagtttgcgacccttttaaggtggtcatcaaagacacagattccttgtttaaccaagtgtcccaaagcatgtacctgaagttatatcattttttattttaaaaagatatgcagcttatattttgaaaactattaaaacatatgcccctgtta

SEQ ID NO: 306695 - DNA, 3248 bp, Homo sapiens
catctgtctacttggaaaggctaaagatcctccgacagcgatgtggtctggacaacacaaagcaagatgaccgacctcctttgacctctttgctctccaaaccagcagttcctactgtcgcctcttccacagacatgctccacagcaaactctctcagctccgggagtcacgggagcagcaccagcattcagacctggattctaaccagactcactcttcaggagggagccgcggggcttggcggggtcgggagggagggacgtgctgggggaacgagctggggaagacggagcgggctctgtgccgggcgggcgggcggcgggggggccagcgaccgcagccggggggacgcgggaggatggagcaagtggagatcctgaggaaattcatccagagggtccaggccatgaagagtcctgaccacaatggggaggacaacttcgcccgggacttcatgcggttaagaagattgtctaccaaatatagaacagaaaagatatatcccacagccactggagaaaaagaagaaaatgttaaaaagaacagatacaaggacatactgccatttgatcacagccgagttaaattgacattaaagactccttcacaagattcagactatatcaatgcaaattttataaagggcgtctatgggccaaaagcatatgtagcaactcaaggacctttagcaaatacagtaatagatttttggaggatgatatgggagtataatgttgtgatcattgtaatggcctgccgagaatttgagatgggaaggaaaaaatgtgagcgctattggcctttgtatggagaagaccccataacgtttgcaccatttaaaatttcttgtgaggatgaacaagcaagaacagactacttcatcaggacactcttacttgaatttcaaaatgaatctcgtaggctgtatcagtttcattatgtgaactggccagaccatgatgttccttcatcatttgattctattctggacatgataagcttaatgaggaaatatcaagaacatgaagatgttcctatttgtattcattgcagtgcaggctgtggaagaacaggtgccatttgtgccatagattatacgtggaatttactaaaagctgggaaaataccagaggaatttaatgtatttaatttaatacaagaaatgagaacacaaaggcattctgcagtacaaacaaaggagcaatatgaacttgttcatagagctattgcccaactgtttgaaaaacagctacaactatatgaaattcatggagctcagaaaattgctgatggagtgaatgaaattaacactgaaaacatgatcagctccatagagcctgaaaaacaagattctcctcctccaaaaccaccaaggacccgcagttgccttgttgaaggggatgctaaagaagaaatactgcagccaccggaacctcatccagtgccacccatcttgacaccttctcccccttcagcttttccaacagtcactactgtgtggcaggacaatgatagataccatccaaagccagtgttgcatatggtttcatcagaacaacattcagcagacctcaacagaaactatagtaaatcaacagaacttccagggaaaaatgaatcaacaattgaacagatagataaaaaattggaacgaaatttaagttttgagattaagaaggtccctctccaagagggaccaaaaagttttgatgggaacacacttttgaataggggacatgcaattaaaattaaatctgcttcaccttgtatagctgataaaatctctaagccacaggaattaagttcagatctaaatgtcggtgatacttcccagaattcttgtgtggactgcagtgtaacacaatcaaacaaagtttcagttactccaccagaagaatcccagaattcagacacacctccaaggccagaccgcttgcctcttgatgagaaaggacatgtaacgtggtcatttcatggacctgaaaatgccatacccatacctgatttatctgaaggcaattcctcagatatcaactatcaaactaggaaaactgtgagtttaacaccaagtcctacaacacaagttgaaacacctgatcttgtggatcatgataacacttcaccactcttcagaacacccctcagttttactaatccacttcactctgatgactcagactcagatgaaagaaactctgatggtgctgtgacccagaataaaactaatatttcaacagcaagtgccacagtttctgctgccactagtactgaaagcatttctactaggaaagtattgccaatgtccattgctagacataatatagcaggaacaacacattcaggtgctgaaaaagatgttgatgttagtgaagattcacctcctcccctacctgaaagaactcctgaatcgtttgtgttagcaagtgaacataatacacctgtaagatcggaatggagtgaacttcaaagtcaggaacgatctgaacaaaaaaagtctgaaggcttgataacctctgaaaatgagaaatgtgatcatccagcgggaggtattcactatgaaatgtgcatagaatgtccacctactttcagtgacaagagagaacaaatatcagaaaatccaacagaagccacagatattggttttggtaatcgatgtggaaaacccaaaggaccaagagatccaccttcagaatggacatgattcagggagctagaagacactttaagttatactggaaaattcaggtgccactgaaagccagatttatagtattccatctttaatatgtgggactaacagcagtgtagattgttaccttaatattttttgctgggaccatctacctgccttatactacacttaggaaaaagtattacatatggtttattttgaaacttcaagtattattgccttaatgtctcttaaccctgttacacgctgcttgtagacatgttaatatagtaatacctttatgatatattgagtttaaggactactctttttctgttttatcatgtatgctcagcgctagcgctgagccataccgccgaacgccgggggcctctgtaaggcacatggaggtgatggtgtttcttagagagaagatcactgaagaaacttctgctttaatgactttaccaagctggccatattaccatccttgacctcggtgaaagcagtcatcttcagcgttttccagccctatagccaccccagtgtggttatcctcctcgattgctcagcgct

SEQ ID NO: 306696 - DNA, 1674 bp, Homo sapiens
aacacagctgtatgttccttcatgcagtagcccatgcttttcagtgctcatccagaaacatttactccaaggagaaatagcataacattttaaaattttaagcctaattaaaaaacaattgtttgcttttcctctgatgctgaaaatgataggccttgatttcttgggatatatacccataacagacccagctttctattatttgtatataaaatgaatgtattgtaataggtattaaatgtcttcctcgtagggcttgataacctctgaaaatgagaaatgtgatcatccagcgggaggtattcactatgaaatgtgcatagaatgtccacctactttcagtgacaagagagaacaaatatcagaaaatccaacagaagccacagatattggttttggtaatcgatgtggaaaacccaaaggaccaagagatccaccttcagaatggacatgattcagggagctagaagacactttaagttatactggaaaattcaggtgccactgaaagccagatttatagtattccatctttaatatgtgggactaacagcagtgtagattgttaccttaatattttttgctgggaccatctacctgccttatactacacttaggaaaaagtattacatatggtttattttgaaacttcaagtattattgccttaatgtctcttaaccctgttacacgctgcttgtagacatgttaatatagtaatacctttatgatatattgagtttaaggactactctttttctgttttatcatgtatgcattattttgtatatgtacagggcaagtaggtatataatttgataaagttgcaattgaaatattattaacagaagatgtaagaaatttctgcatggtctaaatctttgtgtactttatttgtaaattatttgccctggagttttagaaaatagtttctgaattttaaacttgctggattcatgcagccagctttgcaggttatcagagatcaaagattgtaataataattttgtaaattgtaagcaaaaagttatttttatattatatacagtctaattgttcatcctaattgttcctgttttcatctagtcagagattcagtaagtgccttggaacaatattgaattctcttagcttgtgtgtgtttctttaatatttgaactcaagtgggattagaagactatcaaaatacatgtatgtttcaggatatttgacctgtcattaaaaaaaacaaacagttttacagtgttcgtgccgaattcggcacgagtcacactgctttcaagctggactgagccagtttcattttgggaaagaaacgctgtgtccagaactcagcagctccatttattttttccagtcgaaagaaactgatctttaggcagtttttacttggccagaaagcagtgctgaatacttgaaactgtgtggtctgttctacttaatgttctgtcagaatgttcttttgtaggcagtatgtcatgatgtaatcatctatctccttgtctgtttccaagttacactgtgaagtttgcgacccttttaaggtggtcatcaaagacacagattccttgtttaaccaagtgtcccaaagcatgtacctgaagttatatcattttttattttaaaaagatatgcagcttatattttgaaaactattaaaacatatgcccctgtta

SEQ ID NO: 306697 - DNA, 1934 bp, Homo sapiens
cctgagtagctgggactacaggcgcccgccaccacgcctggctaatttttttgtatttttagtagagacggggtttcaccatgttagccaggatgatctcgatatcctgacctcatgatcggctcgcctcggcctcccaaagtgctgggattacaggcatgagccaccgcgcctggcctgaccttgttgatttctatacaaagacatttcagttgcaactattcccttagaacataggcatatagtatagctaccttaagggaatgtaatatgtcaagacctagatttatgaagtaagaataacgagaatcctcacattgcagaagtactcactgcagatttctgtgtgaccacaataatacctgacatgattttctgtgcacactacacttgtatttatattgttcttgacctgtaaaattatggtgcccaggagagaaagttttctcttttcatgcttgccaacatttaaaaaattaaagagttatatatatatgatgctacaaaggatggtgattaacaaaggctttgtgttgctacttagatcatccagcgggaggtattcactatgaaatgtgcatagaatgtccacctactttcagtgacaagagagaacaaatatcagaaaatccaacagaagccacagatattggttttggtaatcgatgtggaaaacccaaaggaccaagagatccaccttcagaatggacatgattcagggagctagaagacactttaagttatactggaaaattcaggtgccactgaaagccagatttatagtattccatctttaatatgtgggactaacagcagtgtagattgttaccttaatattttttgctgggaccatctacctgccttatactacacttaggaaaaagtattacatatggtttattttgaaacttcaagtattattgccttaatgtctcttaaccctgttacacgctgcttgtagacatgttaatatagtaatacctttatgatatattgagtttaaggactactctttttctgttttatcatgtatgcattattttgtatatgtacagggcaagtaggtatataatttgataaagttgcaattgaaatattattaacagaagatgtaagaaatttctgcatggtctaaatctttgtgtactttatttgtaaattatttgccctggagttttagaaaatagtttctgaattttaaacttgctggattcatgcagccagctttgcaggttatcagagatcaaagattgtaataataattttgtaaattgtaagcaaaaagttatttttatattatatacagtctaattgttcatcctaattgttcctgttttcatctagtcagagattcagtaagtgccttggaacaatattgaattctcttagcttgtgtgtgtttctttaatatttgaactcaagtgggattagaagactatcaaaatacatgtatgtttcaggatatttgacctgtcattaaaaaaaacaaacagttttacagtgttcgtgccgaattcggcacgagtcacactgctttcaagctggactgagccagtttcattttgggaaagaaacgctgtgtccagaactcagcagctccatttattttttccagtcgaaagaaactgatctttaggcagtttttacttggccagaaagcagtgctgaatacttgaaactgtgtggtctgttctacttaatgttctgtcagaatgttcttttgtaggcagtatgtcatgatgtaatcatctatctccttgtctgtttccaagttacactgtgaagtttgcgacccttttaaggtggtcatcaaagacacagattccttgtttaaccaagtgtcccaaagcatgtacctgaagttatatcattttttattttaaaaagatatgcagcttatattttgaaaactattaaaacatatgcccctgtta

SEQ ID NO: 306698 - DNA, 1334 bp, Homo sapiens
tgattgcatttagacctagaatggtttatatcgggatcgcgatgtctaaatgcaatcatgattgcatttagactcaatttccaaaataattttcacccctgattgcatttatgattcagggagctagaagacactttaagttatactggaaaattcaggtgccactgaaagccagatttatagtattccatctttaatatgtgggactaacagcagtgtagattgttaccttaatattttttgctgggaccatctacctgccttatactacacttaggaaaaagtattacatatggtttattttgaaacttcaagtattattgccttaatgtctcttaaccctgttacacgctgcttgtagacatgttaatatagtaatacctttatgatatattgagtttaaggactactctttttctgttttatcatgtatgcattattttgtatatgtacagggcaagtaggtatataatttgataaagttgcaattgaaatattattaacagaagatgtaagaaatttctgcatggtctaaatctttgtgtactttatttgtaaattatttgccctggagttttagaaaatagtttctgaattttaaacttgctggattcatgcagccagctttgcaggttatcagagatcaaagattgtaataataattttgtaaattgtaagcaaaaagttatttttatattatatacagtctaattgttcatcctaattgttcctgttttcatctagtcagagattcagtaagtgccttggaacaatattgaattctcttagcttgtgtgtgtttctttaatatttgaactcaagtgggattagaagactatcaaaatacatgtatgtttcaggatatttgacctgtcattaaaaaaaacaaacagttttacagtgttcgtgccgaattcggcacgagtcacactgctttcaagctggactgagccagtttcattttgggaaagaaacgctgtgtccagaactcagcagctccatttattttttccagtcgaaagaaactgatctttaggcagtttttacttggccagaaagcagtgctgaatacttgaaactgtgtggtctgttctacttaatgttctgtcagaatgttcttttgtaggcagtatgtcatgatgtaatcatctatctccttgtctgtttccaagttacactgtgaagtttgcgacccttttaaggtggtcatcaaagacacagattccttgtttaaccaagtgtcccaaagcatgtacctgaagttatatcattttttattttaaaaagatatgcagcttatattttgaaaactattaaaacatatgcccctgtta

SEQ ID NO: 306699 - DNA, 2571 bp, Homo sapiens
catctgtctacttggaaaggctaaagatcctccgacagcgatgtggtctggacaacacaaagcaagatgaccgacctcctttgacctctttgctctccaaaccagcagttcctactgtcgcctcttccacagacatgctccacagcaaactctctcagctccgggagtcacgggagcagcaccagcattcagacctggattctaaccagactcactcttcaggagggagccgcggggcttggcggggtcgggagggagggacgtgctgggggaacgagctggggaagacggagcgggctctgtgccgggcgggcgggcggcgggggggccagcgaccgcagccggggggacgcgggaggatggagcaagtggagatcctgaggaaattcatccagagggtccaggccatgaagagtcctgaccacaatggggaggacaacttcgcccgggacttcatgcggttaagaagattgtctaccaaatatagaacagaaaagatatatcccacagccactggagaaaaagaagaaaatgttaaaaagaacagatacaaggacatactgccatttgatcacagccgagttaaattgacattaaagactccttcacaagattcagactatatcaatgcaaattttataaagggcgtctatgggccaaaagcatatgtagcaactcaaggacctttagcaaatacagtaatagatttttggaggatgatatgggagtataatgttgtgatcattgtaatggcctgccgagaatttgagatgggaaggaaaaaatgtgagcgctattggcctttgtatggagaagaccccataacgtttgcaccatttaaaatttcttgtgaggatgaacaagcaagaacagactacttcatcaggacactcttacttgaatttcaaaatgaatctcgtaggctgtatcagtttcattatgtgaactggccagaccatgatgttccttcatcatttgattctattctggacatgataagcttaatgaggaaatatcaagaacatgaagatgttcctatttgtattcattgcagtgcaggctgtggaagaacaggtgccatttgtgccatagattatacgtggaatttactaaaagctgggaaaataccagaggaatttaatgtatttaatttaatacaagaaatgagaacacaaaggcattctgcagtacaaacaaaggagcaatatgaacttgttcatagagctattgcccaactgtttgaaaaacagctacaactatatgaaattcatggagctcagaaaattgctgatggagtgaatgaaattaacactgaaaacatgatcagctccatagagcctgaaaaacaagattctcctcctccaaaaccaccaaggacccgcagttgccttgttgaaggggatgctaaagaagaaatactgcagccaccggaacctcatccagtgccacccatcttgacaccttctcccccttcagcttttccaacagtcactactgtgtggcaggacaatgatagataccatccaaagccagtgttgcatatggtttcatcagaacaacattcagcagacctcaacagaaactatagtaaatcaacagaacttccagggaaaaatgaatcaacaattgaacagatagataaaaaattggaacgaaatttaagttttgagattaagaaggtccctctccaagagggaccaaaaagttttgatgggaacacacttttgaataggggacatgcaattaaaattaaatctgcttcaccttgtatagctgataaaatctctaagccacaggaattaagttcagatctaaatgtcggtgatacttcccagaattcttgtgtggactgcagtgtaacacaatcaaacaaagtttcagttactccaccagaagaatcccagaattcagacacacctccaaggccagaccgcttgcctcttgatgagaaaggacatgtaacgtggtcatttcatggacctgaaaatgccatacccatacctgatttatctgaaggcaattcctcagatatcaactatcaaactaggaaaactgtgagtttaacaccaagtcctacaacacaagttgaaacacctgatcttgtggatcatgataacacttcaccactcttcagaacacccctcagttttactaatccacttcactctgatgactcagactcagatgaaagaaactctgatggtgctgtgacccagaataaaactaatatttcaacagcaagtgccacagtttctgctgccactagtactgaaagcatttctactaggaaagtattgccaatgtccattgctagacataatatagcaggaacaacacattcaggtgctgaaaaagatgttgatgttagtgaagattcacctcctcccctacctgaaagaactcctgaatcgtttgtgttagcaagtgaacataatacacctgtaagatcggaatggagtgaacttcaaagtcaggaacgatctgaacaaaaaaagtctgaaggcttgataacctctgaaaatgagaaatgtgatcagcagcaggagtatccgcggcgctctcgagacgccc

SEQ ID NO: 306700 - DNA, 2527 bp, Homo sapiens
catctgtctacttggaaaggctaaagatcctccgacagcgatgtggtctggacaacacaaagcaagatgaccgacctcctttgacctctttgctctccaaaccagcagttcctactgtcgcctcttccacagacatgctccacagcaaactctctcagctccgggagtcacgggagcagcaccagcattcagacctggattctaaccagactcactcttcaggagggagccgcggggcttggcggggtcgggagggagggacgtgctgggggaacgagctggggaagacggagcgggctctgtgccgggcgggcgggcggcgggggggccagcgaccgcagccggggggacgcgggaggatggagcaagtggagatcctgaggaaattcatccagagggtccaggccatgaagagtcctgaccacaatggggaggacaacttcgcccgggacttcatgcggttaagaagattgtctaccaaatatagaacagaaaagatatatcccacagccactggagaaaaagaagaaaatgttaaaaagaacagatacaaggacatactgccatttgatcacagccgagttaaattgacattaaagactccttcacaagattcagactatatcaatgcaaattttataaagggcgtctatgggccaaaagcatatgtagcaactcaaggacctttagcaaatacagtaatagatttttggaggatgatatgggagtataatgttgtgatcattgtaatggcctgccgagaatttgagatgggaaggaaaaaatgtgagcgctattggcctttgtatggagaagaccccataacgtttgcaccatttaaaatttcttgtgaggatgaacaagcaagaacagactacttcatcaggacactcttacttgaatttcaaaatgaatctcgtaggctgtatcagtttcattatgtgaactggccagaccatgatgttccttcatcatttgattctattctggacatgataagcttaatgaggaaatatcaagaacatgaagatgttcctatttgtattcattgcagtgcaggctgtggaagaacaggtgccatttgtgccatagattatacgtggaatttactaaaagctgggaaaataccagaggaatttaatgtatttaatttaatacaagaaatgagaacacaaaggcattctgcagtacaaacaaaggagcaatatgaacttgttcatagagctattgcccaactgtttgaaaaacagctacaactatatgaaattcatggagctcagaaaattgctgatggagtgaatgaaattaacactgaaaacatgatcagctccatagagcctgaaaaacaagattctcctcctccaaaaccaccaaggacccgcagttgccttgttgaaggggatgctaaagaagaaatactgcagccaccggaacctcatccagtgccacccatcttgacaccttctcccccttcagcttttccaacagtcactactgtgtggcaggacaatgatagataccatccaaagccagtgttgcatatggtttcatcagaacaacattcagcagacctcaacagaaactatagtaaatcaacagaacttccagggaaaaatgaatcaacaattgaacagatagataaaaaattggaacgaaatttaagttttgagattaagaaggtccctctccaagagggaccaaaaagttttgatgggaacacacttttgaataggggacatgcaattaaaattaaatctgcttcaccttgtatagctgataaaatctctaagccacaggaattaagttcagatctaaatgtcggtgatacttcccagaattcttgtgtggactgcagtgtaacacaatcaaacaaagtttcagttactccaccagaagaatcccagaattcagacacacctccaaggccagaccgcttgcctcttgatgagaaaggacatgtaacgtggtcatttcatggacctgaaaatgccatacccatacctgatttatctgaaggcaattcctcagatatcaactatcaaactaggaaaactgtgagtttaacaccaagtcctacaacacaagttgaaacacctgatcttgtggatcatgataacacttcaccactcttcagaacacccctcagttttactaatccacttcactctgatgactcagactcagatgaaagaaactctgatggtgctgtgacccagaataaaactaatatttcaacagcaagtgccacagtttctgctgccactagtactgaaagcatttctactaggaaagtattgccaatgtccattgctagacataatatagcaggaacaacacattcaggtgctgaaaaaggtaataatatagtgtcaaatacttaaatgtctttcctatgtgctagtcactgttttaagcactttagctgtattgatttattatgttttattccacactctaccatagaacctacagcaaaatctgtcttagatactaattttttaatataagcttttaatgtattgttaac

SEQ ID NO: 306701 - DNA, 2048 bp, Homo sapiens
catctgtctacttggaaaggctaaagatcctccgacagcgatgtggtctggacaacacaaagcaagatgaccgacctcctttgacctctttgctctccaaaccagcagttcctactgtcgcctcttccacagacatgctccacagcaaactctctcagctccgggagtcacgggagcagcaccagcattcagacctggattctaaccagactcactcttcaggagggagccgcggggcttggcggggtcgggagggagggacgtgctgggggaacgagctggggaagacggagcgggctctgtgccgggcgggcgggcggcgggggggccagcgaccgcagccggggggacgcgggaggatggagcaagtggagatcctgaggaaattcatccagagggtccaggccatgaagagtcctgaccacaatggggaggacaacttcgcccgggacttcatgcggttaagaagattgtctaccaaatatagaacagaaaagatatatcccacagccactggagaaaaagaagaaaatgttaaaaagaacagatacaaggacatactgccatttgatcacagccgagttaaattgacattaaagactccttcacaagattcagactatatcaatgcaaattttataaagggcgtctatgggccaaaagcatatgtagcaactcaaggacctttagcaaatacagtaatagatttttggaggatgatatgggagtataatgttgtgatcattgtaatggcctgccgagaatttgagatgggaaggaaaaaatgtgagcgctattggcctttgtatggagaagaccccataacgtttgcaccatttaaaatttcttgtgaggatgaacaagcaagaacagactacttcatcaggacactcttacttgaatttcaaaatgaatctcgtaggctgtatcagtttcattatgtgaactggccagaccatgatgttccttcatcatttgattctattctggacatgataagcttaatgaggaaatatcaagaacatgaagatgttcctatttgtattcattgcagtgcaggctgtggaagaacaggtgccatttgtgccatagattatacgtggaatttactaaaagctgggaaaataccagaggaatttaatgtatttaatttaatacaagaaatgagaacacaaaggcattctgcagtacaaacaaaggagcaatatgaacttgttcatagagctattgcccaactgtttgaaaaacagctacaactatatgaaattcatggagctcagaaaattgctgatggagtgaatgaaattaacactgaaaacatgatcagctccatagagcctgaaaaacaagattctcctcctccaaaaccaccaaggacccgcagttgccttgttgaaggggatgctaaagaagaaatactgcagccaccggaacctcatccagtgccacccatcttgacaccttctcccccttcagcttttccaacagtcactactgtgtggcaggacaatgatagataccatccaaagccagtgttgcatatggtttcatcagaacaacattcagcagacctcaacagaaactatagtaaatcaacagaacttccagggaaaaatgaatcaacaattgaacagatagataaaaaattggaacgaaatttaagttttgagattaagaaggtccctctccaagagggaccaaaaagttttgatgggaacacacttttgaataggggacatgcaattaaaattaaatctgcttcaccttgtatagctgataaaatctctaagccacaggaattaagttcagatctaaatgtcggtgatacttcccagaattcttgtgtggactgcagtgtaacacaatcaaacaaagtttcagttactccaccagaagaatcccagaattcagacacacctccaaggccagaccgcttgcctcttgatgagaaaggacatgtaacgtggtcatttcatggacctgaaaatgccataactattaaaccccttgtttacagacaaatgaaataaatttattccacccaaata

SEQ ID NO: 306702 - DNA, 1691 bp, Homo sapiens
catctgtctacttggaaaggctaaagatcctccgacagcgatgtggtctggacaacacaaagcaagatgaccgacctcctttgacctctttgctctccaaaccagcagttcctactgtcgcctcttccacagacatgctccacagcaaactctctcagctccgggagtcacgggagcagcaccagcattcagacctggattctaaccagactcactcttcaggagggagccgcggggcttggcggggtcgggagggagggacgtgctgggggaacgagctggggaagacggagcgggctctgtgccgggcgggcgggcggcgggggggccagcgaccgcagccggggggacgcgggaggatggagcaagtggagatcctgaggaaattcatccagagggtccaggccatgaagagtcctgaccacaatggggaggacaacttcgcccgggacttcatgcggttaagaagattgtctaccaaatatagaacagaaaagatatatcccacagccactggagaaaaagaagaaaatgttaaaaagaacagatacaaggacatactgccatttgatcacagccgagttaaattgacattaaagactccttcacaagattcagactatatcaatgcaaattttataaagggcgtctatgggccaaaagcatatgtagcaactcaaggacctttagcaaatacagtaatagatttttggaggatgatatgggagtataatgttgtgatcattgtaatggcctgccgagaatttgagatgggaaggaaaaaatgtgagcgctattggcctttgtatggagaagaccccataacgtttgcaccatttaaaatttcttgtgaggatgaacaagcaagaacagactacttcatcaggacactcttacttgaatttcaaaatgaatctcgtaggctgtatcagtttcattatgtgaactggccagaccatgatgttccttcatcatttgattctattctggacatgataagcttaatgaggaaatatcaagaacatgaagatgttcctatttgtattcattgcaggtacaaaagaatttcccaagtttataaatacattatttaagtttgatgttacacaaggttttatttctgcattaatatgttagtaatcttgaatttctcctagccttgatacaatgtttgggactagggccttgtaagttgatgtggtctcatttggttgacagaccgtttagagtattgttgcattaaaacacaggatcatctatttgaaaatagtattcacatggtgggaagctatagaacatactctttttactgttcactgattagagcatataatctcagatcctcatcatactctactttctaaagtcagtatggtagtattttcttttaatcaatttccctgaaacaatgaccaagcaattttcattcctgataaacactgacatgagatttttaaaaacaggatattgctctgatgcccaggttggagtgcagtggcacaatcatagcttactgtaaactcaaactcctggcctgacgtgatccttctgcctcagcttcccaagtagctaggactacaggcatgtgctaccacactgaactaattttttttaattaaaaaaaattttttttaagagaccaagtcttgctctgttgcccaggctgatccgaactcctgtcctcaagtgat

SEQ ID NO: 306703 - DNA, 1282 bp, Homo sapiens
catctgtctacttggaaaggctaaagatcctccgacagcgatgtggtctggacaacacaaagcaagatgaccgacctcctttgacctctttgctctccaaaccagcagttcctactgtcgcctcttccacagacatgctccacagcaaactctctcagctccgggagtcacgggagcagcaccagcattcagacctggattctaaccagactcactcttcaggagggagccgcggggcttggcggggtcgggagggagggacgtgctgggggaacgagctggggaagacggagcgggctctgtgccgggcgggcgggcggcgggggggccagcgaccgcagccggggggacgcgggaggatggagcaagtggagatcctgaggaaattcatccagagggtccaggccatgaagagtcctgaccacaatggggaggacaacttcgcccgggacttcatgcggttaagaagattgtctaccaaatatagaacagaaaagatatatcccacagccactggagaaaaagaagaaaatgttaaaaagaacagatacaaggacatactgccatttgatcacagccgagttaaattgacattaaagactccttcacaagattcagactatatcaatgcaaattttataaagggcgtctatgggccaaaagcatatgtagcaactcaaggacctttagcaaatacagtaatagatttttggaggatgatatgggagtataatgttgtgatcattgtaatggcctgccgagaatttgagatgggaagggaggatgaacaagcaagaacagactacttcatcaggacactcttacttgaatttcaaaatgaatctcgtaggctgtatcagtttcattatgtgaactggccagaccatgatgttccttcatcatttgattctattctggacatgataagcttaatgaggaaatatcaagaacatgaagatgttcctatttgtattcattgcagtgcaggctgtggaagaacaggtgccatttgtgccatagattatacgtggaatttactaaaagctgggaaaataccagaggatttactgtctttaattcagtacaggaatgggaacacaagggttctggaggacgaacaagggcatatgattgtcatagagtaatgcatgttgaaaaaggtaattttgaatcgggggcgaatgggagggggaggataccggagggtgcatagagggaaaaggtcttcaaacaggcggggtggagggtagaaaggcggaagggggggtccataagggggaag

SEQ ID NO: 306704 - DNA, 949 bp, Homo sapiens
catctgtctacttggaaaggctaaagatcctccgacagcgatgtggtctggacaacacaaagcaagatgaccgacctcctttgacctctttgctctccaaaccagcagttcctactgtcgcctcttccacagacatgctccacagcaaactctctcagctccgggagtcacgggagcagcaccagcattcagacctggattctaaccagactcactcttcaggagggagccgcggggcttggcggggtcgggagggagggacgtgctgggggaacgagctggggaagacggagcgggctctgtgccgggcgggcgggcggcgggggggccagcgaccgcagccggggggacgcgggaggatggagcaagtggagatcctgaggaaattcatccagagggtccaggccatgaagagtcctgaccacaatggggaggacaacttcgcccgggacttcatgcggttaagaagattgtctaccaaatatagaacagaaaagatatatcccacagccactggagaaaaagaagaaaatgttaaaaagaacagatacaaggacatactgccatttgatcacagccgagttaaattgacattaaagactccttcacaagattcagactatatcaatgcaaattttataaaggtatgtactaactttaaatggtgtttctctgccatattaatgtctttctacatactagttttgtaaaaactttttgaattgctcaaacatgataccaacagcaaaagaaataaaaataaagccactgccctggcacaatgtttttatatgctttccttctagccttcttattcatatagataaatagtttctacttagttttgtgatagcagagataacattttcttttttatttcttctttcccatggaagtcttacctattactaaattattttctcagttatccctttggacaaaatgaaca

SEQ ID NO: 306705 - DNA, 985 bp, Homo sapiens
aatgaatactactctaacctactctaacatggtgcttacggtatattgctcatccatttaatagtgtagattagttaaatagtatatatagtgttatgtttacagtacatgctctggaagtagaactgcctggtttagagcccacacttgtcacttcttaggaaagtttgggcaagttattttatctgtatatctcagttataaaatgaggatggtattaacagtactttcctcatggaaattaaattgttacatgtgaagcccttaggtatttggcatgtgtttaacagtcaataagtgttggctattatttatttgggtttttttaaaagcagtgctaaatgccacacaaatttcttagaaatggcagtttaaatgagctgtgcaactttaaactttgcaaagtattttcataattgttgactttctgtttttcttgaaggaatctcgtaggctgtatcagtttcattatgtgaactggccagaccatgatgttccttcatcatttgattctattctggacatgataagcttaatgaggaaatatcaagaacatgaagatgttcctatttgtattcattgcaggtacaaaagaatttcccaagtttataaatacattatttaagtttgatgttacacaaggttttatttctgcattaatatgttagtaatcttgaatttctcctagccttgatacaatgtttgggactagggccttgtaagttgatgtggtctcatttggttgacagaccgtttagagtattgttgcattaaaacacaggatcatctatttgaaaatagtattcacatggtgggaagctatagaacatactctttttactgttcactgattagagcatataatctcagatcctcatcatactctactttctaaagtcagtatggtagtattttcttttaatcaatttccctgaaacaatgaccaagcaattttcattcctgataaacactgacatgagatttt

SEQ ID NO: 306706 - DNA, 481 bp, Homo sapiens
gctgacttctctactgaagattcccttcaggcttggagaactgaatgatgtctgtagagtgacaggaaagtcatgggagagagtcatttctgtatacattatctttgctcaataagcatcataattcttgataatgagtggaaaaggtttcttgcatttttttgcatttttaaaaactgatctagatatttgtgacaggaatttttagaatgtcaagaaagctctctgattttgtttagatgacatgttaatttgtctaaatttttatgtgtttaatttagatgttgatgttagtgaagattcacctcctcccctacctgaaagaactcctgaatcgtttgtgttagcaagtgaacatagtgagtgtctcttttgcttttacatttacttcatattctaataataaactccgaaaaacatacctgattttaatctattagctattgtgctacataattaaattcaaaaacaagtaaattga

SEQ ID NO: 306707 - DNA, 1349 bp, Homo sapiens
ggtcctttctcccttcgtgtgcactaggaatccaaagctaatctgtccctgatccggattgcacgcacctgtgccttttggggcccttctgcattagttcttccttctcttctaacctcaaaaatgtgttttttctattggctctttccctttaacatagaagtatactcacgcttttgttgaatcttgaaataaaagtcttcctttaccacatatctccctttaatactacatctctcttctcagccaaatacttgggaagagaagccctgagtttgtgtcattgttttctcacctccagttcactactttgcccactgcctgacatccagctcactcacacacacacacaagcccaatcactaagttgccatagctaatttgtagctttcctgccttcctggcaaaatttgactctgcattgggataatacatgtcgagtacctattgaacaggcactgtgctaggtgctactgttatagatatgaaaagaaggcatcatctcctttctaacaactcacaggagcagccattcctgattcatacatgtctcttgactcccagtgctcactttttcaagcttcacttaatgccgtgcaaatcaccctattctccaggtcttctttcttcccagttctccttactatacacaacttctcaaggcagtcacctccacacccatggcttcaattgctttctccattctctgagaacaatagaattttaaatggttttatttcatgtattagctttattttatacaaggtgcctcacctgctgtaaccatagattcaaagttgctccatgaaagtaataaatgaaaaatggtgattttttagcatgtaaattttaggaaatttccccagttacgcttaatggcttgatttagtgtgtatgttatttttgaaaacatatgttgggatgtcacaaatggacttagcctacagagatttatattcaacttttgaccagagagttccattttaatgtgacactgagagttaaaaaactatcttttcctccttacctatttctcttcctacattctcggccaggaggaaggcactgctacatacccagtcttccccagcagagcctgagcagctctgttttccttctacttcccctcttctttcacatctcatgaccaagcacttcctattctgtctcccaaatgatcacagactttttcctccacttttgtcactgccactgcccttagcattactctgcctttagagaaagtctcttaattggtttgggttgcttccttcagtctttattatacagaccactacacgcacatctgacagagacttttcacctttttatggttgaatgactgaaat

SEQ ID NO: 306708 - DNA, 885 bp, Homo sapiens
ggcggggcctgagccaatgcagaagcgggggccgcgaggacgccagcgggcgctgtgcgtaggaaccgccgggtggccgctgccgatcggggccgacttggggacggaccggaagtgcccgagggcggccgcagaacggtcaatttgagccgcgtcgagctcccctgggacctgtggccgccgcccacagaccatgctcctggggcgcctgacttcccagctgttgagggccgttccttgggcaggcggccgcccgccttggcccgtctctggagtgctgggcagccgggtctgcgggcccctttacagcacatcgccggccggcccaggtagggcggcctctctccctcgcaagggggcccagctggagctggaggagatgctggtccccaggaagatgtccgtcagccccctggagagctggctcacggcccgctgcttcctgcccagactggataccgggaccgcagggactgtggctccaccgcaatcctaccagtgtccgcccagccagataggggaaggggccgagcagggggatgaaggcgtcgcggatgcgcctcaaattcagtgcaaaaacgtgctgaagatccgccggcggaagatgaaccaccacaagtaccggaagctggtgaagaagacgcggttcctgcggaggaaggtccaggagggacgcctgagacgcaagcagatcaagttcgagaaagacctgaggcgcatctggctgaaggcggggctaaaggaagcccccgaaggctggcagacccccaagatctacctgcggggcaaatgagtctggcgccgcccttcccgcccgttgctgctgtgatccgtagtaataaattctcagaggactcagccataaaaaaaaactcagggctctag

SEQ ID NO: 306709 - DNA, 576 bp, Homo sapiens
cggccgcgagcctccggcccaggtaaccgctggggcggcagccgcctttgttggcggcgagtcgggcccgcaccgcccccgcctagaccccgaccccagcccctgccccgaccccagcctcggcgccattccctagccagcccatgcccctgacccggggcctccccgcccgccagtgcgctggatcccgagacggcgggacgcgaagagcctttgtggacgtgggaagcgtttcagtgtttggttctgcgtggggagtcccacgttactcgatgactttcggccgcgaaggctttgaatggtgcgtttgaaaatacggaaactttcttctactctaggtggccatggctaccgggcaggtgttgttccagcggttcttttataccaagtcttttataccagcaccaatgagaaaccagctgtgtggtggggtttccagagaagaggaaattccttctttcctggagagcgtgcagctgtaactcacagacgagacatccctgagctaccagcccgtggtcctgtactagtcctggcaaaggttccggtaactgcagcaacagatacctcctgccc

SEQ ID NO: 306710 - DNA, 1080 bp, Homo sapiens
  misc_feature (869)..(869): n is a, c, g, or t
ggcggggcctgagccaatgcagaagcgggggccgcgaggacgccagcgggcgctgtgcgtaggaaccgccgggtggccgctgccgatcggggccgacttggggacggaccggaagtgcccgagggcggccgcagaacggtcaatttgagccgcgtcgagctcccctgggacctgtggccgccgcccacagaccatgctcctggggcgcctgacttcccagctgttgagggccgttccttgggcaggcggccgcccgccttggcccgtctctggagtgctgggcagccgggtctgcgggcccctttacagcacatcgccggccggcccaggtagggcggcctctctccctcgcaagggggcccagctggagctggaggagatgctggtccccaggaagatgtccgtcagccccctggagagctggctcacggcccgctgcttcctgcccagactggataccgggaccgcagggactgtggctccaccgcaatcctaccagtgtccgcccagccagataggggaaggggccgagcagggggatgaaggcgtcgcggatgcgcctcaaattcagtgcaaaaacgtgctgaagatccgccggcggaagatgaaccaccacaagtaccggaagctggtgaagaagacgcggttcctgcggaggaaggtccaggagggacgcctgagacgcaagcagatcaagttcgagaaagacctgaggcgcatctggctgaaggcggggctaaaggaagcccccgaaggctggcagacccccaagatctacctgcggggcaaatgagtctggcgccgcccttcccgcccgttgctgctgtgatccgtagtaataaattctcagaggactcagccaaaaacanaaatgaacaaaagtactacttagtaacatacaacagcagagcaacgaacagccggcgcagggacatattattgggggggcgggagaaacagagtgtgataaacagagcagcaggtgtataaagatgtttacagcgaccccggtttgttgaacaagggggaatattgcgggccccccaagaggggagagcaatcttgaaagggggtaccgta

SEQ ID NO: 306711 - DNA, 861 bp, Homo sapiens
ggcggggcctgagccaatgcagaagcgggggccgcgaggacgccagcgggcgctgtgcgtaggaaccgccgggtggccgctgccgatcggggccgacttggggacggaccggaagtgcccgagggcggccgcagaacggtcaatttgagccgcgtcgagctcccctgggacctgtggccgccgcccacagaccatgctcctggggcgcctgacttcccagctgttgagggccgttccttgggcaggcggccgcccgccttggcccgtctctggagtgctgggcagccgggtctgcgggcccctttacagcacatcgccggccggcccaggtagggcggcctctctccctcgcaagggggcccagctggagctggaggagatgctggtccccaggaagatgtccgtcagccccctggagagctggctcacggcccgctgcttcctgcccagactggataccgggaccgcagggactgtggctccaccgcaatcctaccagtgtccgcccagccagataggggaaggggccgagcagggggatgaaggcgtcgcggatgcgcctcaaattcagtgcaaaaacgtgctgaagatccgccggcggaagatgaaccaccacaagtaccggaagctggtgaagaagacgcggttcctgcggaggaaggtccaggagggacgcctgagacgcaagcagatcaagttcgagaaagacctgaggcgcatctggctgaaggcggggctaaaggaagcccccgaaggctggcagacccccaagatctacctgcggggcaaatgagtctggcgccgcccttcccgcccgttgctgctgtgatccgtagtaataaattctcagaggactcagcc

SEQ ID NO: 306712 - DNA, 4261 bp, Homo sapiens
  misc_feature (3393)..(3397): n is a, c, g, or t
gggagtcggcggcacaaaatggcggcggcggcggcggcggctggtgctgcagggtcggcagctcccgcggcagcggccggcgccccgggatctgggggcgcaccctcagggtcgcagggggtgctgatcggggacaggctgtactccggggtgctcatcaccttggagaactgcctcctgcctgacgacaagctccgtttcacgccgtccatgtcgagcggcctcgacaccgacacagagaccgacctccgcgtggtgggctgcgagctcatccaggcggccggtatcctgctccgcctgccgcaggtggccatggctaccgggcaggtgttgttccagcggttcttttataccaagtccttcgtgaagcactccatggaggtaaggcttcctcctgcacttcattcccagcgaagtatgttgagggtaaaacggtttgttactttgcccggttactaagggagtgagtacttgccccccagtctgagctctgtgccggagggttctgtttcttgactttttttttcccctgggtgcacctcccttttggtctgaatagccctcaagcctttggcggccgtcaggacgccgtggctggggacaaacatgggcgtgttgcaatgcttccgcttcagcatgtgtcaatggcctgtgtccacctggcttccaagatagaagaggccccaagacgcatacgggacgtcatcaatgtgtttcaccgccttcgacagctgagagacaaaaagaagcccgtgcctctactactggatcaagattatgttaatttaaagaaccaaattataaaggcggaaagacgagttctcaaagagttgggtttctgcgtccatgtgaagcatcctcataagataatcgttatgtaccttcaggtgttagagtgtgagcgtaaccaacacctggtccagacctcatggaattacatgaacgacagccttcgcaccgacgtcttcgtgcggttccagccagagagcatcgcctgtgcctgcatttatcttgctgcccggacgctggagatccctttgcccaatcgtccccattggtttcttttgtttggagcaactgaagaagaaattcaggaaatctgcttaaagatcttgcagctttatgctcggaaaaaggttgatctcacacacctggagggtgaagtggaaaaaagaaagcacgctatcgaagaggcaaaggcccaagcccggggcctgttgcctgggggcacacaggtgctggatggtacctcggggttctctcctgcccccaagctggtggaatcccccaaagaaggtaaagggagcaagccttccccactgtctgtgaagaacaccaagaggaggctggagggcgccaagaaagccaaggcggacagccccgtgaacggcttgccaaaggggcgagagagtcggagtcggagccggagccgtgagcagagctactcgaggtccccatcccgatcagcgtctcctaagaggaggaaaagtgacagcggctccacatctggtgggtccaagtcgcagagccgctcccggagcaggagtgactccccaccgagacaggccccccgcagcgctccctacaaaggctctgagattcggggctcccggaagtccaaggactgcaagtacccccagaagccacacaagtctcggagccggagttcttcccgttctcgaagcaggtcacgggagcgggcggataatccgggaaaatacaagaagaaaagtcattactacagagatcagcgacgagagcgctcgaggtcgtatgaacgcacaggccgtcgctatgagcgggaccaccctgggcacagcaggcatcggaggtgaggcggggttgcagtgactggtggccgcaagcccttccctggggagtacctgatggctgccctttgacccccggtggctgccctttgacccccgggtgtgctctcagcgcaagtggtcctagaacaggattctttttggaaatgtctgtcgactggaccttggtggatttggaaatggaactgagggaccggtgacacgtgcttcagaccggtctggggtgcggcgcacacctgggcccgtgcagggctcagctcggcagcagctctgagggcagctcaatgaaaaagtgaatgcacacgcccttgttggcgtggcctggcatggcctggtgctatcggcagccgctctccactccccgactgatactcaattacgtgaagccaagaaagatgatttttagaacctttgcctatattaggttgtacttatgtacatattttgcagtgtttcacaggagaaagtggccttaactgccccttattctctctccacgttgtaaataaacatgtgtttaatacaagttaaagctatgtatgaaaactcagaacttgaatcccgtcagcttaaaacttgtgtagggaatcctgacttttaaaatgtgagggtatttggatctgtgttgaaagtcgtatatttttatctgtgcggtgctgagtgcaggccaccagctcctaaatagaggttccctatatgcgcgtatgacatggtgaataaacacaactctctccactcaggacatccggagcgttatggacgtggtaggtggtcgttctgtgtgcttgtgaaagtgtccaggcgtgtgcacagccagtgcgcccacttccgggctccttgctccctgctgtactgaagttttggattttgcatccaatcctgtgtgcctgcccttctgccgaaggcttgtgaggggcctgagtcctctgcccatcaggatgacaggctccttcctgcagggccataggagggaagttttggaaacacagaatgattccaaggtgctctcgttcctgagggggactggtttgtaacccatgacatctgtgggcgagagaggcagctgggagcaggacacttggagggtcaccccacgggggtggcacctgcactctgagtgccccccactgtcatcagctgcctcttaccgtggacacagttttggttttggggactagggggccccactcctggtggtaccgtttggacttactagggcagtgggacatataggccggggctagtgggataacggggagttacgcctgatgacttttttgatggaatcctgcattagatagctggtgggacccccccctcagaattggggaactgaggagactccagggagggtgtccttccagggagagcagctatgaggggccccctagcttcctgtgcctggaagtaagagaaccagtaaagggccatacacacctgtacccaagagaccgctctccatttgctttctttttttactaaataattgtaaaatattattatgacataaagaaccatttaaggccaaaaaaaaaaaaaaaaaaaaaaaaaaaaaaaaaaaaannnnntcgaggtcgggcttgggaagggtcagcgggaggcctgagggcgccgggcgctgcggcaggcgggcccggggtccagccgagagggtccgggcgccaggcaacgcgattcgcgcgggggtgaacccggggagggggccggcctccccgttctgggacctttcgctcccctgggacctgtggccgccgcccacagaccatgctcctggggcgcctgacttcccagctgttgagggccgttccttgggcaggcggccgcccgccttggcccgtctctggagtgctgggcagccgggtctgcgggcccctttacagcacatcgccggccggcccaggtagggcggcctctctccctcgcaagggggcccagctggagctggaggagatgctggtccccaggaagatgtccgtcagccccctggagagctggctcacggcccgctgcttcctgcccagactggataccgggaccgcagggactgtggctccaccgcaatcctaccagtgtccgcccagccagataggggaaggggccgagcagggggatgaaggcgtcgcggatgcgcctcaaattcagtgcaaaaacgtgctgaagatccgccggcggaagatgaaccaccacaagtaccggaagctggtgaagaagacgcggttcctgcggaggaaggtccaggagggacgcctgagacgcaagcagatcaagttcgagaaagacctgaggcgcatctggctgaaggcggggctaaaggaagcccccgaaggctggcagacccccaagatctacctgcggggcaaatgagtctggcgccgcccttcccgcccgttgctgctgtgatccgtagtaataaattctcagaggactcagcc

SEQ ID NO: 306713 - DNA, 4208 bp, Homo sapiens
  misc_feature (3340)..(3344): n is a, c, g, or t
gggagtcggcggcacaaaatggcggcggcggcggcggcggctggtgctgcagggtcggcagctcccgcggcagcggccggcgccccgggatctgggggcgcaccctcagggtcgcagggggtgctgatcggggacaggctgtactccggggtgctcatcaccttggagaactgcctcctgcctgacgacaagctccgtttcacgccgtccatgtcgagcggcctcgacaccgacacagagaccgacctccgcgtggtgggctgcgagctcatccaggcggccggtatcctgctccgcctgccgcaggtggccatggctaccgggcaggtgttgttccagcggttcttttataccaagtccttcgtgaagcactccatggaggtaaggcttcctcctgcacttcattcccagcgaagtatgttgagggtaaaacggtttgttactttgcccggttactaagggagtgagtacttgccccccagtctgagctctgtgccggagggttctgtttcttgactttttttttcccctgggtgcacctcccttttggtctgaatagccctcaagcctttggcggccgtcaggacgccgtggctggggacaaacatgggcgtgttgcaatgcttccgcttcagcatgtgtcaatggcctgtgtccacctggcttccaagatagaagaggccccaagacgcatacgggacgtcatcaatgtgtttcaccgccttcgacagctgagagacaaaaagaagcccgtgcctctactactggatcaagattatgttaatttaaagaaccaaattataaaggcggaaagacgagttctcaaagagttgggtttctgcgtccatgtgaagcatcctcataagataatcgttatgtaccttcaggtgttagagtgtgagcgtaaccaacacctggtccagacctcatggaattacatgaacgacagccttcgcaccgacgtcttcgtgcggttccagccagagagcatcgcctgtgcctgcatttatcttgctgcccggacgctggagatccctttgcccaatcgtccccattggtttcttttgtttggagcaactgaagaagaaattcaggaaatctgcttaaagatcttgcagctttatgctcggaaaaaggttgatctcacacacctggagggtgaagtggaaaaaagaaagcacgctatcgaagaggcaaaggcccaagcccggggcctgttgcctgggggcacacaggtgctggatggtacctcggggttctctcctgcccccaagctggtggaatcccccaaagaaggtaaagggagcaagccttccccactgtctgtgaagaacaccaagaggaggctggagggcgccaagaaagccaaggcggacagccccgtgaacggcttgccaaaggggcgagagagtcggagtcggagccggagccgtgagcagagctactcgaggtccccatcccgatcagcgtctcctaagaggaggaaaagtgacagcggctccacatctggtgggtccaagtcgcagagccgctcccggagcaggagtgactccccaccgagacaggccccccgcagcgctccctacaaaggctctgagattcggggctcccggaagtccaaggactgcaagtacccccagaagccacacaagtctcggagccggagttcttcccgttctcgaagcaggtcacgggagcgggcggataatccgggaaaatacaagaagaaaagtcattactacagagatcagcgacgagagcgctcgaggtcgtatgaacgcacaggccgtcgctatgagcgggaccaccctgggcacagcaggcatcggaggtgaggcggggttgcagtgactggtggccgcaagcccttccctggggagtacctgatggctgccctttgacccccggtggctgccctttgacccccgggtgtgctctcagcgcaagtggtcctagaacaggattctttttggaaatgtctgtcgactggaccttggtggatttggaaatggaactgagggaccggtgacacgtgcttcagaccggtctggggtgcggcgcacacctgggcccgtgcagggctcagctcggcagcagctctgagggcagctcaatgaaaaagtgaatgcacacgcccttgttggcgtggcctggcatggcctggtgctatcggcagccgctctccactccccgactgatactcaattacgtgaagccaagaaagatgatttttagaacctttgcctatattaggttgtacttatgtacatattttgcagtgtttcacaggagaaagtggccttaactgccccttattctctctccacgttgtaaataaacatgtgtttaatacaagttaaagctatgtatgaaaactcagaacttgaatcccgtcagcttaaaacttgtgtagggaatcctgacttttagtgctgagtgcaggccaccagctcctaaatagaggttccctatatgcgcgtatgacatggtgaataaacacaactctctccactcaggacatccggagcgttatggacgtggtaggtggtcgttctgtgtgcttgtgaaagtgtccaggcgtgtgcacagccagtgcgcccacttccgggctccttgctccctgctgtactgaagttttggattttgcatccaatcctgtgtgcctgcccttctgccgaaggcttgtgaggggcctgagtcctctgcccatcaggatgacaggctccttcctgcagggccataggagggaagttttggaaacacagaatgattccaaggtgctctcgttcctgagggggactggtttgtaacccatgacatctgtgggcgagagaggcagctgggagcaggacacttggagggtcaccccacgggggtggcacctgcactctgagtgccccccactgtcatcagctgcctcttaccgtggacacagttttggttttggggactagggggccccactcctggtggtaccgtttggacttactagggcagtgggacatataggccggggctagtgggataacggggagttacgcctgatgacttttttgatggaatcctgcattagatagctggtgggacccccccctcagaattggggaactgaggagactccagggagggtgtccttccagggagagcagctatgaggggccccctagcttcctgtgcctggaagtaagagaaccagtaaagggccatacacacctgtacccaagagaccgctctccatttgctttctttttttactaaataattgtaaaatattattatgacataaagaaccatttaaggccaaaaaaaaaaaaaaaaaaaaaaaaaaaaaaaaaaaaannnnntcgaggtcgggcttgggaagggtcagcgggaggcctgagggcgccgggcgctgcggcaggcgggcccggggtccagccgagagggtccgggcgccaggcaacgcgattcgcgcgggggtgaacccggggagggggccggcctccccgttctgggacctttcgctcccctgggacctgtggccgccgcccacagaccatgctcctggggcgcctgacttcccagctgttgagggccgttccttgggcaggcggccgcccgccttggcccgtctctggagtgctgggcagccgggtctgcgggcccctttacagcacatcgccggccggcccaggtagggcggcctctctccctcgcaagggggcccagctggagctggaggagatgctggtccccaggaagatgtccgtcagccccctggagagctggctcacggcccgctgcttcctgcccagactggataccgggaccgcagggactgtggctccaccgcaatcctaccagtgtccgcccagccagataggggaaggggccgagcagggggatgaaggcgtcgcggatgcgcctcaaattcagtgcaaaaacgtgctgaagatccgccggcggaagatgaaccaccacaagtaccggaagctggtgaagaagacgcggttcctgcggaggaaggtccaggagggacgcctgagacgcaagcagatcaagttcgagaaagacctgaggcgcatctggctgaaggcggggctaaaggaagcccccgaaggctggcagacccccaagatctacctgcggggcaaatgagtctggcgccgcccttcccgcccgttgctgctgtgatccgtagtaataaattctcagaggactcagcc

SEQ ID NO: 306714 - DNA, 4937 bp, Homo sapiens
  misc_feature (4069)..(4073): n is a, c, g, or t
gggagtcggcggcacaaaatggcggcggcggcggcggcggctggtgctgcagggtcggcagctcccgcggcagcggccggcgccccgggatctgggggcgcaccctcagggtcgcagggggtgctgatcggggacaggctgtactccggggtgctcatcaccttggagaactgcctcctgcctgacgacaagctccgtttcacgccgtccatgtcgagcggcctcgacaccgacacagagaccgacctccgcgtggtgggctgcgagctcatccaggcggccggtatcctgctccgcctgccgcaggtggccatggctaccgggcaggtgttgttccagcggttcttttataccaagtccttcgtgaagcactccatggaggtaaggcttcctcctgcacttcattcccagcgaagtatgttgagggtaaaacggtttgttactttgcccggttactaagggagtgagtacttgccccccagtctgagctctgtgccggagggttctgtttcttgactttttttttcccctgggtgcacctcccttttggtctgaatagccctcaagcctttggcggccgtcaggacgccgtggctggggacaaacatgggcgtgttgcaatgcttccgcttcagcatgtgtcaatggcctgtgtccacctggcttccaagatagaagaggccccaagacgcatacgggacgtcatcaatgtgtttcaccgccttcgacagctgagagacaaaaagaagcccgtgcctctactactggatcaagattatgttaatttaaagaaccaaattataaaggcggaaagacgagttctcaaagagttgggtttctgcgtccatgtgaagcatcctcataagataatcgttatgtaccttcaggtgttagagtgtgagcgtaaccaacacctggtccagacctcatggaattacatgaacgacagccttcgcaccgacgtcttcgtgcggttccagccagagagcatcgcctgtgcctgcatttatcttgctgcccggacgctggagatccctttgcccaatcgtccccattggtttcttttgtttggagcaactgaagaagaaattcaggaaatctgcttaaagatcttgcagctttatgctcggaaaaaggttgatctcacacacctggagggtgaagtggaaaaaagaaagcacgctatcgaagaggcaaaggcccaagcccggggcctgttgcctgggggcacacaggtgctggatggtacctcggggttctctcctgcccccaagctggcctggagtgcagtggcgctatctgggatcactgcaagctccgcctaccagattctggtgattcttgtgcctcagcctcccaagtagctgggattgcaggcgcccaccaccacgctcaggtaatttgtgtgtgagtgtgtgtctatgtatatatatatatagagagagagagagagacacacactcacatgttttggggtttttttgttttgttttgtttttcttgagacagagtctcgctgtgttgccaggtgagtactgtggcgtgatctcggctcactgtaacctccgcctcctgggtccaagcgattcttctgcttcagcctctggagtagctgggactacaggcgcgtgccaccaagcccagctaatttttgtagttttagtagagatggggtttcaccatgttgggcaggatggtctcaatgtattgactttgtgatccgccctcctcggcctcccgaagtgctgggctcacaggcgtgagcccccgcgtccagccccatctgcatttctgtgatgtctgtgtaagttctgggtcccagctgggagccggaagttacagtctgcttgcgtcgctgtttgacctgtagaggggccttatctcgctctacgaacttgtttcttattgggagagtgttttgtggttggcttttaacctcttgttctgattctagtggaatcccccaaagaaggtaaagggagcaagccttccccactgtctgtgaagaacaccaagaggaggctggagggcgccaagaaagccaaggcggacagccccgtgaacggcttgccaaaggggcgagagagtcggagtcggagccggagccgtgagcagagctactcgaggtccccatcccgatcagcgtctcctaagaggaggaaaagtgacagcggctccacatctggtgggtccaagtcgcagagccgctcccggagcaggagtgactccccaccgagacaggccccccgcagcgctccctacaaaggctctgagattcggggctcccggaagtccaaggactgcaagtacccccagaagccacacaagtctcggagccggagttcttcccgttctcgaagcaggtcacgggagcgggcggataatccgggaaaatacaagaagaaaagtcattactacagagatcagcgacgagagcgctcgaggtcgtatgaacgcacaggccgtcgctatgagcgggaccaccctgggcacagcaggcatcggaggtgaggcggggttgcagtgactggtggccgcaagcccttccctggggagtacctgatggctgccctttgacccccggtggctgccctttgacccccgggtgtgctctcagcgcaagtggtcctagaacaggattctttttggaaatgtctgtcgactggaccttggtggatttggaaatggaactgagggaccggtgacacgtgcttcagaccggtctggggtgcggcgcacacctgggcccgtgcagggctcagctcggcagcagctctgagggcagctcaatgaaaaagtgaatgcacacgcccttgttggcgtggcctggcatggcctggtgctatcggcagccgctctccactccccgactgatactcaattacgtgaagccaagaaagatgatttttagaacctttgcctatattaggttgtacttatgtacatattttgcagtgtttcacaggagaaagtggccttaactgccccttattctctctccacgttgtaaataaacatgtgtttaatacaagttaaagctatgtatgaaaactcagaacttgaatcccgtcagcttaaaacttgtgtagggaatcctgacttttaaaatgtgagggtatttggatctgtgttgaaagtcgtatatttttatctgtgcggtgctgagtgcaggccaccagctcctaaatagaggttccctatatgcgcgtatgacatggtgaataaacacaactctctccactcaggacatccggagcgttatggacgtggtaggtggtcgttctgtgtgcttgtgaaagtgtccaggcgtgtgcacagccagtgcgcccacttccgggctccttgctccctgctgtactgaagttttggattttgcatccaatcctgtgtgcctgcccttctgccgaaggcttgtgaggggcctgagtcctctgcccatcaggatgacaggctccttcctgcagggccataggagggaagttttggaaacacagaatgattccaaggtgctctcgttcctgagggggactggtttgtaacccatgacatctgtgggcgagagaggcagctgggagcaggacacttggagggtcaccccacgggggtggcacctgcactctgagtgccccccactgtcatcagctgcctcttaccgtggacacagttttggttttggggactagggggccccactcctggtggtaccgtttggacttactagggcagtgggacatataggccggggctagtgggataacggggagttacgcctgatgacttttttgatggaatcctgcattagatagctggtgggacccccccctcagaattggggaactgaggagactccagggagggtgtccttccagggagagcagctatgaggggccccctagcttcctgtgcctggaagtaagagaaccagtaaagggccatacacacctgtacccaagagaccgctctccatttgctttctttttttactaaataattgtaaaatattattatgacataaagaaccatttaaggccaaaaaaaaaaaaaaaaaaaaaaaaaaaaaaaaaaaaannnnntcgaggtcgggcttgggaagggtcagcgggaggcctgagggcgccgggcgctgcggcaggcgggcccggggtccagccgagagggtccgggcgccaggcaacgcgattcgcgcgggggtgaacccggggagggggccggcctccccgttctgggacctttcgctcccctgggacctgtggccgccgcccacagaccatgctcctggggcgcctgacttcccagctgttgagggccgttccttgggcaggcggccgcccgccttggcccgtctctggagtgctgggcagccgggtctgcgggcccctttacagcacatcgccggccggcccaggtagggcggcctctctccctcgcaagggggcccagctggagctggaggagatgctggtccccaggaagatgtccgtcagccccctggagagctggctcacggcccgctgcttcctgcccagactggataccgggaccgcagggactgtggctccaccgcaatcctaccagtgtccgcccagccagataggggaaggggccgagcagggggatgaaggcgtcgcggatgcgcctcaaattcagtgcaaaaacgtgctgaagatccgccggcggaagatgaaccaccacaagtaccggaagctggtgaagaagacgcggttcctgcggaggaaggtccaggagggacgcctgagacgcaagcagatcaagttcgagaaagacctgaggcgcatctggctgaaggcggggctaaaggaagcccccgaaggctggcagacccccaagatctacctgcggggcaaatgagtctggcgccgcccttcccgcccgttgctgctgtgatccgtagtaataaattctcagaggactcagcc

SEQ ID NO: 306715 - DNA, 4465 bp, Homo sapiens
  misc_feature (3393)..(3397): n is a, c, g, or t
gggagtcggcggcacaaaatggcggcggcggcggcggcggctggtgctgcagggtcggcagctcccgcggcagcggccggcgccccgggatctgggggcgcaccctcagggtcgcagggggtgctgatcggggacaggctgtactccggggtgctcatcaccttggagaactgcctcctgcctgacgacaagctccgtttcacgccgtccatgtcgagcggcctcgacaccgacacagagaccgacctccgcgtggtgggctgcgagctcatccaggcggccggtatcctgctccgcctgccgcaggtggccatggctaccgggcaggtgttgttccagcggttcttttataccaagtccttcgtgaagcactccatggaggtaaggcttcctcctgcacttcattcccagcgaagtatgttgagggtaaaacggtttgttactttgcccggttactaagggagtgagtacttgccccccagtctgagctctgtgccggagggttctgtttcttgactttttttttcccctgggtgcacctcccttttggtctgaatagccctcaagcctttggcggccgtcaggacgccgtggctggggacaaacatgggcgtgttgcaatgcttccgcttcagcatgtgtcaatggcctgtgtccacctggcttccaagatagaagaggccccaagacgcatacgggacgtcatcaatgtgtttcaccgccttcgacagctgagagacaaaaagaagcccgtgcctctactactggatcaagattatgttaatttaaagaaccaaattataaaggcggaaagacgagttctcaaagagttgggtttctgcgtccatgtgaagcatcctcataagataatcgttatgtaccttcaggtgttagagtgtgagcgtaaccaacacctggtccagacctcatggaattacatgaacgacagccttcgcaccgacgtcttcgtgcggttccagccagagagcatcgcctgtgcctgcatttatcttgctgcccggacgctggagatccctttgcccaatcgtccccattggtttcttttgtttggagcaactgaagaagaaattcaggaaatctgcttaaagatcttgcagctttatgctcggaaaaaggttgatctcacacacctggagggtgaagtggaaaaaagaaagcacgctatcgaagaggcaaaggcccaagcccggggcctgttgcctgggggcacacaggtgctggatggtacctcggggttctctcctgcccccaagctggtggaatcccccaaagaaggtaaagggagcaagccttccccactgtctgtgaagaacaccaagaggaggctggagggcgccaagaaagccaaggcggacagccccgtgaacggcttgccaaaggggcgagagagtcggagtcggagccggagccgtgagcagagctactcgaggtccccatcccgatcagcgtctcctaagaggaggaaaagtgacagcggctccacatctggtgggtccaagtcgcagagccgctcccggagcaggagtgactccccaccgagacaggccccccgcagcgctccctacaaaggctctgagattcggggctcccggaagtccaaggactgcaagtacccccagaagccacacaagtctcggagccggagttcttcccgttctcgaagcaggtcacgggagcgggcggataatccgggaaaatacaagaagaaaagtcattactacagagatcagcgacgagagcgctcgaggtcgtatgaacgcacaggccgtcgctatgagcgggaccaccctgggcacagcaggcatcggaggtgaggcggggttgcagtgactggtggccgcaagcccttccctggggagtacctgatggctgccctttgacccccggtggctgccctttgacccccgggtgtgctctcagcgcaagtggtcctagaacaggattctttttggaaatgtctgtcgactggaccttggtggatttggaaatggaactgagggaccggtgacacgtgcttcagaccggtctggggtgcggcgcacacctgggcccgtgcagggctcagctcggcagcagctctgagggcagctcaatgaaaaagtgaatgcacacgcccttgttggcgtggcctggcatggcctggtgctatcggcagccgctctccactccccgactgatactcaattacgtgaagccaagaaagatgatttttagaacctttgcctatattaggttgtacttatgtacatattttgcagtgtttcacaggagaaagtggccttaactgccccttattctctctccacgttgtaaataaacatgtgtttaatacaagttaaagctatgtatgaaaactcagaacttgaatcccgtcagcttaaaacttgtgtagggaatcctgacttttaaaatgtgagggtatttggatctgtgttgaaagtcgtatatttttatctgtgcggtgctgagtgcaggccaccagctcctaaatagaggttccctatatgcgcgtatgacatggtgaataaacacaactctctccactcaggacatccggagcgttatggacgtggtaggtggtcgttctgtgtgcttgtgaaagtgtccaggcgtgtgcacagccagtgcgcccacttccgggctccttgctccctgctgtactgaagttttggattttgcatccaatcctgtgtgcctgcccttctgccgaaggcttgtgaggggcctgagtcctctgcccatcaggatgacaggctccttcctgcagggccataggagggaagttttggaaacacagaatgattccaaggtgctctcgttcctgagggggactggtttgtaacccatgacatctgtgggcgagagaggcagctgggagcaggacacttggagggtcaccccacgggggtggcacctgcactctgagtgccccccactgtcatcagctgcctcttaccgtggacacagttttggttttggggactagggggccccactcctggtggtaccgtttggacttactagggcagtgggacatataggccggggctagtgggataacggggagttacgcctgatgacttttttgatggaatcctgcattagatagctggtgggacccccccctcagaattggggaactgaggagactccagggagggtgtccttccagggagagcagctatgaggggccccctagcttcctgtgcctggaagtaagagaaccagtaaagggccatacacacctgtacccaagagaccgctctccatttgctttctttttttactaaataattgtaaaatattattatgacataaagaaccatttaaggccaaaaaaaaaaaaaaaaaaaaaaaaaaaaaaaaaaaaannnnntcgaggtcgggcttgggaagggtcagcgggaggcctgagggcgccgggcgctgcggcaggcgggcccggggtccagccgagagggtccgggcgccaggcaacgcgattcgcgcgggggtgaacccggggagggggccggcctccccgttctgggacctttcggcgtccgagcgcgacaccgcccgcgtcgggggcttgggagcctcggggcgcgagctgtgttggaagcaaagtcctccttgtgggttggggtggcggagggagaagggaagcgagggtcgcggcgggaccagacgccccagtcccggcccgcccgcgactactgaaggcgctgccgcctgacctgaacgggcacttgtgttccagctcccctgggacctgtggccgccgcccacagaccatgctcctggggcgcctgacttcccagctgttgagggccgttccttgggcaggcggccgcccgccttggcccgtctctggagtgctgggcagccgggtctgcgggcccctttacagcacatcgccggccggcccaggtagggcggcctctctccctcgcaagggggcccagctggagctggaggagatgctggtccccaggaagatgtccgtcagccccctggagagctggctcacggcccgctgcttcctgcccagactggataccgggaccgcagggactgtggctccaccgcaatcctaccagtgtccgcccagccagataggggaaggggccgagcagggggatgaaggcgtcgcggatgcgcctcaaattcagtgcaaaaacgtgctgaagatccgccggcggaagatgaaccaccacaagtaccggaagctggtgaagaagacgcggttcctgcggaggaaggtccaggagggacgcctgagacgcaagcagatcaagttcgagaaagacctgaggcgcatctggctgaaggcggggctaaaggaagcccccgaaggctggcagacccccaagatctacctgcggggcaaatgagtctggcgccgcccttcccgcccgttgctgctgtgatccgtagtaataaattctcagaggactcagcc

SEQ ID NO: 306716 - DNA, 4520 bp, Homo sapiens
  misc_feature (3393)..(3397): n is a, c, g, or t
gggagtcggcggcacaaaatggcggcggcggcggcggcggctggtgctgcagggtcggcagctcccgcggcagcggccggcgccccgggatctgggggcgcaccctcagggtcgcagggggtgctgatcggggacaggctgtactccggggtgctcatcaccttggagaactgcctcctgcctgacgacaagctccgtttcacgccgtccatgtcgagcggcctcgacaccgacacagagaccgacctccgcgtggtgggctgcgagctcatccaggcggccggtatcctgctccgcctgccgcaggtggccatggctaccgggcaggtgttgttccagcggttcttttataccaagtccttcgtgaagcactccatggaggtaaggcttcctcctgcacttcattcccagcgaagtatgttgagggtaaaacggtttgttactttgcccggttactaagggagtgagtacttgccccccagtctgagctctgtgccggagggttctgtttcttgactttttttttcccctgggtgcacctcccttttggtctgaatagccctcaagcctttggcggccgtcaggacgccgtggctggggacaaacatgggcgtgttgcaatgcttccgcttcagcatgtgtcaatggcctgtgtccacctggcttccaagatagaagaggccccaagacgcatacgggacgtcatcaatgtgtttcaccgccttcgacagctgagagacaaaaagaagcccgtgcctctactactggatcaagattatgttaatttaaagaaccaaattataaaggcggaaagacgagttctcaaagagttgggtttctgcgtccatgtgaagcatcctcataagataatcgttatgtaccttcaggtgttagagtgtgagcgtaaccaacacctggtccagacctcatggaattacatgaacgacagccttcgcaccgacgtcttcgtgcggttccagccagagagcatcgcctgtgcctgcatttatcttgctgcccggacgctggagatccctttgcccaatcgtccccattggtttcttttgtttggagcaactgaagaagaaattcaggaaatctgcttaaagatcttgcagctttatgctcggaaaaaggttgatctcacacacctggagggtgaagtggaaaaaagaaagcacgctatcgaagaggcaaaggcccaagcccggggcctgttgcctgggggcacacaggtgctggatggtacctcggggttctctcctgcccccaagctggtggaatcccccaaagaaggtaaagggagcaagccttccccactgtctgtgaagaacaccaagaggaggctggagggcgccaagaaagccaaggcggacagccccgtgaacggcttgccaaaggggcgagagagtcggagtcggagccggagccgtgagcagagctactcgaggtccccatcccgatcagcgtctcctaagaggaggaaaagtgacagcggctccacatctggtgggtccaagtcgcagagccgctcccggagcaggagtgactccccaccgagacaggccccccgcagcgctccctacaaaggctctgagattcggggctcccggaagtccaaggactgcaagtacccccagaagccacacaagtctcggagccggagttcttcccgttctcgaagcaggtcacgggagcgggcggataatccgggaaaatacaagaagaaaagtcattactacagagatcagcgacgagagcgctcgaggtcgtatgaacgcacaggccgtcgctatgagcgggaccaccctgggcacagcaggcatcggaggtgaggcggggttgcagtgactggtggccgcaagcccttccctggggagtacctgatggctgccctttgacccccggtggctgccctttgacccccgggtgtgctctcagcgcaagtggtcctagaacaggattctttttggaaatgtctgtcgactggaccttggtggatttggaaatggaactgagggaccggtgacacgtgcttcagaccggtctggggtgcggcgcacacctgggcccgtgcagggctcagctcggcagcagctctgagggcagctcaatgaaaaagtgaatgcacacgcccttgttggcgtggcctggcatggcctggtgctatcggcagccgctctccactccccgactgatactcaattacgtgaagccaagaaagatgatttttagaacctttgcctatattaggttgtacttatgtacatattttgcagtgtttcacaggagaaagtggccttaactgccccttattctctctccacgttgtaaataaacatgtgtttaatacaagttaaagctatgtatgaaaactcagaacttgaatcccgtcagcttaaaacttgtgtagggaatcctgacttttaaaatgtgagggtatttggatctgtgttgaaagtcgtatatttttatctgtgcggtgctgagtgcaggccaccagctcctaaatagaggttccctatatgcgcgtatgacatggtgaataaacacaactctctccactcaggacatccggagcgttatggacgtggtaggtggtcgttctgtgtgcttgtgaaagtgtccaggcgtgtgcacagccagtgcgcccacttccgggctccttgctccctgctgtactgaagttttggattttgcatccaatcctgtgtgcctgcccttctgccgaaggcttgtgaggggcctgagtcctctgcccatcaggatgacaggctccttcctgcagggccataggagggaagttttggaaacacagaatgattccaaggtgctctcgttcctgagggggactggtttgtaacccatgacatctgtgggcgagagaggcagctgggagcaggacacttggagggtcaccccacgggggtggcacctgcactctgagtgccccccactgtcatcagctgcctcttaccgtggacacagttttggttttggggactagggggccccactcctggtggtaccgtttggacttactagggcagtgggacatataggccggggctagtgggataacggggagttacgcctgatgacttttttgatggaatcctgcattagatagctggtgggacccccccctcagaattggggaactgaggagactccagggagggtgtccttccagggagagcagctatgaggggccccctagcttcctgtgcctggaagtaagagaaccagtaaagggccatacacacctgtacccaagagaccgctctccatttgctttctttttttactaaataattgtaaaatattattatgacataaagaaccatttaaggccaaaaaaaaaaaaaaaaaaaaaaaaaaaaaaaaaaaaannnnntcgaggtcgggcttgggaagggtcagcgggaggcctgagggcgccgggcgctgcggcaggcgggcccggggtccagccgagagggtccgggcgccaggcaacgcgattcgcgcgggggtgaacccggggagggggccggcctccccgttctgggacctttcgctcccctgggacctgtggccgccgcccacagaccatgctcctggggcgcctgacttcccagctgttgagggccgttccttgggcaggtaggaagccccgcgggggcggatgggaggatgcacacctggttaggagtgcgggtctcagcagctccgctggggcagggccggtggccacacacacactctttcccctctaagcttccgatgctcacagagggaacctcaggggttcaggccaggaatgaggtgcgggggatcctcgctgggacgaacctgctgctcctcaacccgacgggcctgtgtggtctcgcgagcggtgaccgtggcgtctggttttctgcaggcggccgcccgccttggcccgtctctggagtgctgggcagccgggtctgcgggcccctttacagcacatcgccggccggcccaggtagggcggcctctctccctcgcaagggggcccagctggagctggaggagatgctggtccccaggaagatgtccgtcagccccctggagagctggctcacggcccgctgcttcctgcccagactggataccgggaccgcagggactgtggctccaccgcaatcctaccagtgtccgcccagccagataggggaaggggccgagcagggggatgaaggcgtcgcggatgcgcctcaaattcagtgcaaaaacgtgctgaagatccgccggcggaagatgaaccaccacaagtaccggaagctggtgaagaagacgcggttcctgcggaggaaggtccaggagggacgcctgagacgcaagcagatcaagttcgagaaagacctgaggcgcatctggctgaaggcggggctaaaggaagcccccgaaggctggcagacccccaagatctacctgcggggcaaatgagtctggcgccgcccttcccgcccgttgctgctgtgatccgtagtaataaattctcagaggactcagcc

SEQ ID NO: 306717 - DNA, 4724 bp, Homo sapiens
  misc_feature (3393)..(3397): n is a, c, g, or t
gggagtcggcggcacaaaatggcggcggcggcggcggcggctggtgctgcagggtcggcagctcccgcggcagcggccggcgccccgggatctgggggcgcaccctcagggtcgcagggggtgctgatcggggacaggctgtactccggggtgctcatcaccttggagaactgcctcctgcctgacgacaagctccgtttcacgccgtccatgtcgagcggcctcgacaccgacacagagaccgacctccgcgtggtgggctgcgagctcatccaggcggccggtatcctgctccgcctgccgcaggtggccatggctaccgggcaggtgttgttccagcggttcttttataccaagtccttcgtgaagcactccatggaggtaaggcttcctcctgcacttcattcccagcgaagtatgttgagggtaaaacggtttgttactttgcccggttactaagggagtgagtacttgccccccagtctgagctctgtgccggagggttctgtttcttgactttttttttcccctgggtgcacctcccttttggtctgaatagccctcaagcctttggcggccgtcaggacgccgtggctggggacaaacatgggcgtgttgcaatgcttccgcttcagcatgtgtcaatggcctgtgtccacctggcttccaagatagaagaggccccaagacgcatacgggacgtcatcaatgtgtttcaccgccttcgacagctgagagacaaaaagaagcccgtgcctctactactggatcaagattatgttaatttaaagaaccaaattataaaggcggaaagacgagttctcaaagagttgggtttctgcgtccatgtgaagcatcctcataagataatcgttatgtaccttcaggtgttagagtgtgagcgtaaccaacacctggtccagacctcatggaattacatgaacgacagccttcgcaccgacgtcttcgtgcggttccagccagagagcatcgcctgtgcctgcatttatcttgctgcccggacgctggagatccctttgcccaatcgtccccattggtttcttttgtttggagcaactgaagaagaaattcaggaaatctgcttaaagatcttgcagctttatgctcggaaaaaggttgatctcacacacctggagggtgaagtggaaaaaagaaagcacgctatcgaagaggcaaaggcccaagcccggggcctgttgcctgggggcacacaggtgctggatggtacctcggggttctctcctgcccccaagctggtggaatcccccaaagaaggtaaagggagcaagccttccccactgtctgtgaagaacaccaagaggaggctggagggcgccaagaaagccaaggcggacagccccgtgaacggcttgccaaaggggcgagagagtcggagtcggagccggagccgtgagcagagctactcgaggtccccatcccgatcagcgtctcctaagaggaggaaaagtgacagcggctccacatctggtgggtccaagtcgcagagccgctcccggagcaggagtgactccccaccgagacaggccccccgcagcgctccctacaaaggctctgagattcggggctcccggaagtccaaggactgcaagtacccccagaagccacacaagtctcggagccggagttcttcccgttctcgaagcaggtcacgggagcgggcggataatccgggaaaatacaagaagaaaagtcattactacagagatcagcgacgagagcgctcgaggtcgtatgaacgcacaggccgtcgctatgagcgggaccaccctgggcacagcaggcatcggaggtgaggcggggttgcagtgactggtggccgcaagcccttccctggggagtacctgatggctgccctttgacccccggtggctgccctttgacccccgggtgtgctctcagcgcaagtggtcctagaacaggattctttttggaaatgtctgtcgactggaccttggtggatttggaaatggaactgagggaccggtgacacgtgcttcagaccggtctggggtgcggcgcacacctgggcccgtgcagggctcagctcggcagcagctctgagggcagctcaatgaaaaagtgaatgcacacgcccttgttggcgtggcctggcatggcctggtgctatcggcagccgctctccactccccgactgatactcaattacgtgaagccaagaaagatgatttttagaacctttgcctatattaggttgtacttatgtacatattttgcagtgtttcacaggagaaagtggccttaactgccccttattctctctccacgttgtaaataaacatgtgtttaatacaagttaaagctatgtatgaaaactcagaacttgaatcccgtcagcttaaaacttgtgtagggaatcctgacttttaaaatgtgagggtatttggatctgtgttgaaagtcgtatatttttatctgtgcggtgctgagtgcaggccaccagctcctaaatagaggttccctatatgcgcgtatgacatggtgaataaacacaactctctccactcaggacatccggagcgttatggacgtggtaggtggtcgttctgtgtgcttgtgaaagtgtccaggcgtgtgcacagccagtgcgcccacttccgggctccttgctccctgctgtactgaagttttggattttgcatccaatcctgtgtgcctgcccttctgccgaaggcttgtgaggggcctgagtcctctgcccatcaggatgacaggctccttcctgcagggccataggagggaagttttggaaacacagaatgattccaaggtgctctcgttcctgagggggactggtttgtaacccatgacatctgtgggcgagagaggcagctgggagcaggacacttggagggtcaccccacgggggtggcacctgcactctgagtgccccccactgtcatcagctgcctcttaccgtggacacagttttggttttggggactagggggccccactcctggtggtaccgtttggacttactagggcagtgggacatataggccggggctagtgggataacggggagttacgcctgatgacttttttgatggaatcctgcattagatagctggtgggacccccccctcagaattggggaactgaggagactccagggagggtgtccttccagggagagcagctatgaggggccccctagcttcctgtgcctggaagtaagagaaccagtaaagggccatacacacctgtacccaagagaccgctctccatttgctttctttttttactaaataattgtaaaatattattatgacataaagaaccatttaaggccaaaaaaaaaaaaaaaaaaaaaaaaaaaaaaaaaaaaannnnntcgaggtcgggcttgggaagggtcagcgggaggcctgagggcgccgggcgctgcggcaggcgggcccggggtccagccgagagggtccgggcgccaggcaacgcgattcgcgcgggggtgaacccggggagggggccggcctccccgttctgggacctttcggcgtccgagcgcgacaccgcccgcgtcgggggcttgggagcctcggggcgcgagctgtgttggaagcaaagtcctccttgtgggttggggtggcggagggagaagggaagcgagggtcgcggcgggaccagacgccccagtcccggcccgcccgcgactactgaaggcgctgccgcctgacctgaacgggcacttgtgttccagctcccctgggacctgtggccgccgcccacagaccatgctcctggggcgcctgacttcccagctgttgagggccgttccttgggcaggtaggaagccccgcgggggcggatgggaggatgcacacctggttaggagtgcgggtctcagcagctccgctggggcagggccggtggccacacacacactctttcccctctaagcttccgatgctcacagagggaacctcaggggttcaggccaggaatgaggtgcgggggatcctcgctgggacgaacctgctgctcctcaacccgacgggcctgtgtggtctcgcgagcggtgaccgtggcgtctggttttctgcaggcggccgcccgccttggcccgtctctggagtgctgggcagccgggtctgcgggcccctttacagcacatcgccggccggcccaggtagggcggcctctctccctcgcaagggggcccagctggagctggaggagatgctggtccccaggaagatgtccgtcagccccctggagagctggctcacggcccgctgcttcctgcccagactggataccgggaccgcagggactgtggctccaccgcaatcctaccagtgtccgcccagccagataggggaaggggccgagcagggggatgaaggcgtcgcggatgcgcctcaaattcagtgcaaaaacgtgctgaagatccgccggcggaagatgaaccaccacaagtaccggaagctggtgaagaagacgcggttcctgcggaggaaggtccaggagggacgcctgagacgcaagcagatcaagttcgagaaagacctgaggcgcatctggctgaaggcggggctaaaggaagcccccgaaggctggcagacccccaagatctacctgcggggcaaatgagtctggcgccgcccttcccgcccgttgctgctgtgatccgtagtaataaattctcagaggactcagcc

SEQ ID NO: 306718 - DNA, 4610 bp, Homo sapiens
  misc_feature (3393)..(3397): n is a, c, g, or t
gggagtcggcggcacaaaatggcggcggcggcggcggcggctggtgctgcagggtcggcagctcccgcggcagcggccggcgccccgggatctgggggcgcaccctcagggtcgcagggggtgctgatcggggacaggctgtactccggggtgctcatcaccttggagaactgcctcctgcctgacgacaagctccgtttcacgccgtccatgtcgagcggcctcgacaccgacacagagaccgacctccgcgtggtgggctgcgagctcatccaggcggccggtatcctgctccgcctgccgcaggtggccatggctaccgggcaggtgttgttccagcggttcttttataccaagtccttcgtgaagcactccatggaggtaaggcttcctcctgcacttcattcccagcgaagtatgttgagggtaaaacggtttgttactttgcccggttactaagggagtgagtacttgccccccagtctgagctctgtgccggagggttctgtttcttgactttttttttcccctgggtgcacctcccttttggtctgaatagccctcaagcctttggcggccgtcaggacgccgtggctggggacaaacatgggcgtgttgcaatgcttccgcttcagcatgtgtcaatggcctgtgtccacctggcttccaagatagaagaggccccaagacgcatacgggacgtcatcaatgtgtttcaccgccttcgacagctgagagacaaaaagaagcccgtgcctctactactggatcaagattatgttaatttaaagaaccaaattataaaggcggaaagacgagttctcaaagagttgggtttctgcgtccatgtgaagcatcctcataagataatcgttatgtaccttcaggtgttagagtgtgagcgtaaccaacacctggtccagacctcatggaattacatgaacgacagccttcgcaccgacgtcttcgtgcggttccagccagagagcatcgcctgtgcctgcatttatcttgctgcccggacgctggagatccctttgcccaatcgtccccattggtttcttttgtttggagcaactgaagaagaaattcaggaaatctgcttaaagatcttgcagctttatgctcggaaaaaggttgatctcacacacctggagggtgaagtggaaaaaagaaagcacgctatcgaagaggcaaaggcccaagcccggggcctgttgcctgggggcacacaggtgctggatggtacctcggggttctctcctgcccccaagctggtggaatcccccaaagaaggtaaagggagcaagccttccccactgtctgtgaagaacaccaagaggaggctggagggcgccaagaaagccaaggcggacagccccgtgaacggcttgccaaaggggcgagagagtcggagtcggagccggagccgtgagcagagctactcgaggtccccatcccgatcagcgtctcctaagaggaggaaaagtgacagcggctccacatctggtgggtccaagtcgcagagccgctcccggagcaggagtgactccccaccgagacaggccccccgcagcgctccctacaaaggctctgagattcggggctcccggaagtccaaggactgcaagtacccccagaagccacacaagtctcggagccggagttcttcccgttctcgaagcaggtcacgggagcgggcggataatccgggaaaatacaagaagaaaagtcattactacagagatcagcgacgagagcgctcgaggtcgtatgaacgcacaggccgtcgctatgagcgggaccaccctgggcacagcaggcatcggaggtgaggcggggttgcagtgactggtggccgcaagcccttccctggggagtacctgatggctgccctttgacccccggtggctgccctttgacccccgggtgtgctctcagcgcaagtggtcctagaacaggattctttttggaaatgtctgtcgactggaccttggtggatttggaaatggaactgagggaccggtgacacgtgcttcagaccggtctggggtgcggcgcacacctgggcccgtgcagggctcagctcggcagcagctctgagggcagctcaatgaaaaagtgaatgcacacgcccttgttggcgtggcctggcatggcctggtgctatcggcagccgctctccactccccgactgatactcaattacgtgaagccaagaaagatgatttttagaacctttgcctatattaggttgtacttatgtacatattttgcagtgtttcacaggagaaagtggccttaactgccccttattctctctccacgttgtaaataaacatgtgtttaatacaagttaaagctatgtatgaaaactcagaacttgaatcccgtcagcttaaaacttgtgtagggaatcctgacttttaaaatgtgagggtatttggatctgtgttgaaagtcgtatatttttatctgtgcggtgctgagtgcaggccaccagctcctaaatagaggttccctatatgcgcgtatgacatggtgaataaacacaactctctccactcaggacatccggagcgttatggacgtggtaggtggtcgttctgtgtgcttgtgaaagtgtccaggcgtgtgcacagccagtgcgcccacttccgggctccttgctccctgctgtactgaagttttggattttgcatccaatcctgtgtgcctgcccttctgccgaaggcttgtgaggggcctgagtcctctgcccatcaggatgacaggctccttcctgcagggccataggagggaagttttggaaacacagaatgattccaaggtgctctcgttcctgagggggactggtttgtaacccatgacatctgtgggcgagagaggcagctgggagcaggacacttggagggtcaccccacgggggtggcacctgcactctgagtgccccccactgtcatcagctgcctcttaccgtggacacagttttggttttggggactagggggccccactcctggtggtaccgtttggacttactagggcagtgggacatataggccggggctagtgggataacggggagttacgcctgatgacttttttgatggaatcctgcattagatagctggtgggacccccccctcagaattggggaactgaggagactccagggagggtgtccttccagggagagcagctatgaggggccccctagcttcctgtgcctggaagtaagagaaccagtaaagggccatacacacctgtacccaagagaccgctctccatttgctttctttttttactaaataattgtaaaatattattatgacataaagaaccatttaaggccaaaaaaaaaaaaaaaaaaaaaaaaaaaaaaaaaaaaannnnntcgaggtcgggcttgggaagggtcagcgggaggcctgagggcgccgggcgctgcggcaggcgggcccggggtccagccgagagggtccgggcgccaggcaacgcgattcgcgcgggggtgaacccggggagggggccggcctccccgttctgggacctttcggcgtccgagcgcgacaccgcccgcgtcgggggcttgggagcctcggggcgcgagctgtgttggaagcaaagtcctccttgtgggttggggtggcggagggagaagggaagcgagggtcgcggcgggaccagacgccccagtcccggcccgcccgcgactactgaaggcgctgccgcctgacctgaacgggcacttgtgttccagctcccctgggacctgtggccgccgcccacagaccatgctcctggggcgcctgacttcccagctgttgagggccgttccttgggcagcttccgatgctcacagagggaacctcaggggttcaggccaggaatgaggtgcgggggatcctcgctgggacgaacctgctgctcctcaacccgacgggcctgtgtggtctcgcgagcggtgaccgtggcgtctggttttctgcaggcggccgcccgccttggcccgtctctggagtgctgggcagccgggtctgcgggcccctttacagcacatcgccggccggcccaggtagggcggcctctctccctcgcaagggggcccagctggagctggaggagatgctggtccccaggaagatgtccgtcagccccctggagagctggctcacggcccgctgcttcctgcccagactggataccgggaccgcagggactgtggctccaccgcaatcctaccagtgtccgcccagccagataggggaaggggccgagcagggggatgaaggcgtcgcggatgcgcctcaaattcagtgcaaaaacgtgctgaagatccgccggcggaagatgaaccaccacaagtaccggaagctggtgaagaagacgcggttcctgcggaggaaggtccaggagggacgcctgagacgcaagcagatcaagttcgagaaagacctgaggcgcatctggctgaaggcggggctaaaggaagcccccgaaggctggcagacccccaagatctacctgcggggcaaatgagtctggcgccgcccttcccgcccgttgctgctgtgatccgtagtaataaattctcagaggactcagcc

SEQ ID NO: 306719 - DNA, 4183 bp, Homo sapiens
  misc_feature (3393)..(3397): n is a, c, g, or t
gggagtcggcggcacaaaatggcggcggcggcggcggcggctggtgctgcagggtcggcagctcccgcggcagcggccggcgccccgggatctgggggcgcaccctcagggtcgcagggggtgctgatcggggacaggctgtactccggggtgctcatcaccttggagaactgcctcctgcctgacgacaagctccgtttcacgccgtccatgtcgagcggcctcgacaccgacacagagaccgacctccgcgtggtgggctgcgagctcatccaggcggccggtatcctgctccgcctgccgcaggtggccatggctaccgggcaggtgttgttccagcggttcttttataccaagtccttcgtgaagcactccatggaggtaaggcttcctcctgcacttcattcccagcgaagtatgttgagggtaaaacggtttgttactttgcccggttactaagggagtgagtacttgccccccagtctgagctctgtgccggagggttctgtttcttgactttttttttcccctgggtgcacctcccttttggtctgaatagccctcaagcctttggcggccgtcaggacgccgtggctggggacaaacatgggcgtgttgcaatgcttccgcttcagcatgtgtcaatggcctgtgtccacctggcttccaagatagaagaggccccaagacgcatacgggacgtcatcaatgtgtttcaccgccttcgacagctgagagacaaaaagaagcccgtgcctctactactggatcaagattatgttaatttaaagaaccaaattataaaggcggaaagacgagttctcaaagagttgggtttctgcgtccatgtgaagcatcctcataagataatcgttatgtaccttcaggtgttagagtgtgagcgtaaccaacacctggtccagacctcatggaattacatgaacgacagccttcgcaccgacgtcttcgtgcggttccagccagagagcatcgcctgtgcctgcatttatcttgctgcccggacgctggagatccctttgcccaatcgtccccattggtttcttttgtttggagcaactgaagaagaaattcaggaaatctgcttaaagatcttgcagctttatgctcggaaaaaggttgatctcacacacctggagggtgaagtggaaaaaagaaagcacgctatcgaagaggcaaaggcccaagcccggggcctgttgcctgggggcacacaggtgctggatggtacctcggggttctctcctgcccccaagctggtggaatcccccaaagaaggtaaagggagcaagccttccccactgtctgtgaagaacaccaagaggaggctggagggcgccaagaaagccaaggcggacagccccgtgaacggcttgccaaaggggcgagagagtcggagtcggagccggagccgtgagcagagctactcgaggtccccatcccgatcagcgtctcctaagaggaggaaaagtgacagcggctccacatctggtgggtccaagtcgcagagccgctcccggagcaggagtgactccccaccgagacaggccccccgcagcgctccctacaaaggctctgagattcggggctcccggaagtccaaggactgcaagtacccccagaagccacacaagtctcggagccggagttcttcccgttctcgaagcaggtcacgggagcgggcggataatccgggaaaatacaagaagaaaagtcattactacagagatcagcgacgagagcgctcgaggtcgtatgaacgcacaggccgtcgctatgagcgggaccaccctgggcacagcaggcatcggaggtgaggcggggttgcagtgactggtggccgcaagcccttccctggggagtacctgatggctgccctttgacccccggtggctgccctttgacccccgggtgtgctctcagcgcaagtggtcctagaacaggattctttttggaaatgtctgtcgactggaccttggtggatttggaaatggaactgagggaccggtgacacgtgcttcagaccggtctggggtgcggcgcacacctgggcccgtgcagggctcagctcggcagcagctctgagggcagctcaatgaaaaagtgaatgcacacgcccttgttggcgtggcctggcatggcctggtgctatcggcagccgctctccactccccgactgatactcaattacgtgaagccaagaaagatgatttttagaacctttgcctatattaggttgtacttatgtacatattttgcagtgtttcacaggagaaagtggccttaactgccccttattctctctccacgttgtaaataaacatgtgtttaatacaagttaaagctatgtatgaaaactcagaacttgaatcccgtcagcttaaaacttgtgtagggaatcctgacttttaaaatgtgagggtatttggatctgtgttgaaagtcgtatatttttatctgtgcggtgctgagtgcaggccaccagctcctaaatagaggttccctatatgcgcgtatgacatggtgaataaacacaactctctccactcaggacatccggagcgttatggacgtggtaggtggtcgttctgtgtgcttgtgaaagtgtccaggcgtgtgcacagccagtgcgcccacttccgggctccttgctccctgctgtactgaagttttggattttgcatccaatcctgtgtgcctgcccttctgccgaaggcttgtgaggggcctgagtcctctgcccatcaggatgacaggctccttcctgcagggccataggagggaagttttggaaacacagaatgattccaaggtgctctcgttcctgagggggactggtttgtaacccatgacatctgtgggcgagagaggcagctgggagcaggacacttggagggtcaccccacgggggtggcacctgcactctgagtgccccccactgtcatcagctgcctcttaccgtggacacagttttggttttggggactagggggccccactcctggtggtaccgtttggacttactagggcagtgggacatataggccggggctagtgggataacggggagttacgcctgatgacttttttgatggaatcctgcattagatagctggtgggacccccccctcagaattggggaactgaggagactccagggagggtgtccttccagggagagcagctatgaggggccccctagcttcctgtgcctggaagtaagagaaccagtaaagggccatacacacctgtacccaagagaccgctctccatttgctttctttttttactaaataattgtaaaatattattatgacataaagaaccatttaaggccaaaaaaaaaaaaaaaaaaaaaaaaaaaaaaaaaaaaannnnntcgaggtcgggcttgggaagggtcagcgggaggcctgagggcgccgggcgctgcggcaggcgggcccggggtccagccgagaggctcccctgggacctgtggccgccgcccacagaccatgctcctggggcgcctgacttcccagctgttgagggccgttccttgggcaggcggccgcccgccttggcccgtctctggagtgctgggcagccgggtctgcgggcccctttacagcacatcgccggccggcccaggtagggcggcctctctccctcgcaagggggcccagctggagctggaggagatgctggtccccaggaagatgtccgtcagccccctggagagctggctcacggcccgctgcttcctgcccagactggataccgggaccgcagggactgtggctccaccgcaatcctaccagtgtccgcccagccagataggggaaggggccgagcagggggatgaaggcgtcgcggatgcgcctcaaattcagtgcaaaaacgtgctgaagatccgccggcggaagatgaaccaccacaagtaccggaagctggtgaagaagacgcggttcctgcggaggaaggtccaggagggacgcctgagacgcaagcagatcaagttcgagaaagacctgaggcgcatctggctgaaggcggggctaaaggaagcccccgaaggctggcagacccccaagatctacctgcggggcaaatgagtctggcgccgcccttcccgcccgttgctgctgtgatccgtagtaataaattctcagaggactcagcc

SEQ ID NO: 306720 - DNA, 4175 bp, Homo sapiens
  misc_feature (3393)..(3397): n is a, c, g, or t
gggagtcggcggcacaaaatggcggcggcggcggcggcggctggtgctgcagggtcggcagctcccgcggcagcggccggcgccccgggatctgggggcgcaccctcagggtcgcagggggtgctgatcggggacaggctgtactccggggtgctcatcaccttggagaactgcctcctgcctgacgacaagctccgtttcacgccgtccatgtcgagcggcctcgacaccgacacagagaccgacctccgcgtggtgggctgcgagctcatccaggcggccggtatcctgctccgcctgccgcaggtggccatggctaccgggcaggtgttgttccagcggttcttttataccaagtccttcgtgaagcactccatggaggtaaggcttcctcctgcacttcattcccagcgaagtatgttgagggtaaaacggtttgttactttgcccggttactaagggagtgagtacttgccccccagtctgagctctgtgccggagggttctgtttcttgactttttttttcccctgggtgcacctcccttttggtctgaatagccctcaagcctttggcggccgtcaggacgccgtggctggggacaaacatgggcgtgttgcaatgcttccgcttcagcatgtgtcaatggcctgtgtccacctggcttccaagatagaagaggccccaagacgcatacgggacgtcatcaatgtgtttcaccgccttcgacagctgagagacaaaaagaagcccgtgcctctactactggatcaagattatgttaatttaaagaaccaaattataaaggcggaaagacgagttctcaaagagttgggtttctgcgtccatgtgaagcatcctcataagataatcgttatgtaccttcaggtgttagagtgtgagcgtaaccaacacctggtccagacctcatggaattacatgaacgacagccttcgcaccgacgtcttcgtgcggttccagccagagagcatcgcctgtgcctgcatttatcttgctgcccggacgctggagatccctttgcccaatcgtccccattggtttcttttgtttggagcaactgaagaagaaattcaggaaatctgcttaaagatcttgcagctttatgctcggaaaaaggttgatctcacacacctggagggtgaagtggaaaaaagaaagcacgctatcgaagaggcaaaggcccaagcccggggcctgttgcctgggggcacacaggtgctggatggtacctcggggttctctcctgcccccaagctggtggaatcccccaaagaaggtaaagggagcaagccttccccactgtctgtgaagaacaccaagaggaggctggagggcgccaagaaagccaaggcggacagccccgtgaacggcttgccaaaggggcgagagagtcggagtcggagccggagccgtgagcagagctactcgaggtccccatcccgatcagcgtctcctaagaggaggaaaagtgacagcggctccacatctggtgggtccaagtcgcagagccgctcccggagcaggagtgactccccaccgagacaggccccccgcagcgctccctacaaaggctctgagattcggggctcccggaagtccaaggactgcaagtacccccagaagccacacaagtctcggagccggagttcttcccgttctcgaagcaggtcacgggagcgggcggataatccgggaaaatacaagaagaaaagtcattactacagagatcagcgacgagagcgctcgaggtcgtatgaacgcacaggccgtcgctatgagcgggaccaccctgggcacagcaggcatcggaggtgaggcggggttgcagtgactggtggccgcaagcccttccctggggagtacctgatggctgccctttgacccccggtggctgccctttgacccccgggtgtgctctcagcgcaagtggtcctagaacaggattctttttggaaatgtctgtcgactggaccttggtggatttggaaatggaactgagggaccggtgacacgtgcttcagaccggtctggggtgcggcgcacacctgggcccgtgcagggctcagctcggcagcagctctgagggcagctcaatgaaaaagtgaatgcacacgcccttgttggcgtggcctggcatggcctggtgctatcggcagccgctctccactccccgactgatactcaattacgtgaagccaagaaagatgatttttagaacctttgcctatattaggttgtacttatgtacatattttgcagtgtttcacaggagaaagtggccttaactgccccttattctctctccacgttgtaaataaacatgtgtttaatacaagttaaagctatgtatgaaaactcagaacttgaatcccgtcagcttaaaacttgtgtagggaatcctgacttttaaaatgtgagggtatttggatctgtgttgaaagtcgtatatttttatctgtgcggtgctgagtgcaggccaccagctcctaaatagaggttccctatatgcgcgtatgacatggtgaataaacacaactctctccactcaggacatccggagcgttatggacgtggtaggtggtcgttctgtgtgcttgtgaaagtgtccaggcgtgtgcacagccagtgcgcccacttccgggctccttgctccctgctgtactgaagttttggattttgcatccaatcctgtgtgcctgcccttctgccgaaggcttgtgaggggcctgagtcctctgcccatcaggatgacaggctccttcctgcagggccataggagggaagttttggaaacacagaatgattccaaggtgctctcgttcctgagggggactggtttgtaacccatgacatctgtgggcgagagaggcagctgggagcaggacacttggagggtcaccccacgggggtggcacctgcactctgagtgccccccactgtcatcagctgcctcttaccgtggacacagttttggttttggggactagggggccccactcctggtggtaccgtttggacttactagggcagtgggacatataggccggggctagtgggataacggggagttacgcctgatgacttttttgatggaatcctgcattagatagctggtgggacccccccctcagaattggggaactgaggagactccagggagggtgtccttccagggagagcagctatgaggggccccctagcttcctgtgcctggaagtaagagaaccagtaaagggccatacacacctgtacccaagagaccgctctccatttgctttctttttttactaaataattgtaaaatattattatgacataaagaaccatttaaggccaaaaaaaaaaaaaaaaaaaaaaaaaaaaaaaaaaaaannnnntcgaggtcgggcttgggaagggtcagcgggaggcctgagggcgccgggcgctgcggcaggcgggcccggggtccagccgagagggtccgggcgccaggcaacgcgattcgcgcgggggtgaacccggggagggggccggcctccccgttctgggacctttcggcggccgcccgccttggcccgtctctggagtgctgggcagccgggtctgcgggcccctttacagcacatcgccggccggcccaggtagggcggcctctctccctcgcaagggggcccagctggagctggaggagatgctggtccccaggaagatgtccgtcagccccctggagagctggctcacggcccgctgcttcctgcccagactggataccgggaccgcagggactgtggctccaccgcaatcctaccagtgtccgcccagccagataggggaaggggccgagcagggggatgaaggcgtcgcggatgcgcctcaaattcagtgcaaaaacgtgctgaagatccgccggcggaagatgaaccaccacaagtaccggaagctggtgaagaagacgcggttcctgcggaggaaggtccaggagggacgcctgagacgcaagcagatcaagttcgagaaagacctgaggcgcatctggctgaaggcggggctaaaggaagcccccgaaggctggcagacccccaagatctacctgcggggcaaatgagtctggcgccgcccttcccgcccgttgctgctgtgatccgtagtaataaattctcagaggactcagcc

SEQ ID NO: 306721 - DNA, 4285 bp, Homo sapiens
  misc_feature (3393)..(3397): n is a, c, g, or t
gggagtcggcggcacaaaatggcggcggcggcggcggcggctggtgctgcagggtcggcagctcccgcggcagcggccggcgccccgggatctgggggcgcaccctcagggtcgcagggggtgctgatcggggacaggctgtactccggggtgctcatcaccttggagaactgcctcctgcctgacgacaagctccgtttcacgccgtccatgtcgagcggcctcgacaccgacacagagaccgacctccgcgtggtgggctgcgagctcatccaggcggccggtatcctgctccgcctgccgcaggtggccatggctaccgggcaggtgttgttccagcggttcttttataccaagtccttcgtgaagcactccatggaggtaaggcttcctcctgcacttcattcccagcgaagtatgttgagggtaaaacggtttgttactttgcccggttactaagggagtgagtacttgccccccagtctgagctctgtgccggagggttctgtttcttgactttttttttcccctgggtgcacctcccttttggtctgaatagccctcaagcctttggcggccgtcaggacgccgtggctggggacaaacatgggcgtgttgcaatgcttccgcttcagcatgtgtcaatggcctgtgtccacctggcttccaagatagaagaggccccaagacgcatacgggacgtcatcaatgtgtttcaccgccttcgacagctgagagacaaaaagaagcccgtgcctctactactggatcaagattatgttaatttaaagaaccaaattataaaggcggaaagacgagttctcaaagagttgggtttctgcgtccatgtgaagcatcctcataagataatcgttatgtaccttcaggtgttagagtgtgagcgtaaccaacacctggtccagacctcatggaattacatgaacgacagccttcgcaccgacgtcttcgtgcggttccagccagagagcatcgcctgtgcctgcatttatcttgctgcccggacgctggagatccctttgcccaatcgtccccattggtttcttttgtttggagcaactgaagaagaaattcaggaaatctgcttaaagatcttgcagctttatgctcggaaaaaggttgatctcacacacctggagggtgaagtggaaaaaagaaagcacgctatcgaagaggcaaaggcccaagcccggggcctgttgcctgggggcacacaggtgctggatggtacctcggggttctctcctgcccccaagctggtggaatcccccaaagaaggtaaagggagcaagccttccccactgtctgtgaagaacaccaagaggaggctggagggcgccaagaaagccaaggcggacagccccgtgaacggcttgccaaaggggcgagagagtcggagtcggagccggagccgtgagcagagctactcgaggtccccatcccgatcagcgtctcctaagaggaggaaaagtgacagcggctccacatctggtgggtccaagtcgcagagccgctcccggagcaggagtgactccccaccgagacaggccccccgcagcgctccctacaaaggctctgagattcggggctcccggaagtccaaggactgcaagtacccccagaagccacacaagtctcggagccggagttcttcccgttctcgaagcaggtcacgggagcgggcggataatccgggaaaatacaagaagaaaagtcattactacagagatcagcgacgagagcgctcgaggtcgtatgaacgcacaggccgtcgctatgagcgggaccaccctgggcacagcaggcatcggaggtgaggcggggttgcagtgactggtggccgcaagcccttccctggggagtacctgatggctgccctttgacccccggtggctgccctttgacccccgggtgtgctctcagcgcaagtggtcctagaacaggattctttttggaaatgtctgtcgactggaccttggtggatttggaaatggaactgagggaccggtgacacgtgcttcagaccggtctggggtgcggcgcacacctgggcccgtgcagggctcagctcggcagcagctctgagggcagctcaatgaaaaagtgaatgcacacgcccttgttggcgtggcctggcatggcctggtgctatcggcagccgctctccactccccgactgatactcaattacgtgaagccaagaaagatgatttttagaacctttgcctatattaggttgtacttatgtacatattttgcagtgtttcacaggagaaagtggccttaactgccccttattctctctccacgttgtaaataaacatgtgtttaatacaagttaaagctatgtatgaaaactcagaacttgaatcccgtcagcttaaaacttgtgtagggaatcctgacttttaaaatgtgagggtatttggatctgtgttgaaagtcgtatatttttatctgtgcggtgctgagtgcaggccaccagctcctaaatagaggttccctatatgcgcgtatgacatggtgaataaacacaactctctccactcaggacatccggagcgttatggacgtggtaggtggtcgttctgtgtgcttgtgaaagtgtccaggcgtgtgcacagccagtgcgcccacttccgggctccttgctccctgctgtactgaagttttggattttgcatccaatcctgtgtgcctgcccttctgccgaaggcttgtgaggggcctgagtcctctgcccatcaggatgacaggctccttcctgcagggccataggagggaagttttggaaacacagaatgattccaaggtgctctcgttcctgagggggactggtttgtaacccatgacatctgtgggcgagagaggcagctgggagcaggacacttggagggtcaccccacgggggtggcacctgcactctgagtgccccccactgtcatcagctgcctcttaccgtggacacagttttggttttggggactagggggccccactcctggtggtaccgtttggacttactagggcagtgggacatataggccggggctagtgggataacggggagttacgcctgatgacttttttgatggaatcctgcattagatagctggtgggacccccccctcagaattggggaactgaggagactccagggagggtgtccttccagggagagcagctatgaggggccccctagcttcctgtgcctggaagtaagagaaccagtaaagggccatacacacctgtacccaagagaccgctctccatttgctttctttttttactaaataattgtaaaatattattatgacataaagaaccatttaaggccaaaaaaaaaaaaaaaaaaaaaaaaaaaaaaaaaaaaannnnntcgaggtcgggcttgggaagggtcagcgggaggcctgagggcgccgggcgctgcggcaggcgggcccggggtccagccgagagggtccgggcgccaggcaacgcgattcgcgcgggggtgaacccggggagggggccggcctccccgttctgggacctttcgctcccctgggacctgtggccgccgcccacagaccatgctcctggggcgcctgacttcccagctgttgagggccgttccttgggcaggcggccgcccgccttggcccgtctctggagtgctgggcagccgggtctgcgggcccctttacagcacatcgccggccggcccaggtagggcggcctctctccctcgcaagggggcccagctggagctggaggagatgctggtccccaggaagatgtccgtcagccccctggagagctggctcacggcccgctgcttcctgcccagactggataccgggaccgcagggactgtggctccaccgcaatcctaccagtgtccgcccagccagataggggaaggggccgagcagggggatgaaggcgtcgcggatgcgcctcaaattcagtgcaaaaacgtgctgaagatccgccggcggaagatgaaccaccacaagtaccggaagctggtgaagaagacgcggttcctgcggaggaaggtccaggagggacgcctgagacgcaagcagatcaagttcgagaaagacctgaggcgcatctggctgaaggcggggctaaaggaagcccccgaaggctggcagacccccaagatctacctgcggggcaaatgagtctggcgccgcccttcccgcccgttgctgctgtgatccgtagtaataaattctcagaggactcagccataaaaaaaaactcagggctctag

SEQ ID NO: 306722 - DNA, 4445 bp, Homo sapiens
  misc_feature (3393)..(3397): n is a, c, g, or t
gggagtcggcggcacaaaatggcggcggcggcggcggcggctggtgctgcagggtcggcagctcccgcggcagcggccggcgccccgggatctgggggcgcaccctcagggtcgcagggggtgctgatcggggacaggctgtactccggggtgctcatcaccttggagaactgcctcctgcctgacgacaagctccgtttcacgccgtccatgtcgagcggcctcgacaccgacacagagaccgacctccgcgtggtgggctgcgagctcatccaggcggccggtatcctgctccgcctgccgcaggtggccatggctaccgggcaggtgttgttccagcggttcttttataccaagtccttcgtgaagcactccatggaggtaaggcttcctcctgcacttcattcccagcgaagtatgttgagggtaaaacggtttgttactttgcccggttactaagggagtgagtacttgccccccagtctgagctctgtgccggagggttctgtttcttgactttttttttcccctgggtgcacctcccttttggtctgaatagccctcaagcctttggcggccgtcaggacgccgtggctggggacaaacatgggcgtgttgcaatgcttccgcttcagcatgtgtcaatggcctgtgtccacctggcttccaagatagaagaggccccaagacgcatacgggacgtcatcaatgtgtttcaccgccttcgacagctgagagacaaaaagaagcccgtgcctctactactggatcaagattatgttaatttaaagaaccaaattataaaggcggaaagacgagttctcaaagagttgggtttctgcgtccatgtgaagcatcctcataagataatcgttatgtaccttcaggtgttagagtgtgagcgtaaccaacacctggtccagacctcatggaattacatgaacgacagccttcgcaccgacgtcttcgtgcggttccagccagagagcatcgcctgtgcctgcatttatcttgctgcccggacgctggagatccctttgcccaatcgtccccattggtttcttttgtttggagcaactgaagaagaaattcaggaaatctgcttaaagatcttgcagctttatgctcggaaaaaggttgatctcacacacctggagggtgaagtggaaaaaagaaagcacgctatcgaagaggcaaaggcccaagcccggggcctgttgcctgggggcacacaggtgctggatggtacctcggggttctctcctgcccccaagctggtggaatcccccaaagaaggtaaagggagcaagccttccccactgtctgtgaagaacaccaagaggaggctggagggcgccaagaaagccaaggcggacagccccgtgaacggcttgccaaaggggcgagagagtcggagtcggagccggagccgtgagcagagctactcgaggtccccatcccgatcagcgtctcctaagaggaggaaaagtgacagcggctccacatctggtgggtccaagtcgcagagccgctcccggagcaggagtgactccccaccgagacaggccccccgcagcgctccctacaaaggctctgagattcggggctcccggaagtccaaggactgcaagtacccccagaagccacacaagtctcggagccggagttcttcccgttctcgaagcaggtcacgggagcgggcggataatccgggaaaatacaagaagaaaagtcattactacagagatcagcgacgagagcgctcgaggtcgtatgaacgcacaggccgtcgctatgagcgggaccaccctgggcacagcaggcatcggaggtgaggcggggttgcagtgactggtggccgcaagcccttccctggggagtacctgatggctgccctttgacccccggtggctgccctttgacccccgggtgtgctctcagcgcaagtggtcctagaacaggattctttttggaaatgtctgtcgactggaccttggtggatttggaaatggaactgagggaccggtgacacgtgcttcagaccggtctggggtgcggcgcacacctgggcccgtgcagggctcagctcggcagcagctctgagggcagctcaatgaaaaagtgaatgcacacgcccttgttggcgtggcctggcatggcctggtgctatcggcagccgctctccactccccgactgatactcaattacgtgaagccaagaaagatgatttttagaacctttgcctatattaggttgtacttatgtacatattttgcagtgtttcacaggagaaagtggccttaactgccccttattctctctccacgttgtaaataaacatgtgtttaatacaagttaaagctatgtatgaaaactcagaacttgaatcccgtcagcttaaaacttgtgtagggaatcctgacttttaaaatgtgagggtatttggatctgtgttgaaagtcgtatatttttatctgtgcggtgctgagtgcaggccaccagctcctaaatagaggttccctatatgcgcgtatgacatggtgaataaacacaactctctccactcaggacatccggagcgttatggacgtggtaggtggtcgttctgtgtgcttgtgaaagtgtccaggcgtgtgcacagccagtgcgcccacttccgggctccttgctccctgctgtactgaagttttggattttgcatccaatcctgtgtgcctgcccttctgccgaaggcttgtgaggggcctgagtcctctgcccatcaggatgacaggctccttcctgcagggccataggagggaagttttggaaacacagaatgattccaaggtgctctcgttcctgagggggactggtttgtaacccatgacatctgtgggcgagagaggcagctgggagcaggacacttggagggtcaccccacgggggtggcacctgcactctgagtgccccccactgtcatcagctgcctcttaccgtggacacagttttggttttggggactagggggccccactcctggtggtaccgtttggacttactagggcagtgggacatataggccggggctagtgggataacggggagttacgcctgatgacttttttgatggaatcctgcattagatagctggtgggacccccccctcagaattggggaactgaggagactccagggagggtgtccttccagggagagcagctatgaggggccccctagcttcctgtgcctggaagtaagagaaccagtaaagggccatacacacctgtacccaagagaccgctctccatttgctttctttttttactaaataattgtaaaatattattatgacataaagaaccatttaaggccaaaaaaaaaaaaaaaaaaaaaaaaaaaaaaaaaaaaannnnntcgaggtcgggcttgggaagggtcagcgggaggcctgagggcgccgggcgctgcggcaggcgggcccggggtccagccgagagggtccgggcgccaggcaacgcgattcgcgcgggggtgaacccggggagggggccggcctccccgttctgggacctttcgctcccctgggacctgtggccgccgcccacagaccatgctcctggggcgcctgacttcccagctgttgagggccgttccttgggcaggcggccgcccgccttggcccgtctctggagtgctgggcagccgggtctgcgggcccctttacagcacatcgccggccggcccaggtagggcggcctctctccctcgcaagggggcccagctggagctggaggagatgctggtccccaggaagatgtccgtcagccccctggagagctggctcacggcccgctgcttcctgcccagactggataccgggaccgcagggactgtggctccaccgcaatcctaccagtgtccgcccagccagataggggaaggggccgagcagggggatgaaggcgtcgcggatgcgcctcaaattcagtgcaaaaacgtgctgaagatccgccggcggaagatgaaccaccacaagtaccggaagctggtgaagaagacgcggttcctgcggaggaaggtccaggagggacgcctgagacgcaagcagatcaagttcgagaaagacctgaggcgcatctggctgaaggcggggctaaaggaagcccccgaaggctggcagacccccaagatctacctgcggggcaaatgagtctggcgccgcccttcccgcccgttgctgctgtgatccgtagtaataaattctcagaggactcagccaaaaaaaaaaaaaaaaaaaaaaaaaaaaaaaaaaaaaaaaaagccgggggatttatattgttgggggggggaaaagagagaggttaagtgaaaggggccaagtgggccaaagggtgtgttccctgtgaccccaagtttttctgtgtgttccaaagagggggaaaattttgccgggttcccctta

SEQ ID NO: 306723 - DNA, 4570 bp, Homo sapiens
  misc_feature (3393)..(3397): n is a, c, g, or t
gggagtcggcggcacaaaatggcggcggcggcggcggcggctggtgctgcagggtcggcagctcccgcggcagcggccggcgccccgggatctgggggcgcaccctcagggtcgcagggggtgctgatcggggacaggctgtactccggggtgctcatcaccttggagaactgcctcctgcctgacgacaagctccgtttcacgccgtccatgtcgagcggcctcgacaccgacacagagaccgacctccgcgtggtgggctgcgagctcatccaggcggccggtatcctgctccgcctgccgcaggtggccatggctaccgggcaggtgttgttccagcggttcttttataccaagtccttcgtgaagcactccatggaggtaaggcttcctcctgcacttcattcccagcgaagtatgttgagggtaaaacggtttgttactttgcccggttactaagggagtgagtacttgccccccagtctgagctctgtgccggagggttctgtttcttgactttttttttcccctgggtgcacctcccttttggtctgaatagccctcaagcctttggcggccgtcaggacgccgtggctggggacaaacatgggcgtgttgcaatgcttccgcttcagcatgtgtcaatggcctgtgtccacctggcttccaagatagaagaggccccaagacgcatacgggacgtcatcaatgtgtttcaccgccttcgacagctgagagacaaaaagaagcccgtgcctctactactggatcaagattatgttaatttaaagaaccaaattataaaggcggaaagacgagttctcaaagagttgggtttctgcgtccatgtgaagcatcctcataagataatcgttatgtaccttcaggtgttagagtgtgagcgtaaccaacacctggtccagacctcatggaattacatgaacgacagccttcgcaccgacgtcttcgtgcggttccagccagagagcatcgcctgtgcctgcatttatcttgctgcccggacgctggagatccctttgcccaatcgtccccattggtttcttttgtttggagcaactgaagaagaaattcaggaaatctgcttaaagatcttgcagctttatgctcggaaaaaggttgatctcacacacctggagggtgaagtggaaaaaagaaagcacgctatcgaagaggcaaaggcccaagcccggggcctgttgcctgggggcacacaggtgctggatggtacctcggggttctctcctgcccccaagctggtggaatcccccaaagaaggtaaagggagcaagccttccccactgtctgtgaagaacaccaagaggaggctggagggcgccaagaaagccaaggcggacagccccgtgaacggcttgccaaaggggcgagagagtcggagtcggagccggagccgtgagcagagctactcgaggtccccatcccgatcagcgtctcctaagaggaggaaaagtgacagcggctccacatctggtgggtccaagtcgcagagccgctcccggagcaggagtgactccccaccgagacaggccccccgcagcgctccctacaaaggctctgagattcggggctcccggaagtccaaggactgcaagtacccccagaagccacacaagtctcggagccggagttcttcccgttctcgaagcaggtcacgggagcgggcggataatccgggaaaatacaagaagaaaagtcattactacagagatcagcgacgagagcgctcgaggtcgtatgaacgcacaggccgtcgctatgagcgggaccaccctgggcacagcaggcatcggaggtgaggcggggttgcagtgactggtggccgcaagcccttccctggggagtacctgatggctgccctttgacccccggtggctgccctttgacccccgggtgtgctctcagcgcaagtggtcctagaacaggattctttttggaaatgtctgtcgactggaccttggtggatttggaaatggaactgagggaccggtgacacgtgcttcagaccggtctggggtgcggcgcacacctgggcccgtgcagggctcagctcggcagcagctctgagggcagctcaatgaaaaagtgaatgcacacgcccttgttggcgtggcctggcatggcctggtgctatcggcagccgctctccactccccgactgatactcaattacgtgaagccaagaaagatgatttttagaacctttgcctatattaggttgtacttatgtacatattttgcagtgtttcacaggagaaagtggccttaactgccccttattctctctccacgttgtaaataaacatgtgtttaatacaagttaaagctatgtatgaaaactcagaacttgaatcccgtcagcttaaaacttgtgtagggaatcctgacttttaaaatgtgagggtatttggatctgtgttgaaagtcgtatatttttatctgtgcggtgctgagtgcaggccaccagctcctaaatagaggttccctatatgcgcgtatgacatggtgaataaacacaactctctccactcaggacatccggagcgttatggacgtggtaggtggtcgttctgtgtgcttgtgaaagtgtccaggcgtgtgcacagccagtgcgcccacttccgggctccttgctccctgctgtactgaagttttggattttgcatccaatcctgtgtgcctgcccttctgccgaaggcttgtgaggggcctgagtcctctgcccatcaggatgacaggctccttcctgcagggccataggagggaagttttggaaacacagaatgattccaaggtgctctcgttcctgagggggactggtttgtaacccatgacatctgtgggcgagagaggcagctgggagcaggacacttggagggtcaccccacgggggtggcacctgcactctgagtgccccccactgtcatcagctgcctcttaccgtggacacagttttggttttggggactagggggccccactcctggtggtaccgtttggacttactagggcagtgggacatataggccggggctagtgggataacggggagttacgcctgatgacttttttgatggaatcctgcattagatagctggtgggacccccccctcagaattggggaactgaggagactccagggagggtgtccttccagggagagcagctatgaggggccccctagcttcctgtgcctggaagtaagagaaccagtaaagggccatacacacctgtacccaagagaccgctctccatttgctttctttttttactaaataattgtaaaatattattatgacataaagaaccatttaaggccaaaaaaaaaaaaaaaaaaaaaaaaaaaaaaaaaaaaannnnntcgaggtcgggcttgggaagggtcagcgggaggcctgagggcgccgggcgctgcggcaggcgggcccggggtccagccgagagggtccgggcgccaggcaacgcgattcgcgcgggggtgaacccggggagggggccggcctccccgttctgggacctttcgctcccctgggacctgtggccgccgcccacagaccatgctcctggggcgcctgacttcccagctgttgagggccgttccttgggcaggcggccgcccgccttggcccgtctctggagtgctgggcagccgggtctgcgggcccctttacagcacatcgccggccggcccaggtagggcggcctctctccctcgcaagggggcccagctggagctggaggagatgctggtccccaggaagatgtccgtcagccccctggagagctggctcacggcccgctgcttcctgcccagactggataccgggaccgcagggactgtggctccaccgcaatcctaccagtgtccgcccagccagataggggaaggggccgagcagggggatgaaggcgtcgcggatgcgcctcaaattcagtgcaaaaacgtgctgaagatccgccggcggaagatgaaccaccacaagtaccggaagctggtgaagaagacgcggttcctgcggaggaaggtccaggagggacgcctgagacgcaagcagatcaagttcgagaaagacctgaggcgcatctggctgaaggcggggctaaaggaagcccccgaaggctggcagacccccaagatctacctgcggggcaaatgagtctggcgccgcccttcccgcccgttgctgctgtgatccgtagtaataaattctcagaggactcagccttaaaaaaaaaaaaaaaaaaaacacgctcgggcgacatatatgcggggggcgagaaagaaagtccatgcacgggcccggggtcaactggagggtcctggacccaggttccttgggcacacggggaaactggccggctcccatacgggggcgaataattcgatagccggttacctggttgcctcgcggcgcaagacataatacaacaagcaagcaactcgagccaaacagacgacaacacggcaacgtaaccctcaccaccctcgcacagaccctccagcacgaccgacaaactcacagacacgcagcga

SEQ ID NO: 306724 - DNA, 4939 bp, Homo sapiens
  misc_feature (3393)..(3397): n is a, c, g, or t
gggagtcggcggcacaaaatggcggcggcggcggcggcggctggtgctgcagggtcggcagctcccgcggcagcggccggcgccccgggatctgggggcgcaccctcagggtcgcagggggtgctgatcggggacaggctgtactccggggtgctcatcaccttggagaactgcctcctgcctgacgacaagctccgtttcacgccgtccatgtcgagcggcctcgacaccgacacagagaccgacctccgcgtggtgggctgcgagctcatccaggcggccggtatcctgctccgcctgccgcaggtggccatggctaccgggcaggtgttgttccagcggttcttttataccaagtccttcgtgaagcactccatggaggtaaggcttcctcctgcacttcattcccagcgaagtatgttgagggtaaaacggtttgttactttgcccggttactaagggagtgagtacttgccccccagtctgagctctgtgccggagggttctgtttcttgactttttttttcccctgggtgcacctcccttttggtctgaatagccctcaagcctttggcggccgtcaggacgccgtggctggggacaaacatgggcgtgttgcaatgcttccgcttcagcatgtgtcaatggcctgtgtccacctggcttccaagatagaagaggccccaagacgcatacgggacgtcatcaatgtgtttcaccgccttcgacagctgagagacaaaaagaagcccgtgcctctactactggatcaagattatgttaatttaaagaaccaaattataaaggcggaaagacgagttctcaaagagttgggtttctgcgtccatgtgaagcatcctcataagataatcgttatgtaccttcaggtgttagagtgtgagcgtaaccaacacctggtccagacctcatggaattacatgaacgacagccttcgcaccgacgtcttcgtgcggttccagccagagagcatcgcctgtgcctgcatttatcttgctgcccggacgctggagatccctttgcccaatcgtccccattggtttcttttgtttggagcaactgaagaagaaattcaggaaatctgcttaaagatcttgcagctttatgctcggaaaaaggttgatctcacacacctggagggtgaagtggaaaaaagaaagcacgctatcgaagaggcaaaggcccaagcccggggcctgttgcctgggggcacacaggtgctggatggtacctcggggttctctcctgcccccaagctggtggaatcccccaaagaaggtaaagggagcaagccttccccactgtctgtgaagaacaccaagaggaggctggagggcgccaagaaagccaaggcggacagccccgtgaacggcttgccaaaggggcgagagagtcggagtcggagccggagccgtgagcagagctactcgaggtccccatcccgatcagcgtctcctaagaggaggaaaagtgacagcggctccacatctggtgggtccaagtcgcagagccgctcccggagcaggagtgactccccaccgagacaggccccccgcagcgctccctacaaaggctctgagattcggggctcccggaagtccaaggactgcaagtacccccagaagccacacaagtctcggagccggagttcttcccgttctcgaagcaggtcacgggagcgggcggataatccgggaaaatacaagaagaaaagtcattactacagagatcagcgacgagagcgctcgaggtcgtatgaacgcacaggccgtcgctatgagcgggaccaccctgggcacagcaggcatcggaggtgaggcggggttgcagtgactggtggccgcaagcccttccctggggagtacctgatggctgccctttgacccccggtggctgccctttgacccccgggtgtgctctcagcgcaagtggtcctagaacaggattctttttggaaatgtctgtcgactggaccttggtggatttggaaatggaactgagggaccggtgacacgtgcttcagaccggtctggggtgcggcgcacacctgggcccgtgcagggctcagctcggcagcagctctgagggcagctcaatgaaaaagtgaatgcacacgcccttgttggcgtggcctggcatggcctggtgctatcggcagccgctctccactccccgactgatactcaattacgtgaagccaagaaagatgatttttagaacctttgcctatattaggttgtacttatgtacatattttgcagtgtttcacaggagaaagtggccttaactgccccttattctctctccacgttgtaaataaacatgtgtttaatacaagttaaagctatgtatgaaaactcagaacttgaatcccgtcagcttaaaacttgtgtagggaatcctgacttttaaaatgtgagggtatttggatctgtgttgaaagtcgtatatttttatctgtgcggtgctgagtgcaggccaccagctcctaaatagaggttccctatatgcgcgtatgacatggtgaataaacacaactctctccactcaggacatccggagcgttatggacgtggtaggtggtcgttctgtgtgcttgtgaaagtgtccaggcgtgtgcacagccagtgcgcccacttccgggctccttgctccctgctgtactgaagttttggattttgcatccaatcctgtgtgcctgcccttctgccgaaggcttgtgaggggcctgagtcctctgcccatcaggatgacaggctccttcctgcagggccataggagggaagttttggaaacacagaatgattccaaggtgctctcgttcctgagggggactggtttgtaacccatgacatctgtgggcgagagaggcagctgggagcaggacacttggagggtcaccccacgggggtggcacctgcactctgagtgccccccactgtcatcagctgcctcttaccgtggacacagttttggttttggggactagggggccccactcctggtggtaccgtttggacttactagggcagtgggacatataggccggggctagtgggataacggggagttacgcctgatgacttttttgatggaatcctgcattagatagctggtgggacccccccctcagaattggggaactgaggagactccagggagggtgtccttccagggagagcagctatgaggggccccctagcttcctgtgcctggaagtaagagaaccagtaaagggccatacacacctgtacccaagagaccgctctccatttgctttctttttttactaaataattgtaaaatattattatgacataaagaaccatttaaggccaaaaaaaaaaaaaaaaaaaaaaaaaaaaaaaaaaaaannnnntcgaggtcgggcttgggaagggtcagcgggaggcctgagggcgccgggcgctgcggcaggcgggcccggggtccagccgagagggtccgggcgccaggcaacgcgattcgcgcgggggtgaacccggggagggggccggcctccccgttctgggacctttcgctcccctgggacctgtggccgccgcccacagaccatgctcctggggcgcctgacttcccagctgttgagggccgttccttgggcaggcggccgcccgccttggcccgtctctggagtgctgggcagccgggtctgcgggcccctttacagcacatcgccggccggcccaggtagggcggcctctctccctcgcaagggggcccagctggagctggaggagatgctggtccccaggaagatgtccgtcagccccctggagagctggctcacggcccgctgcttcctgcccagactggataccgggaccgcagggactgtggctccaccgcaatcctaccagtgtccgcccagccagataggggaaggggccgagcagggggatgaaggcgtcgcggatgcgcctcaaattcagtgcaaaaacgtgctgaagatccgccggcggaagatgaaccaccacaagtaccggaagctggtgaagaagacgcggttcctgcggaggaaggtccaggagggacgcctgagacgcaagcagatcaagttcgagaaagacctgaggcgcatctggctgaaggcggggctaaaggaagcccccgaaggctggcagacccccaagatctacctgcggggcaaatgagtctggcgccgcccttcccgcccgttgctgctgtgatccgtagtaataaattctcagaggactcagcccctttcctgcgggtctggagctccaaaaaaaaaaaaaaaaaaaaaaaaaaaaaaaaaaaaaaaaaactcccgagagggcatcatagtggacgcgggggcgcggagaaaaagcgggtgatgagaaatgggcgtcctgtgggcacaaagcggtgtgttcctgtggacccaaacggtttctttgggaccacaggggggaaaaatcccgcgcgcggcgtcccccataagaggagagggaggttaaaaatttttgcgagaaaagcgcgcggtggtgaaccccgtggtgtttaatgaatttttgggtagaaaatagtgtagaaaagagaaaaagaaagaagaggaaggaggaaggatgaaggaaagaggaggatgaaaagaagtttataagaaagaaaaaagcaagggggggcagaaagagaaaaccgagatgtaacacacagagggacgaaagacgatacgaagacaacaagatagcgaacacaaacaaaagagaaaaggaaaggacgcagaagagagaaagaaaagaaaaaatttacaccaaaaagtaggcaaagggagaaggaaagagagagacgggaggagagagggaagcagtaggagcagagacaggaagcaagagggacagacagcacgacaggaaaagggcgaagcgcagacgaaaagagtgagaagaggagggaa

SEQ ID NO: 306725 - DNA, 4470 bp, Homo sapiens
  misc_feature (3393)..(3397): n is a, c, g, or t
gggagtcggcggcacaaaatggcggcggcggcggcggcggctggtgctgcagggtcggcagctcccgcggcagcggccggcgccccgggatctgggggcgcaccctcagggtcgcagggggtgctgatcggggacaggctgtactccggggtgctcatcaccttggagaactgcctcctgcctgacgacaagctccgtttcacgccgtccatgtcgagcggcctcgacaccgacacagagaccgacctccgcgtggtgggctgcgagctcatccaggcggccggtatcctgctccgcctgccgcaggtggccatggctaccgggcaggtgttgttccagcggttcttttataccaagtccttcgtgaagcactccatggaggtaaggcttcctcctgcacttcattcccagcgaagtatgttgagggtaaaacggtttgttactttgcccggttactaagggagtgagtacttgccccccagtctgagctctgtgccggagggttctgtttcttgactttttttttcccctgggtgcacctcccttttggtctgaatagccctcaagcctttggcggccgtcaggacgccgtggctggggacaaacatgggcgtgttgcaatgcttccgcttcagcatgtgtcaatggcctgtgtccacctggcttccaagatagaagaggccccaagacgcatacgggacgtcatcaatgtgtttcaccgccttcgacagctgagagacaaaaagaagcccgtgcctctactactggatcaagattatgttaatttaaagaaccaaattataaaggcggaaagacgagttctcaaagagttgggtttctgcgtccatgtgaagcatcctcataagataatcgttatgtaccttcaggtgttagagtgtgagcgtaaccaacacctggtccagacctcatggaattacatgaacgacagccttcgcaccgacgtcttcgtgcggttccagccagagagcatcgcctgtgcctgcatttatcttgctgcccggacgctggagatccctttgcccaatcgtccccattggtttcttttgtttggagcaactgaagaagaaattcaggaaatctgcttaaagatcttgcagctttatgctcggaaaaaggttgatctcacacacctggagggtgaagtggaaaaaagaaagcacgctatcgaagaggcaaaggcccaagcccggggcctgttgcctgggggcacacaggtgctggatggtacctcggggttctctcctgcccccaagctggtggaatcccccaaagaaggtaaagggagcaagccttccccactgtctgtgaagaacaccaagaggaggctggagggcgccaagaaagccaaggcggacagccccgtgaacggcttgccaaaggggcgagagagtcggagtcggagccggagccgtgagcagagctactcgaggtccccatcccgatcagcgtctcctaagaggaggaaaagtgacagcggctccacatctggtgggtccaagtcgcagagccgctcccggagcaggagtgactccccaccgagacaggccccccgcagcgctccctacaaaggctctgagattcggggctcccggaagtccaaggactgcaagtacccccagaagccacacaagtctcggagccggagttcttcccgttctcgaagcaggtcacgggagcgggcggataatccgggaaaatacaagaagaaaagtcattactacagagatcagcgacgagagcgctcgaggtcgtatgaacgcacaggccgtcgctatgagcgggaccaccctgggcacagcaggcatcggaggtgaggcggggttgcagtgactggtggccgcaagcccttccctggggagtacctgatggctgccctttgacccccggtggctgccctttgacccccgggtgtgctctcagcgcaagtggtcctagaacaggattctttttggaaatgtctgtcgactggaccttggtggatttggaaatggaactgagggaccggtgacacgtgcttcagaccggtctggggtgcggcgcacacctgggcccgtgcagggctcagctcggcagcagctctgagggcagctcaatgaaaaagtgaatgcacacgcccttgttggcgtggcctggcatggcctggtgctatcggcagccgctctccactccccgactgatactcaattacgtgaagccaagaaagatgatttttagaacctttgcctatattaggttgtacttatgtacatattttgcagtgtttcacaggagaaagtggccttaactgccccttattctctctccacgttgtaaataaacatgtgtttaatacaagttaaagctatgtatgaaaactcagaacttgaatcccgtcagcttaaaacttgtgtagggaatcctgacttttaaaatgtgagggtatttggatctgtgttgaaagtcgtatatttttatctgtgcggtgctgagtgcaggccaccagctcctaaatagaggttccctatatgcgcgtatgacatggtgaataaacacaactctctccactcaggacatccggagcgttatggacgtggtaggtggtcgttctgtgtgcttgtgaaagtgtccaggcgtgtgcacagccagtgcgcccacttccgggctccttgctccctgctgtactgaagttttggattttgcatccaatcctgtgtgcctgcccttctgccgaaggcttgtgaggggcctgagtcctctgcccatcaggatgacaggctccttcctgcagggccataggagggaagttttggaaacacagaatgattccaaggtgctctcgttcctgagggggactggtttgtaacccatgacatctgtgggcgagagaggcagctgggagcaggacacttggagggtcaccccacgggggtggcacctgcactctgagtgccccccactgtcatcagctgcctcttaccgtggacacagttttggttttggggactagggggccccactcctggtggtaccgtttggacttactagggcagtgggacatataggccggggctagtgggataacggggagttacgcctgatgacttttttgatggaatcctgcattagatagctggtgggacccccccctcagaattggggaactgaggagactccagggagggtgtccttccagggagagcagctatgaggggccccctagcttcctgtgcctggaagtaagagaaccagtaaagggccatacacacctgtacccaagagaccgctctccatttgctttctttttttactaaataattgtaaaatattattatgacataaagaaccatttaaggccaaaaaaaaaaaaaaaaaaaaaaaaaaaaaaaaaaaaannnnntcgaggtcgggcttgggaagggtcagcgggaggcctgagggcgccgggcgctgcggcaggcgggcccggggtccagccgagagggtccgggcgccaggcaacgcgattcgcgcgggggtgaacccggggagggggccggcctccccgttctgggacctttcgctcccctgggacctgtggccgccgcccacagaccatgctcctggggcgcctgacttcccagctgttgagggccgttccttgggcaggcggccgcccgccttggcccgtctctggagtgctgggcagccgggtctgcgggcccctttacagcacatcgccggccggcccaggtagggcggcctctctccctcgcaagggggcccagctggagctggaggagatgctggtccccaggaagatgtccgtcagccccctggagagctggctcacggcccgctgcttcctgcccagactggataccgggaccgcagggactgtggctccaccgcaatcctaccagtgtccgcccagccagataggggaaggggccgagcagggggatgaaggcgtcgcggatgcgcctcaaattcagtgcaaaaacgtgctgaagatccgccggcggaagatgaaccaccacaagtaccggaagctggtgaagaagacgcggttcctgcggaggaaggtccaggagggacgcctgagacgcaagcagatcaagttcgagaaagacctgaggcgcatctggctgaaggcggggctaaaggaagcccccgaaggctggcagacccccaagatctacctgcggggcaaatgagtctggcgccgcccttcccgcccgttgctgctgtgatccgtagtaataaattctcagaggactcagcccctttcctgcgggtctggagctccaaaaaaaaaaaaaaaaaaaaaaaaaaaaaaaaaaaaaaaaaaagccgggggatttatattgttgggggggggaaaagagagaggttaagtgaaaggggccaagtgggccaaagggtgtgttccctgtgaccccaagtttttctgtgtgttccaaagagggggaaaattttgccgggttcccctta

SEQ ID NO: 306726 - DNA, 2533 bp, Homo sapiens
gggagtcggcggcacaaaatggcggcggcggcggcggcggctggtgctgcagggtcggcagctcccgcggcagcggccggcgccccgggatctgggggcgcaccctcagggtcgcagggggtgctgatcggggacaggctgtactccggggtgctcatcaccttggagaactgcctcctgcctgacgacaagctccgtttcacgccgtccatgtcgagcggcctcgacaccgacacagagaccgacctccgcgtggtgggctgcgagctcatccaggcggccggtatcctgctccgcctgccgcaggtggccatggctaccgggcaggtgttgttccagcggttcttttataccaagtccttcgtgaagcactccatggaggtaaggcttcctcctgcacttcattcccagcgaagtatgttgagggtaaaacggtttgttactttgcccggttactaagggagtgagtacttgccccccagtctgagctctgtgccggagggttctgtttcttgactttttttttcccctgggtgcacctcccttttggtctgaatagccctcaagcctttggcggccgtcaggacgccgtggctggggacaaacatgggcgtgttgcaatgcttccgcttcagcatgtgtcaatggcctgtgtccacctggcttccaagatagaagaggccccaagacgcatacgggacgtcatcaatgtgtttcaccgccttcgacagctgagagacaaaaagaagcccgtgcctctactactggatcaagattatgttaatttaaagaaccaaattataaaggcggaaagacgagttctcaaagagttgggtttctgcgtccatgtgaagcatcctcataagataatcgttatgtaccttcaggtgttagagtgtgagcgtaaccaacacctggtccagacctcatggaattacatgaacgacagccttcgcaccgacgtcttcgtgcggttccagccagagagcatcgcctgtgcctgcatttatcttgctgcccggacgctggagatccctttgcccaatcgtccccattggtttcttttgtttggagcaactgaagaagaaattcaggaaatctgcttaaagatcttgcagctttatgctcggaaaaaggttgatctcacacacctggagggtgaagtggaaaaaagaaagcacgctatcgaagaggcaaaggcccaagcccggggcctgttgcctgggggcacacaggtgctggatggtacctcggggttctctcctgcccccaagctggtggaatcccccaaagaaggtaaagggagcaagccttccccactgtctgtgaagaacaccaagaggaggctggagggcgccaagaaagccaaggcggacagccccgtgaacggcttgccaaaggggcgagagagtcggagtcggagccggagccgtgagcagagctactcgaggtccccatcccgatcagcgtctcctaagaggaggaaaagtgacagcggctccacatctggtgggtccaagtcgcagagccgctcccggagcaggagtgactccccaccgagacaggccccccgcagcgctccctacaaaggctctgagattcggggctcccggaagtccaaggactgcaagtacccccagaagccacacaagtctcggagccggagttcttcccgttctcgaagcaggtcacgggagcgggcggataatccgggaaaatacaagaagaaaagtcattactacagagatcagcgacgagagcgctcgaggtcgtatgaacgcacaggccgtcgctatgagcgggaccaccctgggcacagcaggcatcggagctcccctgggacctgtggccgccgcccacagaccatgctcctggggcgcctgacttcccagctgttgagggccgttccttgggcaggcggccgcccgccttggcccgtctctggagtgctgggcagccgggtctgcgggcccctttacagcacatcgccggccggcccaggtagggcggcctctctccctcgcaagggggcccagctggagctggaggagatgctggtccccaggaagatgtccgtcagccccctggagagctggctcacggcccgctgcttcctgcccagactggataccgggaccgcagggactgtggctccaccgcaatcctaccagtgtccgcccagccagataggggaaggggccgagcagggggatgaaggcgtcgcggatgcgcctcaaattcagtgcaaaaacgtgctgaagatccgccggcggaagatgaaccaccacaagtaccggaagctggtgaagaagacgcggttcctgcggaggaaggtccaggagggacgcctgagacgcaagcagatcaagttcgagaaagacctgaggcgcatctggctgaaggcggggctaaaggaagcccccgaaggctggcagacccccaagatctacctgcggggcaaatgagtctggcgccgcccttcccgcccgttgctgctgtgatccgtagtaataaattctcagaggactcagcc

SEQ ID NO: 306727 - DNA, 2557 bp, Homo sapiens
gggagtcggcggcacaaaatggcggcggcggcggcggcggctggtgctgcagggtcggcagctcccgcggcagcggccggcgccccgggatctgggggcgcaccctcagggtcgcagggggtgctgatcggggacaggctgtactccggggtgctcatcaccttggagaactgcctcctgcctgacgacaagctccgtttcacgccgtccatgtcgagcggcctcgacaccgacacagagaccgacctccgcgtggtgggctgcgagctcatccaggcggccggtatcctgctccgcctgccgcaggtggccatggctaccgggcaggtgttgttccagcggttcttttataccaagtccttcgtgaagcactccatggaggtaaggcttcctcctgcacttcattcccagcgaagtatgttgagggtaaaacggtttgttactttgcccggttactaagggagtgagtacttgccccccagtctgagctctgtgccggagggttctgtttcttgactttttttttcccctgggtgcacctcccttttggtctgaatagccctcaagcctttggcggccgtcaggacgccgtggctggggacaaacatgggcgtgttgcaatgcttccgcttcagcatgtgtcaatggcctgtgtccacctggcttccaagatagaagaggccccaagacgcatacgggacgtcatcaatgtgtttcaccgccttcgacagctgagagacaaaaagaagcccgtgcctctactactggatcaagattatgttaatttaaagaaccaaattataaaggcggaaagacgagttctcaaagagttgggtttctgcgtccatgtgaagcatcctcataagataatcgttatgtaccttcaggtgttagagtgtgagcgtaaccaacacctggtccagacctcatggaattacatgaacgacagccttcgcaccgacgtcttcgtgcggttccagccagagagcatcgcctgtgcctgcatttatcttgctgcccggacgctggagatccctttgcccaatcgtccccattggtttcttttgtttggagcaactgaagaagaaattcaggaaatctgcttaaagatcttgcagctttatgctcggaaaaaggttgatctcacacacctggagggtgaagtggaaaaaagaaagcacgctatcgaagaggcaaaggcccaagcccggggcctgttgcctgggggcacacaggtgctggatggtacctcggggttctctcctgcccccaagctggtggaatcccccaaagaaggtaaagggagcaagccttccccactgtctgtgaagaacaccaagaggaggctggagggcgccaagaaagccaaggcggacagccccgtgaacggcttgccaaaggggcgagagagtcggagtcggagccggagccgtgagcagagctactcgaggtccccatcccgatcagcgtctcctaagaggaggaaaagtgacagcggctccacatctggtgggtccaagtcgcagagccgctcccggagcaggagtgactccccaccgagacaggccccccgcagcgctccctacaaaggctctgagattcggggctcccggaagtccaaggactgcaagtacccccagaagccacacaagtctcggagccggagttcttcccgttctcgaagcaggtcacgggagcgggcggataatccgggaaaatacaagaagaaaagtcattactacagagatcagcgacgagagcgctcgaggtcgtatgaacgcacaggccgtcgctatgagcgggaccaccctgggcacagcaggcatcggagctcccctgggacctgtggccgccgcccacagaccatgctcctggggcgcctgacttcccagctgttgagggccgttccttgggcaggcggccgcccgccttggcccgtctctggagtgctgggcagccgggtctgcgggcccctttacagcacatcgccggccggcccaggtagggcggcctctctccctcgcaagggggcccagctggagctggaggagatgctggtccccaggaagatgtccgtcagccccctggagagctggctcacggcccgctgcttcctgcccagactggataccgggaccgcagggactgtggctccaccgcaatcctaccagtgtccgcccagccagataggggaaggggccgagcagggggatgaaggcgtcgcggatgcgcctcaaattcagtgcaaaaacgtgctgaagatccgccggcggaagatgaaccaccacaagtaccggaagctggtgaagaagacgcggttcctgcggaggaaggtccaggagggacgcctgagacgcaagcagatcaagttcgagaaagacctgaggcgcatctggctgaaggcggggctaaaggaagcccccgaaggctggcagacccccaagatctacctgcggggcaaatgagtctggcgccgcccttcccgcccgttgctgctgtgatccgtagtaataaattctcagaggactcagccataaaaaaaaactcagggctctag

SEQ ID NO: 306728 - DNA, 4195 bp, Homo sapiens
  misc_feature (3393)..(3397): n is a, c, g, or t
gggagtcggcggcacaaaatggcggcggcggcggcggcggctggtgctgcagggtcggcagctcccgcggcagcggccggcgccccgggatctgggggcgcaccctcagggtcgcagggggtgctgatcggggacaggctgtactccggggtgctcatcaccttggagaactgcctcctgcctgacgacaagctccgtttcacgccgtccatgtcgagcggcctcgacaccgacacagagaccgacctccgcgtggtgggctgcgagctcatccaggcggccggtatcctgctccgcctgccgcaggtggccatggctaccgggcaggtgttgttccagcggttcttttataccaagtccttcgtgaagcactccatggaggtaaggcttcctcctgcacttcattcccagcgaagtatgttgagggtaaaacggtttgttactttgcccggttactaagggagtgagtacttgccccccagtctgagctctgtgccggagggttctgtttcttgactttttttttcccctgggtgcacctcccttttggtctgaatagccctcaagcctttggcggccgtcaggacgccgtggctggggacaaacatgggcgtgttgcaatgcttccgcttcagcatgtgtcaatggcctgtgtccacctggcttccaagatagaagaggccccaagacgcatacgggacgtcatcaatgtgtttcaccgccttcgacagctgagagacaaaaagaagcccgtgcctctactactggatcaagattatgttaatttaaagaaccaaattataaaggcggaaagacgagttctcaaagagttgggtttctgcgtccatgtgaagcatcctcataagataatcgttatgtaccttcaggtgttagagtgtgagcgtaaccaacacctggtccagacctcatggaattacatgaacgacagccttcgcaccgacgtcttcgtgcggttccagccagagagcatcgcctgtgcctgcatttatcttgctgcccggacgctggagatccctttgcccaatcgtccccattggtttcttttgtttggagcaactgaagaagaaattcaggaaatctgcttaaagatcttgcagctttatgctcggaaaaaggttgatctcacacacctggagggtgaagtggaaaaaagaaagcacgctatcgaagaggcaaaggcccaagcccggggcctgttgcctgggggcacacaggtgctggatggtacctcggggttctctcctgcccccaagctggtggaatcccccaaagaaggtaaagggagcaagccttccccactgtctgtgaagaacaccaagaggaggctggagggcgccaagaaagccaaggcggacagccccgtgaacggcttgccaaaggggcgagagagtcggagtcggagccggagccgtgagcagagctactcgaggtccccatcccgatcagcgtctcctaagaggaggaaaagtgacagcggctccacatctggtgggtccaagtcgcagagccgctcccggagcaggagtgactccccaccgagacaggccccccgcagcgctccctacaaaggctctgagattcggggctcccggaagtccaaggactgcaagtacccccagaagccacacaagtctcggagccggagttcttcccgttctcgaagcaggtcacgggagcgggcggataatccgggaaaatacaagaagaaaagtcattactacagagatcagcgacgagagcgctcgaggtcgtatgaacgcacaggccgtcgctatgagcgggaccaccctgggcacagcaggcatcggaggtgaggcggggttgcagtgactggtggccgcaagcccttccctggggagtacctgatggctgccctttgacccccggtggctgccctttgacccccgggtgtgctctcagcgcaagtggtcctagaacaggattctttttggaaatgtctgtcgactggaccttggtggatttggaaatggaactgagggaccggtgacacgtgcttcagaccggtctggggtgcggcgcacacctgggcccgtgcagggctcagctcggcagcagctctgagggcagctcaatgaaaaagtgaatgcacacgcccttgttggcgtggcctggcatggcctggtgctatcggcagccgctctccactccccgactgatactcaattacgtgaagccaagaaagatgatttttagaacctttgcctatattaggttgtacttatgtacatattttgcagtgtttcacaggagaaagtggccttaactgccccttattctctctccacgttgtaaataaacatgtgtttaatacaagttaaagctatgtatgaaaactcagaacttgaatcccgtcagcttaaaacttgtgtagggaatcctgacttttaaaatgtgagggtatttggatctgtgttgaaagtcgtatatttttatctgtgcggtgctgagtgcaggccaccagctcctaaatagaggttccctatatgcgcgtatgacatggtgaataaacacaactctctccactcaggacatccggagcgttatggacgtggtaggtggtcgttctgtgtgcttgtgaaagtgtccaggcgtgtgcacagccagtgcgcccacttccgggctccttgctccctgctgtactgaagttttggattttgcatccaatcctgtgtgcctgcccttctgccgaaggcttgtgaggggcctgagtcctctgcccatcaggatgacaggctccttcctgcagggccataggagggaagttttggaaacacagaatgattccaaggtgctctcgttcctgagggggactggtttgtaacccatgacatctgtgggcgagagaggcagctgggagcaggacacttggagggtcaccccacgggggtggcacctgcactctgagtgccccccactgtcatcagctgcctcttaccgtggacacagttttggttttggggactagggggccccactcctggtggtaccgtttggacttactagggcagtgggacatataggccggggctagtgggataacggggagttacgcctgatgacttttttgatggaatcctgcattagatagctggtgggacccccccctcagaattggggaactgaggagactccagggagggtgtccttccagggagagcagctatgaggggccccctagcttcctgtgcctggaagtaagagaaccagtaaagggccatacacacctgtacccaagagaccgctctccatttgctttctttttttactaaataattgtaaaatattattatgacataaagaaccatttaaggccaaaaaaaaaaaaaaaaaaaaaaaaaaaaaaaaaaaaannnnntcgaggtcgggcttgggaagggtcagcgggaggcctgagggcgccgggcgctgcggcaggcgggcccggggtccagccgagagggtccgggcgccaggcaacgcgattcgcgcgggggtgaacccggggagggggccggcctccccgttctgggacctttcgctcccctgggacctgtggccgccgcccacagaccatgctcctggggcgcctgacttcccagctgttgagggccgttccttgggcaggcggccgcccgccttggcccgtctctggagtgctgggcagccgggtctgcgggcccctttacagcacatcgccggccggcccaggtagggcggcctctcccctggagagctggctcacggcccgctgcttcctgcccagactggataccgggaccgcagggactgtggctccaccgcaatcctaccagtgtccgcccagccagataggggaaggggccgagcagggggatgaaggcgtcgcggatgcgcctcaaattcagtgcaaaaacgtgctgaagatccgccggcggaagatgaaccaccacaagtaccggaagctggtgaagaagacgcggttcctgcggaggaaggtccaggagggacgcctgagacgcaagcagatcaagttcgagaaagacctgaggcgcatctggctgaaggcggggctaaaggaagcccccgaaggctggcagacccccaagatctacctgcggggcaaatgagtctggcgccgcccttcccgcccgttgctgctgtgatccgtagtaataaattctcagaggactcagcc

SEQ ID NO: 306729 - DNA, 4320 bp, Homo sapiens
  misc_feature (3393)..(3397): n is a, c, g, or t
gggagtcggcggcacaaaatggcggcggcggcggcggcggctggtgctgcagggtcggcagctcccgcggcagcggccggcgccccgggatctgggggcgcaccctcagggtcgcagggggtgctgatcggggacaggctgtactccggggtgctcatcaccttggagaactgcctcctgcctgacgacaagctccgtttcacgccgtccatgtcgagcggcctcgacaccgacacagagaccgacctccgcgtggtgggctgcgagctcatccaggcggccggtatcctgctccgcctgccgcaggtggccatggctaccgggcaggtgttgttccagcggttcttttataccaagtccttcgtgaagcactccatggaggtaaggcttcctcctgcacttcattcccagcgaagtatgttgagggtaaaacggtttgttactttgcccggttactaagggagtgagtacttgccccccagtctgagctctgtgccggagggttctgtttcttgactttttttttcccctgggtgcacctcccttttggtctgaatagccctcaagcctttggcggccgtcaggacgccgtggctggggacaaacatgggcgtgttgcaatgcttccgcttcagcatgtgtcaatggcctgtgtccacctggcttccaagatagaagaggccccaagacgcatacgggacgtcatcaatgtgtttcaccgccttcgacagctgagagacaaaaagaagcccgtgcctctactactggatcaagattatgttaatttaaagaaccaaattataaaggcggaaagacgagttctcaaagagttgggtttctgcgtccatgtgaagcatcctcataagataatcgttatgtaccttcaggtgttagagtgtgagcgtaaccaacacctggtccagacctcatggaattacatgaacgacagccttcgcaccgacgtcttcgtgcggttccagccagagagcatcgcctgtgcctgcatttatcttgctgcccggacgctggagatccctttgcccaatcgtccccattggtttcttttgtttggagcaactgaagaagaaattcaggaaatctgcttaaagatcttgcagctttatgctcggaaaaaggttgatctcacacacctggagggtgaagtggaaaaaagaaagcacgctatcgaagaggcaaaggcccaagcccggggcctgttgcctgggggcacacaggtgctggatggtacctcggggttctctcctgcccccaagctggtggaatcccccaaagaaggtaaagggagcaagccttccccactgtctgtgaagaacaccaagaggaggctggagggcgccaagaaagccaaggcggacagccccgtgaacggcttgccaaaggggcgagagagtcggagtcggagccggagccgtgagcagagctactcgaggtccccatcccgatcagcgtctcctaagaggaggaaaagtgacagcggctccacatctggtgggtccaagtcgcagagccgctcccggagcaggagtgactccccaccgagacaggccccccgcagcgctccctacaaaggctctgagattcggggctcccggaagtccaaggactgcaagtacccccagaagccacacaagtctcggagccggagttcttcccgttctcgaagcaggtcacgggagcgggcggataatccgggaaaatacaagaagaaaagtcattactacagagatcagcgacgagagcgctcgaggtcgtatgaacgcacaggccgtcgctatgagcgggaccaccctgggcacagcaggcatcggaggtgaggcggggttgcagtgactggtggccgcaagcccttccctggggagtacctgatggctgccctttgacccccggtggctgccctttgacccccgggtgtgctctcagcgcaagtggtcctagaacaggattctttttggaaatgtctgtcgactggaccttggtggatttggaaatggaactgagggaccggtgacacgtgcttcagaccggtctggggtgcggcgcacacctgggcccgtgcagggctcagctcggcagcagctctgagggcagctcaatgaaaaagtgaatgcacacgcccttgttggcgtggcctggcatggcctggtgctatcggcagccgctctccactccccgactgatactcaattacgtgaagccaagaaagatgatttttagaacctttgcctatattaggttgtacttatgtacatattttgcagtgtttcacaggagaaagtggccttaactgccccttattctctctccacgttgtaaataaacatgtgtttaatacaagttaaagctatgtatgaaaactcagaacttgaatcccgtcagcttaaaacttgtgtagggaatcctgacttttaaaatgtgagggtatttggatctgtgttgaaagtcgtatatttttatctgtgcggtgctgagtgcaggccaccagctcctaaatagaggttccctatatgcgcgtatgacatggtgaataaacacaactctctccactcaggacatccggagcgttatggacgtggtaggtggtcgttctgtgtgcttgtgaaagtgtccaggcgtgtgcacagccagtgcgcccacttccgggctccttgctccctgctgtactgaagttttggattttgcatccaatcctgtgtgcctgcccttctgccgaaggcttgtgaggggcctgagtcctctgcccatcaggatgacaggctccttcctgcagggccataggagggaagttttggaaacacagaatgattccaaggtgctctcgttcctgagggggactggtttgtaacccatgacatctgtgggcgagagaggcagctgggagcaggacacttggagggtcaccccacgggggtggcacctgcactctgagtgccccccactgtcatcagctgcctcttaccgtggacacagttttggttttggggactagggggccccactcctggtggtaccgtttggacttactagggcagtgggacatataggccggggctagtgggataacggggagttacgcctgatgacttttttgatggaatcctgcattagatagctggtgggacccccccctcagaattggggaactgaggagactccagggagggtgtccttccagggagagcagctatgaggggccccctagcttcctgtgcctggaagtaagagaaccagtaaagggccatacacacctgtacccaagagaccgctctccatttgctttctttttttactaaataattgtaaaatattattatgacataaagaaccatttaaggccaaaaaaaaaaaaaaaaaaaaaaaaaaaaaaaaaaaaannnnntcgaggtcgggcttgggaagggtcagcgggaggcctgagggcgccgggcgctgcggcaggcgggcccggggtccagccgagagggtccgggcgccaggcaacgcgattcgcgcgggggtgaacccggggagggggccggcctccccgttctgggacctttcggcgtccgagcgcgacaccgcccgcgtcgggggcttgggagcctcggggcgcgagctgtgttggaagcaaagtcctccttgtgggttggggtggcggagggagaagggaagcgagggtcgcggcgggaccagacgccccagtcccggcccgcccgcgactactgaaggcgctgccgcctgacctgaacgggcacttgtgttccagctcccctgggacctgtggccgccgcccacagaccatgctcctggggcgcctgacttcccactggagctggaggagatgctggtccccaggaagatgtccgtcagccccctggagagctggctcacggcccgctgcttcctgcccagactggataccgggaccgcagggactgtggctccaccgcaatcctaccagtgtccgcccagccagataggggaaggggccgagcagggggatgaaggcgtcgcggatgcgcctcaaattcagtgcaaaaacgtgctgaagatccgccggcggaagatgaaccaccacaagtaccggaagctggtgaagaagacgcggttcctgcggaggaaggtccaggagggacgcctgagacgcaagcagatcaagttcgagaaagacctgaggcgcatctggctgaaggcggggctaaaggaagcccccgaaggctggcagacccccaagatctacctgcggggcaaatgagtctggcgccgcccttcccgcccgttgctgctgtgatccgtagtaataaattctcagaggactcagcc

SEQ ID NO: 306730 - DNA, 4450 bp, Homo sapiens
  misc_feature (3393)..(3397): n is a, c, g, or t
gggagtcggcggcacaaaatggcggcggcggcggcggcggctggtgctgcagggtcggcagctcccgcggcagcggccggcgccccgggatctgggggcgcaccctcagggtcgcagggggtgctgatcggggacaggctgtactccggggtgctcatcaccttggagaactgcctcctgcctgacgacaagctccgtttcacgccgtccatgtcgagcggcctcgacaccgacacagagaccgacctccgcgtggtgggctgcgagctcatccaggcggccggtatcctgctccgcctgccgcaggtggccatggctaccgggcaggtgttgttccagcggttcttttataccaagtccttcgtgaagcactccatggaggtaaggcttcctcctgcacttcattcccagcgaagtatgttgagggtaaaacggtttgttactttgcccggttactaagggagtgagtacttgccccccagtctgagctctgtgccggagggttctgtttcttgactttttttttcccctgggtgcacctcccttttggtctgaatagccctcaagcctttggcggccgtcaggacgccgtggctggggacaaacatgggcgtgttgcaatgcttccgcttcagcatgtgtcaatggcctgtgtccacctggcttccaagatagaagaggccccaagacgcatacgggacgtcatcaatgtgtttcaccgccttcgacagctgagagacaaaaagaagcccgtgcctctactactggatcaagattatgttaatttaaagaaccaaattataaaggcggaaagacgagttctcaaagagttgggtttctgcgtccatgtgaagcatcctcataagataatcgttatgtaccttcaggtgttagagtgtgagcgtaaccaacacctggtccagacctcatggaattacatgaacgacagccttcgcaccgacgtcttcgtgcggttccagccagagagcatcgcctgtgcctgcatttatcttgctgcccggacgctggagatccctttgcccaatcgtccccattggtttcttttgtttggagcaactgaagaagaaattcaggaaatctgcttaaagatcttgcagctttatgctcggaaaaaggttgatctcacacacctggagggtgaagtggaaaaaagaaagcacgctatcgaagaggcaaaggcccaagcccggggcctgttgcctgggggcacacaggtgctggatggtacctcggggttctctcctgcccccaagctggtggaatcccccaaagaaggtaaagggagcaagccttccccactgtctgtgaagaacaccaagaggaggctggagggcgccaagaaagccaaggcggacagccccgtgaacggcttgccaaaggggcgagagagtcggagtcggagccggagccgtgagcagagctactcgaggtccccatcccgatcagcgtctcctaagaggaggaaaagtgacagcggctccacatctggtgggtccaagtcgcagagccgctcccggagcaggagtgactccccaccgagacaggccccccgcagcgctccctacaaaggctctgagattcggggctcccggaagtccaaggactgcaagtacccccagaagccacacaagtctcggagccggagttcttcccgttctcgaagcaggtcacgggagcgggcggataatccgggaaaatacaagaagaaaagtcattactacagagatcagcgacgagagcgctcgaggtcgtatgaacgcacaggccgtcgctatgagcgggaccaccctgggcacagcaggcatcggaggtgaggcggggttgcagtgactggtggccgcaagcccttccctggggagtacctgatggctgccctttgacccccggtggctgccctttgacccccgggtgtgctctcagcgcaagtggtcctagaacaggattctttttggaaatgtctgtcgactggaccttggtggatttggaaatggaactgagggaccggtgacacgtgcttcagaccggtctggggtgcggcgcacacctgggcccgtgcagggctcagctcggcagcagctctgagggcagctcaatgaaaaagtgaatgcacacgcccttgttggcgtggcctggcatggcctggtgctatcggcagccgctctccactccccgactgatactcaattacgtgaagccaagaaagatgatttttagaacctttgcctatattaggttgtacttatgtacatattttgcagtgtttcacaggagaaagtggccttaactgccccttattctctctccacgttgtaaataaacatgtgtttaatacaagttaaagctatgtatgaaaactcagaacttgaatcccgtcagcttaaaacttgtgtagggaatcctgacttttaaaatgtgagggtatttggatctgtgttgaaagtcgtatatttttatctgtgcggtgctgagtgcaggccaccagctcctaaatagaggttccctatatgcgcgtatgacatggtgaataaacacaactctctccactcaggacatccggagcgttatggacgtggtaggtggtcgttctgtgtgcttgtgaaagtgtccaggcgtgtgcacagccagtgcgcccacttccgggctccttgctccctgctgtactgaagttttggattttgcatccaatcctgtgtgcctgcccttctgccgaaggcttgtgaggggcctgagtcctctgcccatcaggatgacaggctccttcctgcagggccataggagggaagttttggaaacacagaatgattccaaggtgctctcgttcctgagggggactggtttgtaacccatgacatctgtgggcgagagaggcagctgggagcaggacacttggagggtcaccccacgggggtggcacctgcactctgagtgccccccactgtcatcagctgcctcttaccgtggacacagttttggttttggggactagggggccccactcctggtggtaccgtttggacttactagggcagtgggacatataggccggggctagtgggataacggggagttacgcctgatgacttttttgatggaatcctgcattagatagctggtgggacccccccctcagaattggggaactgaggagactccagggagggtgtccttccagggagagcagctatgaggggccccctagcttcctgtgcctggaagtaagagaaccagtaaagggccatacacacctgtacccaagagaccgctctccatttgctttctttttttactaaataattgtaaaatattattatgacataaagaaccatttaaggccaaaaaaaaaaaaaaaaaaaaaaaaaaaaaaaaaaaaannnnntcgaggtcgggcttgggaagggtcagcgggaggcctgagggcgccgggcgctgcggcaggcgggcccggggtccagccgagagggtccgggcgccaggcaacgcgattcgcgcgggggtgaacccggggagggggccggcctccccgttctgggacctttcgctcccctgggacctgtggccgccgcccacagaccatgctcctggggcgcctgacttcccagctgttgagggccgttccttgggcaggtaggaagccccgcgggggcggatgggaggatgcacacctggttaggagtgcgggtctcagcagctccgctggggcagggccggtggccacacacacactctttcccctctaagcttccgatgctcacagagggaacctcaggggttcaggccaggaatgaggtgcgggggatcctcgctgggacgaacctgctgctcctcaacccgacgggcctgtgtggtctcgcgagcggtgaccgtggcgtctggttttctgcaggcggccgcccgccttggcccgtctctggagtgctgggcagccgggtctgcgggcccctttacagcacatcgccggccggcccaggtagggcggcctctctccctcgcaagggggcccagctggagctggaggagatgctggtccccaggaagatgtccgtcagccccctggagagctggctcacggcccgctgcttcctgcccagaaaggggccgagcagggggatgaaggcgtcgcggatgcgcctcaaattcagtgcaaaaacgtgctgaagatccgccggcggaagatgaaccaccacaagtaccggaagctggtgaagaagacgcggttcctgcggaggaaggtccaggagggacgcctgagacgcaagcagatcaagttcgagaaagacctgaggcgcatctggctgaaggcggggctaaaggaagcccccgaaggctggcagacccccaagatctacctgcggggcaaatgagtctggcgccgcccttcccgcccgttgctgctgtgatccgtagtaataaattctcagaggactcagcc

SEQ ID NO: 306731 - DNA, 4384 bp, Homo sapiens
  misc_feature (3393)..(3397): n is a, c, g, or t
gggagtcggcggcacaaaatggcggcggcggcggcggcggctggtgctgcagggtcggcagctcccgcggcagcggccggcgccccgggatctgggggcgcaccctcagggtcgcagggggtgctgatcggggacaggctgtactccggggtgctcatcaccttggagaactgcctcctgcctgacgacaagctccgtttcacgccgtccatgtcgagcggcctcgacaccgacacagagaccgacctccgcgtggtgggctgcgagctcatccaggcggccggtatcctgctccgcctgccgcaggtggccatggctaccgggcaggtgttgttccagcggttcttttataccaagtccttcgtgaagcactccatggaggtaaggcttcctcctgcacttcattcccagcgaagtatgttgagggtaaaacggtttgttactttgcccggttactaagggagtgagtacttgccccccagtctgagctctgtgccggagggttctgtttcttgactttttttttcccctgggtgcacctcccttttggtctgaatagccctcaagcctttggcggccgtcaggacgccgtggctggggacaaacatgggcgtgttgcaatgcttccgcttcagcatgtgtcaatggcctgtgtccacctggcttccaagatagaagaggccccaagacgcatacgggacgtcatcaatgtgtttcaccgccttcgacagctgagagacaaaaagaagcccgtgcctctactactggatcaagattatgttaatttaaagaaccaaattataaaggcggaaagacgagttctcaaagagttgggtttctgcgtccatgtgaagcatcctcataagataatcgttatgtaccttcaggtgttagagtgtgagcgtaaccaacacctggtccagacctcatggaattacatgaacgacagccttcgcaccgacgtcttcgtgcggttccagccagagagcatcgcctgtgcctgcatttatcttgctgcccggacgctggagatccctttgcccaatcgtccccattggtttcttttgtttggagcaactgaagaagaaattcaggaaatctgcttaaagatcttgcagctttatgctcggaaaaaggttgatctcacacacctggagggtgaagtggaaaaaagaaagcacgctatcgaagaggcaaaggcccaagcccggggcctgttgcctgggggcacacaggtgctggatggtacctcggggttctctcctgcccccaagctggtggaatcccccaaagaaggtaaagggagcaagccttccccactgtctgtgaagaacaccaagaggaggctggagggcgccaagaaagccaaggcggacagccccgtgaacggcttgccaaaggggcgagagagtcggagtcggagccggagccgtgagcagagctactcgaggtccccatcccgatcagcgtctcctaagaggaggaaaagtgacagcggctccacatctggtgggtccaagtcgcagagccgctcccggagcaggagtgactccccaccgagacaggccccccgcagcgctccctacaaaggctctgagattcggggctcccggaagtccaaggactgcaagtacccccagaagccacacaagtctcggagccggagttcttcccgttctcgaagcaggtcacgggagcgggcggataatccgggaaaatacaagaagaaaagtcattactacagagatcagcgacgagagcgctcgaggtcgtatgaacgcacaggccgtcgctatgagcgggaccaccctgggcacagcaggcatcggaggtgaggcggggttgcagtgactggtggccgcaagcccttccctggggagtacctgatggctgccctttgacccccggtggctgccctttgacccccgggtgtgctctcagcgcaagtggtcctagaacaggattctttttggaaatgtctgtcgactggaccttggtggatttggaaatggaactgagggaccggtgacacgtgcttcagaccggtctggggtgcggcgcacacctgggcccgtgcagggctcagctcggcagcagctctgagggcagctcaatgaaaaagtgaatgcacacgcccttgttggcgtggcctggcatggcctggtgctatcggcagccgctctccactccccgactgatactcaattacgtgaagccaagaaagatgatttttagaacctttgcctatattaggttgtacttatgtacatattttgcagtgtttcacaggagaaagtggccttaactgccccttattctctctccacgttgtaaataaacatgtgtttaatacaagttaaagctatgtatgaaaactcagaacttgaatcccgtcagcttaaaacttgtgtagggaatcctgacttttaaaatgtgagggtatttggatctgtgttgaaagtcgtatatttttatctgtgcggtgctgagtgcaggccaccagctcctaaatagaggttccctatatgcgcgtatgacatggtgaataaacacaactctctccactcaggacatccggagcgttatggacgtggtaggtggtcgttctgtgtgcttgtgaaagtgtccaggcgtgtgcacagccagtgcgcccacttccgggctccttgctccctgctgtactgaagttttggattttgcatccaatcctgtgtgcctgcccttctgccgaaggcttgtgaggggcctgagtcctctgcccatcaggatgacaggctccttcctgcagggccataggagggaagttttggaaacacagaatgattccaaggtgctctcgttcctgagggggactggtttgtaacccatgacatctgtgggcgagagaggcagctgggagcaggacacttggagggtcaccccacgggggtggcacctgcactctgagtgccccccactgtcatcagctgcctcttaccgtggacacagttttggttttggggactagggggccccactcctggtggtaccgtttggacttactagggcagtgggacatataggccggggctagtgggataacggggagttacgcctgatgacttttttgatggaatcctgcattagatagctggtgggacccccccctcagaattggggaactgaggagactccagggagggtgtccttccagggagagcagctatgaggggccccctagcttcctgtgcctggaagtaagagaaccagtaaagggccatacacacctgtacccaagagaccgctctccatttgctttctttttttactaaataattgtaaaatattattatgacataaagaaccatttaaggccaaaaaaaaaaaaaaaaaaaaaaaaaaaaaaaaaaaaannnnntcgaggtcgggcttgggaagggtcagcgggaggcctgagggcgccgggcgctgcggcaggcgggcccggggtccagccgagagggtccgggcgccaggcaacgcgattcgcgcgggggtgaacccggggagggggccggcctccccgttctgggacctttcgctcccctgggacctgtggccgccgcccacagaccatgctcctggggcgcctgacttcccagctgttgagggccgttccttgggcaggtaggaagccccgcgggggcggatgggaggatgcacacctggttaggagtgcgggtctcagcagctccgctggggcagggccggtggccacacacacactctttcccctctaagcttccgatgctcacagagggaacctcaggggttcaggccaggaatgaggtgcgggggatcctcgctgggacgaacctgctgctcctcaacccgacgggcctgtgtggtctcgcgagcggtgaccgtggcgtctggttttctgcaggcggccgcccgccttggcccgtctctggagtgctgggcagccgggtctgcgggcccctttacagcacatcgccggccggcccaggtagggcggcctctctccctcgcaagggggcccagctggagctggaggagatgctggtccccaggaagatgtccgtcagccccctggagagctggctcacggcccgctgcttcctgcccagactggataccgggaccgcagggactgtggctccaccgcaatcctaccagtgtccgcccagccagatagggggaaggtccaggagggacgcctgagacgcaagcagatcaagttcgagaaagacctgaggcgcatctggctgaaggcggggctaaaggaagcccccgaaggctggcagacccccaagatctacctgcggggcaaatgagtctggcgccgcccttcccgcccgttgctgctgtgatccgtagtaataaattctcagaggactcagcc

SEQ ID NO: 306732 - DNA, 4347 bp, Homo sapiens
  misc_feature (3393)..(3397): n is a, c, g, or t
gggagtcggcggcacaaaatggcggcggcggcggcggcggctggtgctgcagggtcggcagctcccgcggcagcggccggcgccccgggatctgggggcgcaccctcagggtcgcagggggtgctgatcggggacaggctgtactccggggtgctcatcaccttggagaactgcctcctgcctgacgacaagctccgtttcacgccgtccatgtcgagcggcctcgacaccgacacagagaccgacctccgcgtggtgggctgcgagctcatccaggcggccggtatcctgctccgcctgccgcaggtggccatggctaccgggcaggtgttgttccagcggttcttttataccaagtccttcgtgaagcactccatggaggtaaggcttcctcctgcacttcattcccagcgaagtatgttgagggtaaaacggtttgttactttgcccggttactaagggagtgagtacttgccccccagtctgagctctgtgccggagggttctgtttcttgactttttttttcccctgggtgcacctcccttttggtctgaatagccctcaagcctttggcggccgtcaggacgccgtggctggggacaaacatgggcgtgttgcaatgcttccgcttcagcatgtgtcaatggcctgtgtccacctggcttccaagatagaagaggccccaagacgcatacgggacgtcatcaatgtgtttcaccgccttcgacagctgagagacaaaaagaagcccgtgcctctactactggatcaagattatgttaatttaaagaaccaaattataaaggcggaaagacgagttctcaaagagttgggtttctgcgtccatgtgaagcatcctcataagataatcgttatgtaccttcaggtgttagagtgtgagcgtaaccaacacctggtccagacctcatggaattacatgaacgacagccttcgcaccgacgtcttcgtgcggttccagccagagagcatcgcctgtgcctgcatttatcttgctgcccggacgctggagatccctttgcccaatcgtccccattggtttcttttgtttggagcaactgaagaagaaattcaggaaatctgcttaaagatcttgcagctttatgctcggaaaaaggttgatctcacacacctggagggtgaagtggaaaaaagaaagcacgctatcgaagaggcaaaggcccaagcccggggcctgttgcctgggggcacacaggtgctggatggtacctcggggttctctcctgcccccaagctggtggaatcccccaaagaaggtaaagggagcaagccttccccactgtctgtgaagaacaccaagaggaggctggagggcgccaagaaagccaaggcggacagccccgtgaacggcttgccaaaggggcgagagagtcggagtcggagccggagccgtgagcagagctactcgaggtccccatcccgatcagcgtctcctaagaggaggaaaagtgacagcggctccacatctggtgggtccaagtcgcagagccgctcccggagcaggagtgactccccaccgagacaggccccccgcagcgctccctacaaaggctctgagattcggggctcccggaagtccaaggactgcaagtacccccagaagccacacaagtctcggagccggagttcttcccgttctcgaagcaggtcacgggagcgggcggataatccgggaaaatacaagaagaaaagtcattactacagagatcagcgacgagagcgctcgaggtcgtatgaacgcacaggccgtcgctatgagcgggaccaccctgggcacagcaggcatcggaggtgaggcggggttgcagtgactggtggccgcaagcccttccctggggagtacctgatggctgccctttgacccccggtggctgccctttgacccccgggtgtgctctcagcgcaagtggtcctagaacaggattctttttggaaatgtctgtcgactggaccttggtggatttggaaatggaactgagggaccggtgacacgtgcttcagaccggtctggggtgcggcgcacacctgggcccgtgcagggctcagctcggcagcagctctgagggcagctcaatgaaaaagtgaatgcacacgcccttgttggcgtggcctggcatggcctggtgctatcggcagccgctctccactccccgactgatactcaattacgtgaagccaagaaagatgatttttagaacctttgcctatattaggttgtacttatgtacatattttgcagtgtttcacaggagaaagtggccttaactgccccttattctctctccacgttgtaaataaacatgtgtttaatacaagttaaagctatgtatgaaaactcagaacttgaatcccgtcagcttaaaacttgtgtagggaatcctgacttttaaaatgtgagggtatttggatctgtgttgaaagtcgtatatttttatctgtgcggtgctgagtgcaggccaccagctcctaaatagaggttccctatatgcgcgtatgacatggtgaataaacacaactctctccactcaggacatccggagcgttatggacgtggtaggtggtcgttctgtgtgcttgtgaaagtgtccaggcgtgtgcacagccagtgcgcccacttccgggctccttgctccctgctgtactgaagttttggattttgcatccaatcctgtgtgcctgcccttctgccgaaggcttgtgaggggcctgagtcctctgcccatcaggatgacaggctccttcctgcagggccataggagggaagttttggaaacacagaatgattccaaggtgctctcgttcctgagggggactggtttgtaacccatgacatctgtgggcgagagaggcagctgggagcaggacacttggagggtcaccccacgggggtggcacctgcactctgagtgccccccactgtcatcagctgcctcttaccgtggacacagttttggttttggggactagggggccccactcctggtggtaccgtttggacttactagggcagtgggacatataggccggggctagtgggataacggggagttacgcctgatgacttttttgatggaatcctgcattagatagctggtgggacccccccctcagaattggggaactgaggagactccagggagggtgtccttccagggagagcagctatgaggggccccctagcttcctgtgcctggaagtaagagaaccagtaaagggccatacacacctgtacccaagagaccgctctccatttgctttctttttttactaaataattgtaaaatattattatgacataaagaaccatttaaggccaaaaaaaaaaaaaaaaaaaaaaaaaaaaaaaaaaaaannnnntcgaggtcgggcttgggaagggtcagcgggaggcctgagggcgccgggcgctgcggcaggcgggcccggggtccagccgagagggtccgggcgccaggcaacgcgattcgcgcgggggtgaacccggggagggggccggcctccccgttctgggacctttcgctcccctgggacctgtggccgccgcccacagaccatgctcctggggcgcctgacttcccagctgttgagggccgttccttgggcaggtaggaagccccgcgggggcggatgggaggatgcacacctggttaggagtgcgggtctcagcagctccgctggggcagggccggtggccacacacacactctttcccctctaagcttccgatgctcacagagggaacctcaggggttcaggccaggaatgaggtgcgggggatcctcgctgggacgaacctgctgctcctcaacccgacgggcctgtgtggtctcgcgagcggtgaccgtggcgtctggttttctgcaggcggccgcccgccttggcccgtctctggagtgctgggcagccgggtctgcgggcccctttacagcacatcgccggccggcccaggtagggcggcctctctccctcgcaagggggcccagctggagctggaggagatgctggtccccaggaagatgtccgtcagccccctggagagctggctcacggcccgctgcttcctgcccagactggataccgggaccgcagggactgtggctccaccgcaatcctaccagtgtccgcccagccagataggggatctggctgaaggcggggctaaaggaagcccccgaaggctggcagacccccaagatctacctgcggggcaaatgagtctggcgccgcccttcccgcccgttgctgctgtgatccgtagtaataaattctcagaggactcagccataaaaaaaaactcagggctctag

SEQ ID NO: 306733 - DNA, 4229 bp, Homo sapiens
  misc_feature (3393)..(3397): n is a, c, g, or t
gggagtcggcggcacaaaatggcggcggcggcggcggcggctggtgctgcagggtcggcagctcccgcggcagcggccggcgccccgggatctgggggcgcaccctcagggtcgcagggggtgctgatcggggacaggctgtactccggggtgctcatcaccttggagaactgcctcctgcctgacgacaagctccgtttcacgccgtccatgtcgagcggcctcgacaccgacacagagaccgacctccgcgtggtgggctgcgagctcatccaggcggccggtatcctgctccgcctgccgcaggtggccatggctaccgggcaggtgttgttccagcggttcttttataccaagtccttcgtgaagcactccatggaggtaaggcttcctcctgcacttcattcccagcgaagtatgttgagggtaaaacggtttgttactttgcccggttactaagggagtgagtacttgccccccagtctgagctctgtgccggagggttctgtttcttgactttttttttcccctgggtgcacctcccttttggtctgaatagccctcaagcctttggcggccgtcaggacgccgtggctggggacaaacatgggcgtgttgcaatgcttccgcttcagcatgtgtcaatggcctgtgtccacctggcttccaagatagaagaggccccaagacgcatacgggacgtcatcaatgtgtttcaccgccttcgacagctgagagacaaaaagaagcccgtgcctctactactggatcaagattatgttaatttaaagaaccaaattataaaggcggaaagacgagttctcaaagagttgggtttctgcgtccatgtgaagcatcctcataagataatcgttatgtaccttcaggtgttagagtgtgagcgtaaccaacacctggtccagacctcatggaattacatgaacgacagccttcgcaccgacgtcttcgtgcggttccagccagagagcatcgcctgtgcctgcatttatcttgctgcccggacgctggagatccctttgcccaatcgtccccattggtttcttttgtttggagcaactgaagaagaaattcaggaaatctgcttaaagatcttgcagctttatgctcggaaaaaggttgatctcacacacctggagggtgaagtggaaaaaagaaagcacgctatcgaagaggcaaaggcccaagcccggggcctgttgcctgggggcacacaggtgctggatggtacctcggggttctctcctgcccccaagctggtggaatcccccaaagaaggtaaagggagcaagccttccccactgtctgtgaagaacaccaagaggaggctggagggcgccaagaaagccaaggcggacagccccgtgaacggcttgccaaaggggcgagagagtcggagtcggagccggagccgtgagcagagctactcgaggtccccatcccgatcagcgtctcctaagaggaggaaaagtgacagcggctccacatctggtgggtccaagtcgcagagccgctcccggagcaggagtgactccccaccgagacaggccccccgcagcgctccctacaaaggctctgagattcggggctcccggaagtccaaggactgcaagtacccccagaagccacacaagtctcggagccggagttcttcccgttctcgaagcaggtcacgggagcgggcggataatccgggaaaatacaagaagaaaagtcattactacagagatcagcgacgagagcgctcgaggtcgtatgaacgcacaggccgtcgctatgagcgggaccaccctgggcacagcaggcatcggaggtgaggcggggttgcagtgactggtggccgcaagcccttccctggggagtacctgatggctgccctttgacccccggtggctgccctttgacccccgggtgtgctctcagcgcaagtggtcctagaacaggattctttttggaaatgtctgtcgactggaccttggtggatttggaaatggaactgagggaccggtgacacgtgcttcagaccggtctggggtgcggcgcacacctgggcccgtgcagggctcagctcggcagcagctctgagggcagctcaatgaaaaagtgaatgcacacgcccttgttggcgtggcctggcatggcctggtgctatcggcagccgctctccactccccgactgatactcaattacgtgaagccaagaaagatgatttttagaacctttgcctatattaggttgtacttatgtacatattttgcagtgtttcacaggagaaagtggccttaactgccccttattctctctccacgttgtaaataaacatgtgtttaatacaagttaaagctatgtatgaaaactcagaacttgaatcccgtcagcttaaaacttgtgtagggaatcctgacttttaaaatgtgagggtatttggatctgtgttgaaagtcgtatatttttatctgtgcggtgctgagtgcaggccaccagctcctaaatagaggttccctatatgcgcgtatgacatggtgaataaacacaactctctccactcaggacatccggagcgttatggacgtggtaggtggtcgttctgtgtgcttgtgaaagtgtccaggcgtgtgcacagccagtgcgcccacttccgggctccttgctccctgctgtactgaagttttggattttgcatccaatcctgtgtgcctgcccttctgccgaaggcttgtgaggggcctgagtcctctgcccatcaggatgacaggctccttcctgcagggccataggagggaagttttggaaacacagaatgattccaaggtgctctcgttcctgagggggactggtttgtaacccatgacatctgtgggcgagagaggcagctgggagcaggacacttggagggtcaccccacgggggtggcacctgcactctgagtgccccccactgtcatcagctgcctcttaccgtggacacagttttggttttggggactagggggccccactcctggtggtaccgtttggacttactagggcagtgggacatataggccggggctagtgggataacggggagttacgcctgatgacttttttgatggaatcctgcattagatagctggtgggacccccccctcagaattggggaactgaggagactccagggagggtgtccttccagggagagcagctatgaggggccccctagcttcctgtgcctggaagtaagagaaccagtaaagggccatacacacctgtacccaagagaccgctctccatttgctttctttttttactaaataattgtaaaatattattatgacataaagaaccatttaaggccaaaaaaaaaaaaaaaaaaaaaaaaaaaaaaaaaaaaannnnntcgaggtcgggcttgggaagggtcagcgggaggcctgagggcgccgggcgctgcggcaggcgggcccggggtccagccgagagggtccgggcgccaggcaacgcgattcgcgcgggggtgaacccggggagggggccggcctccccgttctgggacctttcgctcccctgggacctgtggccgccgcccacagaccatgctcctggggcgcctgacttcccagctgttgagggccgttccttgggcaggtaggaagccccgcgggggcggatgggaggatgcacacctggttaggagtgcgggtctcagcagctccgctggggcagggccggtggccacacacacactctttcccctctaagcttccgatgctcacagagggaacctcaggggttcaggccaggaatgaggtgcgggggatcctcgctgggacgaacctgctgctcctcaacccgacgggcctgtgtggtctcgcgagcggtgaccgtggcgtctggttttctgcaggcggccgcccgccttggcccgtctctggagtgctgggcagccgggtctgcgggcccctttacagcacatcgccggccggcccaggtagggcggcctctctccctcgcaagggggcccagctggagctggaggagatgctggtccccaggaagatgtccgtcagccccctggagagctggctcacggcccgctgcttcctgcccagactggataccgggaccgcagggactgtggctccaccgcaatcctaccagtgtccgcccagccagatagggggcccgttgctgctgtgatccgtagtaataaattctcagaggactcagcc

SEQ ID NO: 306734 - DNA, 4292 bp, Homo sapiens
  misc_feature (3393)..(3397): n is a, c, g, or t
gggagtcggcggcacaaaatggcggcggcggcggcggcggctggtgctgcagggtcggcagctcccgcggcagcggccggcgccccgggatctgggggcgcaccctcagggtcgcagggggtgctgatcggggacaggctgtactccggggtgctcatcaccttggagaactgcctcctgcctgacgacaagctccgtttcacgccgtccatgtcgagcggcctcgacaccgacacagagaccgacctccgcgtggtgggctgcgagctcatccaggcggccggtatcctgctccgcctgccgcaggtggccatggctaccgggcaggtgttgttccagcggttcttttataccaagtccttcgtgaagcactccatggaggtaaggcttcctcctgcacttcattcccagcgaagtatgttgagggtaaaacggtttgttactttgcccggttactaagggagtgagtacttgccccccagtctgagctctgtgccggagggttctgtttcttgactttttttttcccctgggtgcacctcccttttggtctgaatagccctcaagcctttggcggccgtcaggacgccgtggctggggacaaacatgggcgtgttgcaatgcttccgcttcagcatgtgtcaatggcctgtgtccacctggcttccaagatagaagaggccccaagacgcatacgggacgtcatcaatgtgtttcaccgccttcgacagctgagagacaaaaagaagcccgtgcctctactactggatcaagattatgttaatttaaagaaccaaattataaaggcggaaagacgagttctcaaagagttgggtttctgcgtccatgtgaagcatcctcataagataatcgttatgtaccttcaggtgttagagtgtgagcgtaaccaacacctggtccagacctcatggaattacatgaacgacagccttcgcaccgacgtcttcgtgcggttccagccagagagcatcgcctgtgcctgcatttatcttgctgcccggacgctggagatccctttgcccaatcgtccccattggtttcttttgtttggagcaactgaagaagaaattcaggaaatctgcttaaagatcttgcagctttatgctcggaaaaaggttgatctcacacacctggagggtgaagtggaaaaaagaaagcacgctatcgaagaggcaaaggcccaagcccggggcctgttgcctgggggcacacaggtgctggatggtacctcggggttctctcctgcccccaagctggtggaatcccccaaagaaggtaaagggagcaagccttccccactgtctgtgaagaacaccaagaggaggctggagggcgccaagaaagccaaggcggacagccccgtgaacggcttgccaaaggggcgagagagtcggagtcggagccggagccgtgagcagagctactcgaggtccccatcccgatcagcgtctcctaagaggaggaaaagtgacagcggctccacatctggtgggtccaagtcgcagagccgctcccggagcaggagtgactccccaccgagacaggccccccgcagcgctccctacaaaggctctgagattcggggctcccggaagtccaaggactgcaagtacccccagaagccacacaagtctcggagccggagttcttcccgttctcgaagcaggtcacgggagcgggcggataatccgggaaaatacaagaagaaaagtcattactacagagatcagcgacgagagcgctcgaggtcgtatgaacgcacaggccgtcgctatgagcgggaccaccctgggcacagcaggcatcggaggtgaggcggggttgcagtgactggtggccgcaagcccttccctggggagtacctgatggctgccctttgacccccggtggctgccctttgacccccgggtgtgctctcagcgcaagtggtcctagaacaggattctttttggaaatgtctgtcgactggaccttggtggatttggaaatggaactgagggaccggtgacacgtgcttcagaccggtctggggtgcggcgcacacctgggcccgtgcagggctcagctcggcagcagctctgagggcagctcaatgaaaaagtgaatgcacacgcccttgttggcgtggcctggcatggcctggtgctatcggcagccgctctccactccccgactgatactcaattacgtgaagccaagaaagatgatttttagaacctttgcctatattaggttgtacttatgtacatattttgcagtgtttcacaggagaaagtggccttaactgccccttattctctctccacgttgtaaataaacatgtgtttaatacaagttaaagctatgtatgaaaactcagaacttgaatcccgtcagcttaaaacttgtgtagggaatcctgacttttaaaatgtgagggtatttggatctgtgttgaaagtcgtatatttttatctgtgcggtgctgagtgcaggccaccagctcctaaatagaggttccctatatgcgcgtatgacatggtgaataaacacaactctctccactcaggacatccggagcgttatggacgtggtaggtggtcgttctgtgtgcttgtgaaagtgtccaggcgtgtgcacagccagtgcgcccacttccgggctccttgctccctgctgtactgaagttttggattttgcatccaatcctgtgtgcctgcccttctgccgaaggcttgtgaggggcctgagtcctctgcccatcaggatgacaggctccttcctgcagggccataggagggaagttttggaaacacagaatgattccaaggtgctctcgttcctgagggggactggtttgtaacccatgacatctgtgggcgagagaggcagctgggagcaggacacttggagggtcaccccacgggggtggcacctgcactctgagtgccccccactgtcatcagctgcctcttaccgtggacacagttttggttttggggactagggggccccactcctggtggtaccgtttggacttactagggcagtgggacatataggccggggctagtgggataacggggagttacgcctgatgacttttttgatggaatcctgcattagatagctggtgggacccccccctcagaattggggaactgaggagactccagggagggtgtccttccagggagagcagctatgaggggccccctagcttcctgtgcctggaagtaagagaaccagtaaagggccatacacacctgtacccaagagaccgctctccatttgctttctttttttactaaataattgtaaaatattattatgacataaagaaccatttaaggccaaaaaaaaaaaaaaaaaaaaaaaaaaaaaaaaaaaaannnnntcgaggtcgggcttgggaagggtcagcgggaggcctgagggcgccgggcgctgcggcaggcgggcccggggtccagccgagagggtccgggcgccaggcaacgcgattcgcgcgggggtgaacccggggagggggccggcctccccgttctgggacctttcgctcccctgggacctgtggccgccgcccacagaccatgctcctggggcgcctgacttcccagctgttgagggccgttccttgggcaggtaggaagccccgcgggggcggatgggaggatgcacacctggttaggagtgcgggtctcagcagctccgctggggcagggccggtggccacacacacactctttcccctctaagcttccgatgctcacagagggaacctcaggggttcaggccaggaatgaggtgcgggggatcctcgctgggacgaacctgctgctcctcaacccgacgggcctgtgtggtctcgcgagcggtgaccgtggcgtctggttttctgcaggcggccgcccgccttggcccgtctctggagtgctgggcagccgggtctgcgggcccctttacagcacatcgccggccggcccaggtagggcggcctctctccctcgcaagggggcccagctggagctggaggagatgctggtccccaggaagatgtccgtcagccccctggagagctggctcacggcccgctgcttcctgcccagactggataccgggaccgcagggactgtggctccaccgcaatcctaccagtgtccgcccagccagataggggccgaaggctggcagacccccaagatctacctgcggggcaaatgagtctggcgccgcccttcccgcccgttgctgctgtgatccgtagtaataaattctcagaggactcagcc

SEQ ID NO: 306735 - DNA, 3899 bp, Homo sapiens
  misc_feature (3393)..(3397): n is a, c, g, or t
gggagtcggcggcacaaaatggcggcggcggcggcggcggctggtgctgcagggtcggcagctcccgcggcagcggccggcgccccgggatctgggggcgcaccctcagggtcgcagggggtgctgatcggggacaggctgtactccggggtgctcatcaccttggagaactgcctcctgcctgacgacaagctccgtttcacgccgtccatgtcgagcggcctcgacaccgacacagagaccgacctccgcgtggtgggctgcgagctcatccaggcggccggtatcctgctccgcctgccgcaggtggccatggctaccgggcaggtgttgttccagcggttcttttataccaagtccttcgtgaagcactccatggaggtaaggcttcctcctgcacttcattcccagcgaagtatgttgagggtaaaacggtttgttactttgcccggttactaagggagtgagtacttgccccccagtctgagctctgtgccggagggttctgtttcttgactttttttttcccctgggtgcacctcccttttggtctgaatagccctcaagcctttggcggccgtcaggacgccgtggctggggacaaacatgggcgtgttgcaatgcttccgcttcagcatgtgtcaatggcctgtgtccacctggcttccaagatagaagaggccccaagacgcatacgggacgtcatcaatgtgtttcaccgccttcgacagctgagagacaaaaagaagcccgtgcctctactactggatcaagattatgttaatttaaagaaccaaattataaaggcggaaagacgagttctcaaagagttgggtttctgcgtccatgtgaagcatcctcataagataatcgttatgtaccttcaggtgttagagtgtgagcgtaaccaacacctggtccagacctcatggaattacatgaacgacagccttcgcaccgacgtcttcgtgcggttccagccagagagcatcgcctgtgcctgcatttatcttgctgcccggacgctggagatccctttgcccaatcgtccccattggtttcttttgtttggagcaactgaagaagaaattcaggaaatctgcttaaagatcttgcagctttatgctcggaaaaaggttgatctcacacacctggagggtgaagtggaaaaaagaaagcacgctatcgaagaggcaaaggcccaagcccggggcctgttgcctgggggcacacaggtgctggatggtacctcggggttctctcctgcccccaagctggtggaatcccccaaagaaggtaaagggagcaagccttccccactgtctgtgaagaacaccaagaggaggctggagggcgccaagaaagccaaggcggacagccccgtgaacggcttgccaaaggggcgagagagtcggagtcggagccggagccgtgagcagagctactcgaggtccccatcccgatcagcgtctcctaagaggaggaaaagtgacagcggctccacatctggtgggtccaagtcgcagagccgctcccggagcaggagtgactccccaccgagacaggccccccgcagcgctccctacaaaggctctgagattcggggctcccggaagtccaaggactgcaagtacccccagaagccacacaagtctcggagccggagttcttcccgttctcgaagcaggtcacgggagcgggcggataatccgggaaaatacaagaagaaaagtcattactacagagatcagcgacgagagcgctcgaggtcgtatgaacgcacaggccgtcgctatgagcgggaccaccctgggcacagcaggcatcggaggtgaggcggggttgcagtgactggtggccgcaagcccttccctggggagtacctgatggctgccctttgacccccggtggctgccctttgacccccgggtgtgctctcagcgcaagtggtcctagaacaggattctttttggaaatgtctgtcgactggaccttggtggatttggaaatggaactgagggaccggtgacacgtgcttcagaccggtctggggtgcggcgcacacctgggcccgtgcagggctcagctcggcagcagctctgagggcagctcaatgaaaaagtgaatgcacacgcccttgttggcgtggcctggcatggcctggtgctatcggcagccgctctccactccccgactgatactcaattacgtgaagccaagaaagatgatttttagaacctttgcctatattaggttgtacttatgtacatattttgcagtgtttcacaggagaaagtggccttaactgccccttattctctctccacgttgtaaataaacatgtgtttaatacaagttaaagctatgtatgaaaactcagaacttgaatcccgtcagcttaaaacttgtgtagggaatcctgacttttaaaatgtgagggtatttggatctgtgttgaaagtcgtatatttttatctgtgcggtgctgagtgcaggccaccagctcctaaatagaggttccctatatgcgcgtatgacatggtgaataaacacaactctctccactcaggacatccggagcgttatggacgtggtaggtggtcgttctgtgtgcttgtgaaagtgtccaggcgtgtgcacagccagtgcgcccacttccgggctccttgctccctgctgtactgaagttttggattttgcatccaatcctgtgtgcctgcccttctgccgaaggcttgtgaggggcctgagtcctctgcccatcaggatgacaggctccttcctgcagggccataggagggaagttttggaaacacagaatgattccaaggtgctctcgttcctgagggggactggtttgtaacccatgacatctgtgggcgagagaggcagctgggagcaggacacttggagggtcaccccacgggggtggcacctgcactctgagtgccccccactgtcatcagctgcctcttaccgtggacacagttttggttttggggactagggggccccactcctggtggtaccgtttggacttactagggcagtgggacatataggccggggctagtgggataacggggagttacgcctgatgacttttttgatggaatcctgcattagatagctggtgggacccccccctcagaattggggaactgaggagactccagggagggtgtccttccagggagagcagctatgaggggccccctagcttcctgtgcctggaagtaagagaaccagtaaagggccatacacacctgtacccaagagaccgctctccatttgctttctttttttactaaataattgtaaaatattattatgacataaagaaccatttaaggccaaaaaaaaaaaaaaaaaaaaaaaaaaaaaaaaaaaaannnnntcgaggtcgggcttgggaagggtcagcgggaggcctgagggcgccgggcgctgcggcaggcgggcccggggtccagccgagagggtccgggcgccaggcaacgcgattcgcgcgggggtgaacccggggagggggccggcctccccgttctgggacctttcgaaggggccgagcagggggatgaaggcgtcgcggatgcgcctcaaattcagtgcaaaaacgtgctgaagatccgccggcggaagatgaaccaccacaagtaccggaagctggtgaagaagacgcggttcctgcggaggaaggtccaggagggacgcctgagacgcaagcagatcaagttcgagaaagacctgaggcgcatctggctgaaggcggggctaaaggaagcccccgaaggctggcagacccccaagatctacctgcggggcaaatgagtctggcgccgcccttcccgcccgttgctgctgtgatccgtagtaataaattctcagaggactcagcc

SEQ ID NO: 306736 - DNA, 2571 bp, Homo sapiens
gggagtcggcggcacaaaatggcggcggcggcggcggcggctggtgctgcagggtcggcagctcccgcggcagcggccggcgccccgggatctgggggcgcaccctcagggtcgcagggggtgctgatcggggacaggctgtactccggggtgctcatcaccttggagaactgcctcctgcctgacgacaagctccgtttcacgccgtccatgtcgagcggcctcgacaccgacacagagaccgacctccgcgtggtgggctgcgagctcatccaggcggccggtatcctgctccgcctgccgcaggtggccatggctaccgggcaggtgttgttccagcggttcttttataccaagtccttcgtgaagcactccatggaggtaaggcttcctcctgcacttcattcccagcgaagtatgttgagggtaaaacggtttgttactttgcccggttactaagggagtgagtacttgccccccagtctgagctctgtgccggagggttctgtttcttgactttttttttcccctgggtgcacctcccttttggtctgaatagccctcaagcctttggcggccgtcaggacgccgtggctggggacaaacatgggcgtgttgcaatgcttccgcttcagcatgtgtcaatggcctgtgtccacctggcttccaagatagaagaggccccaagacgcatacgggacgtcatcaatgtgtttcaccgccttcgacagctgagagacaaaaagaagcccgtgcctctactactggatcaagattatgttaatttaaagaaccaaattataaaggcggaaagacgagttctcaaagagttgggtttctgcgtccatgtgaagcatcctcataagataatcgttatgtaccttcaggtgttagagtgtgagcgtaaccaacacctggtccagacctcatggaattacatgaacgacagccttcgcaccgacgtcttcgtgcggttccagccagagagcatcgcctgtgcctgcatttatcttgctgcccggacgctggagatccctttgcccaatcgtccccattggtttcttttgtttggagcaactgaagaagaaattcaggaaatctgcttaaagatcttgcagctttatgctcggaaaaaggttgatctcacacacctggagggtgaagtggaaaaaagaaagcacgctatcgaagaggcaaaggcccaagcccggggcctgttgcctgggggcacacaggtgctggatggtacctcggggttctctcctgcccccaagctggtggaatcccccaaagaaggtaaagggagcaagccttccccactgtctgtgaagaacaccaagaggaggctggagggcgccaagaaagccaaggcggacagccccgtgaacggcttgccaaaggggcgagagagtcggagtcggagccggagccgtgagcagagctactcgaggtccccatcccgatcagcgtctcctaagaggaggaaaagtgacagcggctccacatctggtgggtccaagtcgcagagccgctcccggagcaggagtgactccccaccgagacaggccccccgcagcgctccctacaaaggctctgagattcggggctcccggaagtccaaggactgcaagtacccccagaagccacacaagtctcggagccggagttcttcccgttctcgaagcaggtcacgggagcgggcggataatccgggaaaatacaagaagaaaagtcattactacagagatcagcgacgagagcgctcgaggtcgtatgaacgcacaggccgtcgctatgagcgggaccaccctgggcacagcaggcatcggaggtgaggcggggttgcagtgactggtggccgcaagcccttccctggggagtacctgatggctgccctttgacccccggtggctgccctttgacccccgggtgtgctctcagcgcaagtggtcctagaacaggattctttttggaaatgtctgtcgactggaccttggtggatttggaaatggaactgagggaccggtgacacgtgcttcagaccggtctggggtgcggcgcacacctgggcccgtgcagggctcagctcggcagcagctctgagggcagctcaatgaaaaagtgaatgcacacgcccttgttggcgtggcctggcatggcctggtgctatcggcagccgctctccactccccgactgatactcaattacgtgaagccaagaaagatgatttttagaacctttgcctatattaggttgtacttatgtacatattttgcagtgtttcacaggagaaagtggccttaactgccccttattctctctccacgttgtaaataaacatgtgtttaatacaagttaaagctatgtatgaaaactcagaacttgaatcccgtcagcttaaaacttgtgtagggaatcctgacttttaaaatgtgagggtatttggatctgtgttgaaagtcgtatatttttatctgtgcggtgctgagtgcaggccaccagctcctaaatagaggttccctatatgcgcgtatgacatggtgaataaacacaactctctccactcagga

SEQ ID NO: 306737 - DNA, 2359 bp, Homo sapiens
gggagtcggcggcacaaaatggcggcggcggcggcggcggctggtgctgcagggtcggcagctcccgcggcagcggccggcgccccgggatctgggggcgcaccctcagggtcgcagggggtgctgatcggggacaggctgtactccggggtgctcatcaccttggagaactgcctcctgcctgacgacaagctccgtttcacgccgtccatgtcgagcggcctcgacaccgacacagagaccgacctccgcgtggtgggctgcgagctcatccaggcggccggtatcctgctccgcctgccgcaggtggccatggctaccgggcaggtgttgttccagcggttcttttataccaagtccttcgtgaagcactccatggaggtaaggcttcctcctgcacttcattcccagcgaagtatgttgagggtaaaacggtttgttactttgcccggttactaagggagtgagtacttgccccccagtctgagctctgtgccggagggttctgtttcttgactttttttttcccctgggtgcacctcccttttggtctgaatagccctcaagcctttggcggccgtcaggacgccgtggctggggacaaacatgggcgtgttgcaatgcttccgcttcagcatgtgtcaatggcctgtgtccacctggcttccaagatagaagaggccccaagacgcatacgggacgtcatcaatgtgtttcaccgccttcgacagctgagagacaaaaagaagcccgtgcctctactactggatcaagattatgttaatttaaagaaccaaattataaaggcggaaagacgagttctcaaagagttgggtttctgcgtccatgtgaagcatcctcataagataatcgttatgtaccttcaggtgttagagtgtgagcgtaaccaacacctggtccagacctcatggaattacatgaacgacagccttcgcaccgacgtcttcgtgcggttccagccagagagcatcgcctgtgcctgcatttatcttgctgcccggacgctggagatccctttgcccaatcgtccccattggtttcttttgtttggagcaactgaagaagaaattcaggaaatctgcttaaagatcttgcagctttatgctcggaaaaaggttgatctcacacacctggagggtgaagtggaaaaaagaaagcacgctatcgaagaggcaaaggcccaagcccggggcctgttgcctgggggcacacaggtgctggatggtacctcggggttctctcctgcccccaagctggtggaatcccccaaagaaggtaaagggagcaagccttccccactgtctgtgaagaacaccaagaggaggctggagggcgccaagaaagccaaggcggacagccccgtgaacggcttgccaaaggggcgagagagtcggagtcggagccggagccgtgagcagagctactcgaggtccccatcccgatcagcgtctcctaagaggaggaaaagtgacagcggctccacatctggtgggtccaagtcgcagagccgctcccggagcaggagtgactccccaccgagacaggccccccgcagcgctccctacaaaggctctgagattcggggctcccggaagtccaaggactgcaagtacccccagaagccacacaagtctcggagccggagttcttcccgttctcgaagcaggtcacgggagcgggcggataatccgggaaaatacaagaagaaaagtcattactacagagatcagcgacgagagcgctcgaggtcgtatgaacgcacaggccgtcgctatgagcgggaccaccctgggcacagcaggcatcggaggtgaggcggggttgcagtgactggtggccgcaagcccttccctggggagtacctgatggctgccctttgacccccggtggctgccctttgacccccgggtgtgctctcagcgcaagtggtcctagaacaggattctttttggaaatgtctgtcgactggaccttggtggatttggaaatggaactgagggaccggtgacacgtgcttcagaccggtctggggtgcggcgcacacctgggcccgtgcagggctcagctcggcagcagctctgagggcagctcaatgaaaaagtgaatgcacacgcccttgttggcgtggcctggcatggcctggtgctatcggcagccgctctccactccccgactgatactcaattacgtgaagccaagaaagatgatttttagaacctttgcctatattaggttgtacttatgtacatattttgcagtgtttcacaggagaaagtggccttaactgccccttattctctctccacgttgtaaataaacatgtgtttaatacaagtta

SEQ ID NO: 306738 - DNA, 3356 bp, Homo sapiens
gggagtcggcggcacaaaatggcggcggcggcggcggcggctggtgctgcagggtcggcagctcccgcggcagcggccggcgccccgggatctgggggcgcaccctcagggtcgcagggggtgctgatcggggacaggctgtactccggggtgctcatcaccttggagaactgcctcctgcctgacgacaagctccgtttcacgccgtccatgtcgagcggcctcgacaccgacacagagaccgacctccgcgtggtgggctgcgagctcatccaggcggccggtatcctgctccgcctgccgcaggtggccatggctaccgggcaggtgttgttccagcggttcttttataccaagtccttcgtgaagcactccatggaggtaaggcttcctcctgcacttcattcccagcgaagtatgttgagggtaaaacggtttgttactttgcccggttactaagggagtgagtacttgccccccagtctgagctctgtgccggagggttctgtttcttgactttttttttcccctgggtgcacctcccttttggtctgaatagccctcaagcctttggcggccgtcaggacgccgtggctggggacaaacatgggcgtgttgcaatgcttccgcttcagcatgtgtcaatggcctgtgtccacctggcttccaagatagaagaggccccaagacgcatacgggacgtcatcaatgtgtttcaccgccttcgacagctgagagacaaaaagaagcccgtgcctctactactggatcaagattatgttaatttaaagaaccaaattataaaggcggaaagacgagttctcaaagagttgggtttctgcgtccatgtgaagcatcctcataagataatcgttatgtaccttcaggtgttagagtgtgagcgtaaccaacacctggtccagacctcatggaattacatgaacgacagccttcgcaccgacgtcttcgtgcggttccagccagagagcatcgcctgtgcctgcatttatcttgctgcccggacgctggagatccctttgcccaatcgtccccattggtttcttttgtttggagcaactgaagaagaaattcaggaaatctgcttaaagatcttgcagctttatgctcggaaaaaggttgatctcacacacctggagggtgaagtggaaaaaagaaagcacgctatcgaagaggcaaaggcccaagcccggggcctgttgcctgggggcacacaggtgctggatggtacctcggggttctctcctgcccccaagctggtggaatcccccaaagaaggtaaagggagcaagccttccccactgtctgtgaagaacaccaagaggaggctggagggcgccaagaaagccaaggcggacagccccgtgaacggcttgccaaaggggcgagagagtcggagtcggagccggagccgtgagcagagctactcgaggtccccatcccgatcagcgtctcctaagaggaggaaaagtgacagcggctccacatctggtgggtccaagtcgcagagccgctcccggagcaggagtgactccccaccgagacaggccccccgcagcgctccctacaaaggctctgagattcggggctcccggaagtccaaggactgcaagtacccccagaagccacacaagtctcggagccggagttcttcccgttctcgaagcaggtcacgggagcgggcggataatccgggaaaatacaagaagaaaagtcattactacagagatcagcgacgagagcgctcgaggtcgtatgaacgcacaggccgtcgctatgagcgggaccaccctgggcacagcaggcatcggaggtgaggcggggttgcagtgactggtggccgcaagcccttccctggggagtacctgatggctgccctttgacccccggtggctgccctttgacccccgggtgtgctctcagcgcaagtggtcctagaacaggattctttttggaaatgtctgtcgactggaccttggtggatttggaaatggaactgagggaccggtgacacgtgcttcagaccggtctggggtgcggcgcacacctgggcccgtgcagggctcagctcggcagcagctctgagggcagctcaatgaaaaagtgaatgcacacgcccttgttggcgtggcctggcatggcctggtgctatcggcagccgctctccactccccgactgatactcaattacgtgaagccaagaaagatgatttttagaacctttgcctatattaggttgtacttatgtacatattttgcagtgtttcacaggagaaagtggccttaactgccccttattctctctccacgttgtaaataaacatgtgtttaatacaagttaaagctatgtatgaaaactcagaacttgaatcccgtcagcttaaaacttgtgtagggaatcctgacttttaaaatgtgagggtatttggatctgtgttgaaagtcgtatatttttatctgtgcggtgctgagtgcaggccaccagctcctaaatagaggttccctatatgcgcgtatgacatggtgaataaacacaactctctccactcaggacatccggagcgttatggacgtggtaggtggtcgttctgtgtgcttgtgaaagtgtccaggcgtgtgcacagccagtgcgcccacttccgggctccttgctccctgctgtactgaagttttggattttgcatccaatcctgtgtgcctgcccttctgccgaaggcttgtgaggggcctgagtcctctgcccatcaggatgacaggctccttcctgcagggccataggagggaagttttggaaacacagaatgattccaaggtgctctcgttcctgagggggactggtttgtaacccatgacatctgtgggcgagagaggcagctgggagcaggacacttggagggtcaccccacgggggtggcacctgcactctgagtgccccccactgtcatcagctgcctcttaccgtggacacagttttggttttggggactagggggccccactcctggtggtaccgtttggacttactagggcagtgggacatataggccggggctagtgggataacggggagttacgcctgatgacttttttgatggaatcctgcattagatagctggtgggacccccccctcagaattggggaactgaggagactccagggagggtgtccttccagggagagcagctatgaggggccccctagcttcctgtgcctggaagtaagagaaccagtaaagggccatacacacctgtacccaagagaccgctctccatttgctttctttttttactaaataattgtaaaatattattatgacataaagaaccatttaaggcca

SEQ ID NO: 306739 - DNA, 3581 bp, Homo sapiens
  misc_feature (3393)..(3397): n is a, c, g, or t
gggagtcggcggcacaaaatggcggcggcggcggcggcggctggtgctgcagggtcggcagctcccgcggcagcggccggcgccccgggatctgggggcgcaccctcagggtcgcagggggtgctgatcggggacaggctgtactccggggtgctcatcaccttggagaactgcctcctgcctgacgacaagctccgtttcacgccgtccatgtcgagcggcctcgacaccgacacagagaccgacctccgcgtggtgggctgcgagctcatccaggcggccggtatcctgctccgcctgccgcaggtggccatggctaccgggcaggtgttgttccagcggttcttttataccaagtccttcgtgaagcactccatggaggtaaggcttcctcctgcacttcattcccagcgaagtatgttgagggtaaaacggtttgttactttgcccggttactaagggagtgagtacttgccccccagtctgagctctgtgccggagggttctgtttcttgactttttttttcccctgggtgcacctcccttttggtctgaatagccctcaagcctttggcggccgtcaggacgccgtggctggggacaaacatgggcgtgttgcaatgcttccgcttcagcatgtgtcaatggcctgtgtccacctggcttccaagatagaagaggccccaagacgcatacgggacgtcatcaatgtgtttcaccgccttcgacagctgagagacaaaaagaagcccgtgcctctactactggatcaagattatgttaatttaaagaaccaaattataaaggcggaaagacgagttctcaaagagttgggtttctgcgtccatgtgaagcatcctcataagataatcgttatgtaccttcaggtgttagagtgtgagcgtaaccaacacctggtccagacctcatggaattacatgaacgacagccttcgcaccgacgtcttcgtgcggttccagccagagagcatcgcctgtgcctgcatttatcttgctgcccggacgctggagatccctttgcccaatcgtccccattggtttcttttgtttggagcaactgaagaagaaattcaggaaatctgcttaaagatcttgcagctttatgctcggaaaaaggttgatctcacacacctggagggtgaagtggaaaaaagaaagcacgctatcgaagaggcaaaggcccaagcccggggcctgttgcctgggggcacacaggtgctggatggtacctcggggttctctcctgcccccaagctggtggaatcccccaaagaaggtaaagggagcaagccttccccactgtctgtgaagaacaccaagaggaggctggagggcgccaagaaagccaaggcggacagccccgtgaacggcttgccaaaggggcgagagagtcggagtcggagccggagccgtgagcagagctactcgaggtccccatcccgatcagcgtctcctaagaggaggaaaagtgacagcggctccacatctggtgggtccaagtcgcagagccgctcccggagcaggagtgactccccaccgagacaggccccccgcagcgctccctacaaaggctctgagattcggggctcccggaagtccaaggactgcaagtacccccagaagccacacaagtctcggagccggagttcttcccgttctcgaagcaggtcacgggagcgggcggataatccgggaaaatacaagaagaaaagtcattactacagagatcagcgacgagagcgctcgaggtcgtatgaacgcacaggccgtcgctatgagcgggaccaccctgggcacagcaggcatcggaggtgaggcggggttgcagtgactggtggccgcaagcccttccctggggagtacctgatggctgccctttgacccccggtggctgccctttgacccccgggtgtgctctcagcgcaagtggtcctagaacaggattctttttggaaatgtctgtcgactggaccttggtggatttggaaatggaactgagggaccggtgacacgtgcttcagaccggtctggggtgcggcgcacacctgggcccgtgcagggctcagctcggcagcagctctgagggcagctcaatgaaaaagtgaatgcacacgcccttgttggcgtggcctggcatggcctggtgctatcggcagccgctctccactccccgactgatactcaattacgtgaagccaagaaagatgatttttagaacctttgcctatattaggttgtacttatgtacatattttgcagtgtttcacaggagaaagtggccttaactgccccttattctctctccacgttgtaaataaacatgtgtttaatacaagttaaagctatgtatgaaaactcagaacttgaatcccgtcagcttaaaacttgtgtagggaatcctgacttttaaaatgtgagggtatttggatctgtgttgaaagtcgtatatttttatctgtgcggtgctgagtgcaggccaccagctcctaaatagaggttccctatatgcgcgtatgacatggtgaataaacacaactctctccactcaggacatccggagcgttatggacgtggtaggtggtcgttctgtgtgcttgtgaaagtgtccaggcgtgtgcacagccagtgcgcccacttccgggctccttgctccctgctgtactgaagttttggattttgcatccaatcctgtgtgcctgcccttctgccgaaggcttgtgaggggcctgagtcctctgcccatcaggatgacaggctccttcctgcagggccataggagggaagttttggaaacacagaatgattccaaggtgctctcgttcctgagggggactggtttgtaacccatgacatctgtgggcgagagaggcagctgggagcaggacacttggagggtcaccccacgggggtggcacctgcactctgagtgccccccactgtcatcagctgcctcttaccgtggacacagttttggttttggggactagggggccccactcctggtggtaccgtttggacttactagggcagtgggacatataggccggggctagtgggataacggggagttacgcctgatgacttttttgatggaatcctgcattagatagctggtgggacccccccctcagaattggggaactgaggagactccagggagggtgtccttccagggagagcagctatgaggggccccctagcttcctgtgcctggaagtaagagaaccagtaaagggccatacacacctgtacccaagagaccgctctccatttgctttctttttttactaaataattgtaaaatattattatgacataaagaaccatttaaggccaaaaaaaaaaaaaaaaaaaaaaaaaaaaaaaaaaaaannnnnaaaaaaaaaaaaaaaaaaaaaaaaaaaaaaaaaaaaaaaaaagccgggggatttatattgttgggggggggaaaagagagaggttaagtgaaaggggccaagtgggccaaagggtgtgttccctgtgaccccaagtttttctgtgtgttccaaagagggggaaaattttgccgggttcccctta

SEQ ID NO: 306740 - DNA, 3498 bp, Homo sapiens
  misc_feature (3498)..(3498): n is a, c, g, or t
gggagtcggcggcacaaaatggcggcggcggcggcggcggctggtgctgcagggtcggcagctcccgcggcagcggccggcgccccgggatctgggggcgcaccctcagggtcgcagggggtgctgatcggggacaggctgtactccggggtgctcatcaccttggagaactgcctcctgcctgacgacaagctccgtttcacgccgtccatgtcgagcggcctcgacaccgacacagagaccgacctccgcgtggtgggctgcgagctcatccaggcggccggtatcctgctccgcctgccgcaggtggccatggctaccgggcaggtgttgttccagcggttcttttataccaagtccttcgtgaagcactccatggaggtaaggcttcctcctgcacttcattcccagcgaagtatgttgagggtaaaacggtttgttactttgcccggttactaagggagtgagtacttgccccccagtctgagctctgtgccggagggttctgtttcttgactttttttttcccctgggtgcacctcccttttggtctgaatagccctcaagcctttggcggccgtcaggacgccgtggctggggacaaacatgggcgtgttgcaatgcttccgcttcagcatgtgtcaatggcctgtgtccacctggcttccaagatagaagaggccccaagacgcatacgggacgtcatcaatgtgtttcaccgccttcgacagctgagagacaaaaagaagcccgtgcctctactactggatcaagattatgttaatttaaagaaccaaattataaaggcggaaagacgagttctcaaagagttgggtttctgcgtccatgtgaagcatcctcataagataatcgttatgtaccttcaggtgttagagtgtgagcgtaaccaacacctggtccagacctcatggaattacatgaacgacagccttcgcaccgacgtcttcgtgcggttccagccagagagcatcgcctgtgcctgcatttatcttgctgcccggacgctggagatccctttgcccaatcgtccccattggtttcttttgtttggagcaactgaagaagaaattcaggaaatctgcttaaagatcttgcagctttatgctcggaaaaaggttgatctcacacacctggagggtgaagtggaaaaaagaaagcacgctatcgaagaggcaaaggcccaagcccggggcctgttgcctgggggcacacaggtgctggatggtacctcggggttctctcctgcccccaagctggtggaatcccccaaagaaggtaaagggagcaagccttccccactgtctgtgaagaacaccaagaggaggctggagggcgccaagaaagccaaggcggacagccccgtgaacggcttgccaaaggggcgagagagtcggagtcggagccggagccgtgagcagagctactcgaggtccccatcccgatcagcgtctcctaagaggaggaaaagtgacagcggctccacatctggtgggtccaagtcgcagagccgctcccggagcaggagtgactccccaccgagacaggccccccgcagcgctccctacaaaggctctgagattcggggctcccggaagtccaaggactgcaagtacccccagaagccacacaagtctcggagccggagttcttcccgttctcgaagcaggtcacgggagcgggcggataatccgggaaaatacaagaagaaaagtcattactacagagatcagcgacgagagcgctcgaggtcgtatgaacgcacaggccgtcgctatgagcgggaccaccctgggcacagcaggcatcggaggtgaggcggggttgcagtgactggtggccgcaagcccttccctggggagtacctgatggctgccctttgacccccggtggctgccctttgacccccgggtgtgctctcagcgcaagtggtcctagaacaggattctttttggaaatgtctgtcgactggaccttggtggatttggaaatggaactgagggaccggtgacacgtgcttcagaccggtctggggtgcggcgcacacctgggcccgtgcagggctcagctcggcagcagctctgagggcagctcaatgaaaaagtgaatgcacacgcccttgttggcgtggcctggcatggcctggtgctatcggcagccgctctccactccccgactgatactcaattacgtgaagccaagaaagatgatttttagaacctttgcctatattaggttgtacttatgtacatattttgcagtgtttcacaggagaaagtggccttaactgccccttattctctctccacgttgtaaataaacatgtgtttaatacaagttaaagctatgtatgaaaactcagaacttgaatcccgtcagcttaaaacttgtgtagggaatcctgacttttaaaatgtgagggtatttggatctgtgttgaaagtcgtatatttttatctgtgcggtgctgagtgcaggccaccagctcctaaatagaggttccctatatgcgcgtatgacatggtgaataaacacaactctctccactcaggacatccggagcgttatggacgtggtaggtggtcgttctgtgtgcttgtgaaagtgtccaggcgtgtgcacagccagtgcgcccacttccgggctccttgctccctgctgtactgaagttttggattttgcatccaatcctgtgtgcctgcccttctgccgaaggcttgtgaggggcctgagtcctctgcccatcaggatgacaggctccttcctgcagggccataggagggaagttttggaaacacagaatgattccaaggtgctctcgttcctgagggggactggtttgtaacccatgacatctgtgggcgagagaggcagctgggagcaggacacttggagggtcaccccacgggggtggcacctgcactctgagtgccccccactgtcatcagctgcctcttaccgtggacacagttttggttttggggactagggggccccactcctggtggtaccgtttggacttactagggcagtgggacatataggccggggctagtgggataacggggagttacgcctgatgacttttttgatggaatcctgcattagatagctggtgggacccccccctcagaattggggaactgaggagactccagggagggtgtccttccagggagagcagctatgaggggccccctagcttcctgtgcctggaagtaagagaaccagtaaagggccatacacacctgtacccaagagaccgctctccatttgctttctttttttactaaataattgtaaaatattattatgacataaagaaccatttaaggccacacaaaaaaaaatcacaacaaacttgacccctcttttctcctaccgtccactctccctctcttctggccccttcccctctaccctctatcatcatatctctccctccccctttctctgttcgcccccccccctttcctctcn

SEQ ID NO: 306741 - DNA, 1247 bp, Homo sapiens
gggagtcggcggcacaaaatggcggcggcggcggcggcggctggtgctgcagggtcggcagctcccgcggcagcggccggcgccccgggatctgggggcgcaccctcagggtcgcagggggtgctgatcggggacaggctgtactccggggtgctcatcaccttggagaactgcctcctgcctgacgacaagctccgtttcacgccgtccatgtcgagcggcctcgacaccgacacagagaccgacctccgcgtggtgggctgcgagctcatccaggcggccggtatcctgctccgcctgccgcaggtggccatggctaccgggcaggtgttgttccagcggttcttttataccaagtccttcgtgaagcactccatggaggtaaggcttcctcctgcacttcattcccagcgaagtatgttgagggtaaaacggtttgttactttgcccggttactaagggagtgagtacttgccccccagtctgagctctgtgccggagggttctgtttcttgactttttttttcccctgggtgcacctcccttttggtctgaatagccctcaagcctttggcggccgtcaggacgccgtggctggggacaaacatgggcgtgttgcaatgcttccgcttcagcatgtgtcaatggcctgtgtccacctggcttccaagatagaagaggccccaagacgcatacgggacgtcatcaatgtgtttcaccgccttcgacagctgagagacaaaaagaagcccgtgcctctactactggatcaagattatgttaatttaaagaaccaaattataaaggcggaaagacgagttctcaaagagttgggtttctgcgtccatgtgaagcatcctcataagataatcgttatgtaccttcaggtgttagagtgtgagcgtaaccaacacctggtccagacctcatggtgagttgagcttccttgttttatgagaccagcaagggcagtgcaggaatgtgttgacttgaggcacttgggcagtgggtaggcagcccagtgacttggttgtgggctggagttgtccgagtgcccagtgctcctgctgtataaattccaatcagactcccaaaatgggcactggcagtcacggtaggtggcccgtcccctccctgcaagcctggacttcctgtgtcccccaccctgaagagagcagtcagtgggcttcctctgggagctgttgacttggcgcagggggaccttttcctggggagggtggagggac

SEQ ID NO: 306742 - DNA, 1169 bp, Homo sapiens
gggagtcggcggcacaaaatggcggcggcggcggcggcggctggtgctgcagggtcggcagctcccgcggcagcggccggcgccccgggatctgggggcgcaccctcagggtcgcagggggtgctgatcggggacaggctgtactccggggtgctcatcaccttggagaactgcctcctgcctgacgacaagctccgtttcacgccgtccatgtcgagcggcctcgacaccgacacagagaccgacctccgcgtggtgggctgcgagctcatccaggcggccggtatcctgctccgcctgccgcaggtggccatggctaccgggcaggtgttgttccagcggttcttttataccaagtccttcgtgaagcactccatggaggtaaggcttcctcctgcacttcattcccagcgaagtatgttgagggtaaaacggtttgttactttgcccggttactaagggagtgagtacttgccccccagtctgagctctgtgccggagggttctgtttcttgactttttttttcccctgggtgcacctcccttttggtctgaatagccctcaagcctttggcggccgtcaggacgccgtggctggggacaaacatgggcgtgttgcaatgcttccgcttcagcatgtgtcaatggcctgtgtccacctggcttccaagatagaagaggccccaagacgcatacgggacgtcatcaatgtgtttcaccgccttcgacagctgagagacaaaaagtgagtcagtcagagctgtctagtctatcatagatgcctattttctttatttctgattaagttacagtaaggcttgtataacacaatacaggcctgaggctctaaacctgtgggatattcatgagcgcagtctcaagctccaccaacagagcctgctctgaggcatcagtagatgctgtttagtaagggcaggggctccagtgaggacagtgcgctgtggcgggtcgcgctggggctggcttcctgctttacccatgtcagtgcacggccctgctgctgcttctgtcccacaagtttctgagtgctctggagcagggaatcttaatctcagcactattgacattcaggctggataatcttttttttcctcctgagacaggtttcctgttgtccagggcagagtgcggtggtatgcatctcggca

SEQ ID NO: 306743 - DNA, 1252 bp, Homo sapiens
gggagtcggcggcacaaaatggcggcggcggcggcggcggctggtgctgcagggtcggcagctcccgcggcagcggccggcgccccgggatctgggggcgcaccctcagggtcgcagggggtgctgatcggggacaggctgtactccggggtgctcatcaccttggagaactgcctcctgcctgacgacaagctccgtttcacgccgtccatgtcgagcggcctcgacaccgacacagagaccgacctccgcgtggtgggctgcgagctcatccaggcggccggtatcctgctccgcctgccgcaggtggccatggctaccgggcaggtgttgttccagcggttcttttataccaagtccttcgtgaagcactccatggaggtaaggcttcctcctgcacttcattcccagcgaagtatgttgagggtaaaacggtttgttactttgcccggttactaagggagtgagtacttgccccccagtctgagctctgtgccggagggttctgtttcttgactttttttttcccctgggtgcacctcccttttggtctgaatagccctcaagcctttggcggccgtcaggacgccgtggctggggacaaacatgggcgtgttgcaatgcttccgcttcagcatgtgtcaatggcctgtgtccacctggcttccaagatagaagaggccccaagacgcatacgggacgtcatcaatgtgtttcaccgccttcgacagctgagagacaaaaagaagcccgtgcctctactactggatcaagattatgttaatttaaagaaccaaattataaaggcggaaagacgagttctcaaagagttgggtttctgcgtccatgtgaagcatcctcataaggtgggtgtgcggctcctgccctgcgagcccgcctaggccgctgctcctgcctggccgcctctctccacctcagtgcagttgaaggctctgaagaggactgagtgcatccctgacttggctttccagtttctatttataatctcaagaatagttcctgacgtattcgtcttctagtgtcagctgtttattttagtaacacatttttaagtgttttggaaatggtattatttaagtttgggctttcaaaaatagtggtgagtttataaatgttgaattttagtttatgttttcctttctctacagttaatttttttttgttttctttttttttgagatggagtttcgctctatcgccaggctggagtgcagtggcatggtggcagtgg

SEQ ID NO: 306744 - DNA, 485 bp, Homo sapiens
gcggccgcccgccttggcccgtctctggagtgctgggcagccgggtctgcgggcccctttacagcacatcgccggccggcccaggtagggcggcctctctccctcgcaagggggcccagctggagctggaggagatgctggtccccaggaagatgtccgtcagccccctggagagctggctcacggcccgctgcttcctgcccagactggataccgggaccgcagggactgtggctccaccgcaatcctaccagtgtccgcccagccagataggggaaggggccgagcagggggatgaaggcgtcgcggatgcgcctcaaattcagtgcaaaaacgtgctgaagatccgccggcggaagatgaaccaccacaagtaccggaagctggtgaagaagacgcggttcctgcggaggaaggtccaggagggacgcctgagacgcaagcaggtgagtggccccctgcttggccctgggagggcaaagtgc

SEQ ID NO: 306745 - DNA, 450 bp, Homo sapiens
ttttgtttggagcaactgaagaagaaattcaggaaatctgcttaaagatcttgcagctttatgctcggaaaaaggttcttcggcattttttcatgtaacgtatgcgtttgtgtttggccagaaacacctggttctgaacggacaccttctggcttttgcaggttgatctcacacacctggagggtgaagtggaaaaaagaaagcacgctatcgaagaggcaaaggcccaagcccggggcctgttgcctgggggcacacaggtgctggatggtacctcggggttctctcctgcccccaagctgggtgagtctgttagagtgcaggaatccactccccacaaaggcaaagactggtgactctcccccgcctccattctggggtatgtgctccttccagacattttttttttttttttttttgagacagggtctctgtcacccaggctggagt

SEQ ID NO: 306746 - DNA, 1179 bp, Homo sapiens
agcggagtgactgaggcggccaagcggctccgggacagggggtacggggggtgggggcgggtggttgcctgcgggaggccgccgcgggtcatgtgaccggaagggctcctcacggacgccgtccctcctcggcgcggcctgagcgcccggcccgaccccggccatggggtgctgctacagcagcgagaacgaggactcggaccaggaccgagaggagcggaagctgctgctggaccctagcagcccccctaccaaagctctcaatggagccgagcccaactaccacagcctgccttccgctcgcactgatgagcaggccctgctctcttccatccttgccaagacagccagcaacatcattgatgtgtctgctgcagactcacagggcatggagcagcatgagtacatggaccgtgccaggcagtacagcacccgcttggctgtgctgagcagcagcctgacccattggaagaagctgccaccgctgccgtctcttaccagccagccccaccaagtgctggccagtgagcccatcccgttctctgatttgcagcaggtctccaggatagctgcttatgcctacagtgcactttctcagatccgtgtggacgcaaaagaggagctggttgtacagtttgggatcccatgaagagaggggtccttggacagctcttctcctctcttcatcccatctctaccccacccccttggcccccagcctcactgcggcttatacagtaccctaacctgctactaatcacagagaaaaatgtgaagaaggaggagaagaggaaggctagaagcctgagcaagtgagggtagaaccttttgggactggcctttgaagctctggccagggatggggtgggggccaaaaggacagagcctggtatgtcttcatagtcattgagaatgtggagataccagtttgggtggggggtgatcaccaggggacctagggagatccccttcccaccctctctgttggcctcagagtcactcctgccccctctccctgacttggtgctcacatgcacctcactagggtttgtgaccagggtctggatgagcttgaatttgaatgaattgagtttgtatttctagaaccctgggtttttacatgtttggtctttttttgttttggtttgtcaccctcgataaaggaagtatattcatcca

SEQ ID NO: 306747 - DNA, 540 bp, Homo sapiens
tgaagagaggagaagagctgtccaaggacccctctcttcatgggatcccaaactgtacaaccagccccttggcccccagcctcactgcggcttatacagtaccctaacctgctactaatcacagagaaaaatgtgaagaaggaggagaagaggaaggctagaagcctgagcaagtgagggtagaaccttttgggactggcctttgaagctctggccagggatggggtgggggccaaaaggacagagcctggtatgtcttcatagtcattgagaatgtggagataccagtttgggtggggggtgatcaccaggggacctagggagatccccttcccaccctctctgttggcctcagagtcactcctgccccctctccctgacttggtgctcacatgcacctcactagggtttgtgaccagggtctggatgagcttgaatttgaatgaattgagtttgtatttctagaaccctgggtttttacatgtttggtctttttttgttttggtttgtcaccctcgataaaggaagtatattcatcca

SEQ ID NO: 306748 - DNA, 473 bp, Homo sapiens
gcaacatatatcaccaaagccagtgaccagtcgcaggtgggtgtggagtttgaggccagcacaaggatgcaggacaccagcgtctctttcgggtaccagctggacctgcccaaggccaacctcctcttcaaaggctctgtggatagcaactggatggggtgggggccaaaaggacagagcctggtatgtcttcatagtcattgagaatgtggagataccagtttgggtggggggtgatcaccaggggacctagggagatccccttcccaccctctctgttggcctcagagtcactcctgccccctctccctgacttggtgctcacatgcacctcactagggtttgtgaccagggtctggatgagcttgaatttgaatgaattgagtttgtatttctagaaccctgggtttttacatgtttggtctttttttgttttggtttgtcaccctcgataaaggaagtatattcatcca

SEQ ID NO: 306749 - DNA, 783 bp, Homo sapiens
agcggagtgactgaggcggccaagcggctccgggacagggggtacggggggtgggggcgggtggttgcctgcgggaggccgccgcgggtcatgtgaccggaagggctcctcacggacgccgtccctcctcggcgcggcctgagcgcccggcccgaccccggccatggggtgctgctacagcagcgagaacgaggactcggaccaggaccgagaggagcggaagctgctgctggaccctagcagcccccctaccaaagctctcaatggagccgagcccaactaccacagcctgccttccgctcgcactgatgagcaggccctgctctcttccatccttgccaagacagccagcaacatcattgatgtgtctgctgcagactcacagggcatggagcagcatgagtacatggaccgtgccaggcagtacagacatacagggcatcacactgaaaaggagctgtgatctgagggtcaggagtgtgggcctgggtaccagcactgccactgacttgcctctctctcagccttagttgccccttcactgaagacctttccagctttggtgatctacgattctatcacagcaagcaacaggaagacagagcatcatgctaggcacataagaagcttttaaaatactggttaaattgagatcaccacaccaggggaatagtgtccaagtcatgctccagctcctttcccctcttagggatcttggactagaaaaggccaaactttgtttatttcttaaaacttgaatctgagttcacagaaaaaaaaaaa

SEQ ID NO: 306750 - DNA, 1439 bp, Homo sapiens
agcggagtgactgaggcggccaagcggctccgggacagggggtacggggggtgggggcgggtggttgcctgcgggaggccgccgcgggtcatgtgaccggaagggctcctcacggacgccgtccctcctcggcgcggcctgagcgcccggcccgaccccggccatggggtgctgctacagcagcgagaacgaggactcggaccaggaccgagaggagcggaagctgctgctggaccctagcagcccccctaccaaagctctcaatggagccgagcccaactaccacagcctgccttccgctcgcactgatgagcaggccctgctctcttccatccttgccaagacagccagcaacatcattgatgtgtctgctgcagactcacagggcatggagcagcatgagtacatggaccgtgccaggcagtacagcacccgcttggctgtgctgagcagcagcctgacccattggaagaagctgccaccgctgccgtctcttaccagccagccccaccaagtgctggccagtgagcccatcccgttctctgatttgcagcaggtctccaggatagctgcttatgcctacagtgcactttctcagatccgtgtggacgcaaaagaggagctggttgtacagtttgggatcccatgaagagaggggtccttggacagctcttctcctctcttcatcccatctctaccccacccccttggcccccagcctcactgcggcttatacagtaccctaacctgctactaatcacagagaaaaatgtgaagaaggaggagaagaggaaggctagaagcctgagcaagtgagggtagaaccttttgggactggcctttgaagctctggccagggatggggtgggggccaaaaggacagagcctggtatgtcttcatagtcattgagaatgtggagataccagtttgggtggggggtgatcaccaggggacctagggagatccccttcccaccctctctgttggcctcagagtcactcctgccccctctccctgacttggtgctcacatgcacctcactagggtttgtgaccagggtctggatgagcttgaatttgaatgaattgagtttgtatttctagaaccctgggtttttacatgtttggtctttttttgttttggtttgtcaccctcgataaaggaagtatattcatccaaaaaaaaaaaacatctcattatgaggtccgtaatcaccaaattcacactgggcccgatcgcttttacccaaactgttcgtggaactgtgtgaaaaatccactggtcgggtaaacctccaaactttaaaattggcccttggtcagactaaaattcccccctctttccgcctcagcttgggcgtaaaataaatctaaaataagggcccctgaacccggaattggcccttttctcagatcagcttggcttcgcttggtggtcg

SEQ ID NO: 306751 - DNA, 1410 bp, Homo sapiens
agcggagtgactgaggcggccaagcggctccgggacagggggtacggggggtgggggcgggtggttgcctgcgggaggccgccgcgggtcatgtgaccggaagggctcctcacggacgccgtccctcctcggcgcggcctgagcgcccggcccgaccccggccatggggtgctgctacagcagcgagaacgaggactcggaccaggaccgagaggagcggaagctgctgctggaccctagcagcccccctaccaaagctctcaatggagccgagcccaactaccacagcctgccttccgctcgcactgatgagcaggccctgctctcttccatccttgccaagacagccagcaacatcattgatgtgtctgctgcagactcacagggcatggagcagcatgagtacatggaccgtgccaggcagtacagcacccgcttggctgtgctgagcagcagcctgacccattggaagaagctgccaccgctgccgtctcttaccagccagccccaccaagtgctggccagtgagcccatcccgttctctgatttgcagcaggtctccaggatagctgcttatgcctacagtgcactttctcagatccgtgtggacgcaaaagaggagctggttgtacagtttgggatcccatgaagagaggggtccttggacagctcttctcctctcttcatcccatctctaccccacccccttggcccccagcctcactgcggcttatacagtaccctaacctgctactaatcacagagaaaaatgtgaagaaggaggagaagaggaaggctagaagcctgagcaagtgagggtagaaccttttgggactggcctttgaagctctggccagggatggggtgggggccaaaaggacagagcctggtatgtcttcatagtcattgagaatgtggagataccagtttgggtggggggtgatcaccaggggacctagggagatccccttcccaccctctctgttggcctcagagtcactcctgccccctctccctgacttggtgctcacatgcacctcactagggtttgtgaccagggtctggatgagcttgaatttgaatgaattgagtttgtatttctagaaccctgggtttttacatgtttggtctttttttgttttggtttgtcaccctcgataaaggaagtatattcatccaaaaaaaaaaaaattactacttcctctctttttctcttattctattttcttctcttcttaaaaaaaaaaaaaactttgggggggggccccgtcccccaattcgcccttatggtgagtcgttatacaatccattggccgccgtttacaaactttttgacttggaaaaatcttggcgttcaccatcttaaatcgcttgaacaacattcccttttcgccagttggcgaaaaagcg

SEQ ID NO: 306752 - DNA, 1063 bp, Homo sapiens
tgtgggcaggggagctgcggcctgcagcaggaaagactgaggaactgagataggcctggaggggagcattgaggagtctggcactgaaggaccgagaggagcggaagctgctgctggaccctagcagcccccctaccaaagctctcaatggagccgagcccaactaccacagcctgccttccgctcgcactgatgagcaggccctgctctcttccatccttgccaagacagccagcaacatcattgatgtgtctgctgcagactcacagggcatggagcagcatgagtacatggaccgtgccaggcagtacagcacccgcttggctgtgctgagcagcagcctgacccattggaagaagctgccaccgctgccgtctcttaccagccagccccaccaagtgctggccagtgagcccatcccgttctctgatttgcagcaggtctccaggatagctgcttatgcctacagtgcactttctcagatccgtgtggacgcaaaagaggagctggttgtacagtttgggatcccatgaagagaggggtccttggacagctcttctcctctcttcatcccatctctaccccacccccttggcccccagcctcactgcggcttatacagtaccctaacctgctactaatcacagagaaaaatgtgaagaaggaggagaagaggaaggctagaagcctgagcaagtgagggtagaaccttttgggactggcctttgaagctctggccagggatggggtgggggccaaaaggacagagcctggtatgtcttcatagtcattgagaatgtggagataccagtttgggtggggggtgatcaccaggggacctagggagatccccttcccaccctctctgttggcctcagagtcactcctgccccctctccctgacttggtgctcacatgcacctcactagggtttgtgaccagggtctggatgagcttgaatttgaatgaattgagtttgtatttctagaaccctgggtttttacatgtttggtctttttttgttttggtttgtcaccctcgataaaggaagtatattcatcca

SEQ ID NO: 306753 - DNA, 1431 bp, Homo sapiens
tggtgatctagcaggatccttagctctggaaaaggggatgaggaaggctgttcttgggctcttgacttgcactgatttcccctttagatcccagtgcttgctatgtctcagctcctctgtcttccagcctctagtatcctttctttgccaggtcctagaatgtttttcaagctccagggctgttgctgactacctgctttgtgcctctgtccattttttcagggcctctaggactgcctggttccactctcatttatcctagaacaccaactcagttgagctcccaaggataggcaggaactgagtcttatctggcattccataaagctgggcactttagatattccttatagaaacatttttggtgtttaaggtcagagctgggctaagggtagcacccgtgaaaggcaggatctacgggtcctggggctgacttctctcccatgaccacttctaggaccgagaggagcggaagctgctgctggaccctagcagcccccctaccaaagctctcaatggagccgagcccaactaccacagcctgccttccgctcgcactgatgagcaggccctgctctcttccatccttgccaagacagccagcaacatcattgatgtgtctgctgcagactcacagggcatggagcagcatgagtacatggaccgtgccaggcagtacagcacccgcttggctgtgctgagcagcagcctgacccattggaagaagctgccaccgctgccgtctcttaccagccagccccaccaagtgctggccagtgagcccatcccgttctctgatttgcagcaggtctccaggatagctgcttatgcctacagtgcactttctcagatccgtgtggacgcaaaagaggagctggttgtacagtttgggatcccatgaagagaggggtccttggacagctcttctcctctcttcatcccatctctaccccacccccttggcccccagcctcactgcggcttatacagtaccctaacctgctactaatcacagagaaaaatgtgaagaaggaggagaagaggaaggctagaagcctgagcaagtgagggtagaaccttttgggactggcctttgaagctctggccagggatggggtgggggccaaaaggacagagcctggtatgtcttcatagtcattgagaatgtggagataccagtttgggtggggggtgatcaccaggggacctagggagatccccttcccaccctctctgttggcctcagagtcactcctgccccctctccctgacttggtgctcacatgcacctcactagggtttgtgaccagggtctggatgagcttgaatttgaatgaattgagtttgtatttctagaaccctgggtttttacatgtttggtctttttttgttttggtttgtcaccctcgataaaggaagtatattcatcca

SEQ ID NO: 306754 - DNA, 1191 bp, Homo sapiens
  misc_feature (31)..(31): n is a, c, g, or t
  misc_feature (34)..(34): n is a, c, g, or t
  misc_feature (43)..(43): n is a, c, g, or t
  misc_feature (47)..(47): n is a, c, g, or t
  misc_feature (56)..(56): n is a, c, g, or t
  misc_feature (70)..(70): n is a, c, g, or t
  misc_feature (93)..(93): n is a, c, g, or t
  misc_feature (99)..(99): n is a, c, g, or t
  misc_feature (128)..(128): n is a, c, g, or t
  misc_feature (163)..(163): n is a, c, g, or t
cccaaactacccacagacctgaccttaccgnctncgacactgnatgnagacagagnccctgctctgcttnccatgccttgaccaagtagcagncgcagncaacatgcattgatgtgtgctgctgcagnactcacagggtcatggagcagcatgagtacatggnaccgtgccagggcagtacagcacccgcttggctgtgctgagtcagcagcctgtacccattggaagaagctgtccaccgctgccgtctcttaccagccagccccaccaagtgctggccagtgagcccaactaccacagcctgccttccgctcgcactgatgagcaggccctgctctcttccatccttgccaagacagccagcaacatcattgatgtgtctgctgcagactcacagggcatggagcagcatgagtacatggaccgtgccaggcagtacagcacccgcttggctgtgctgagcagcagcctgacccattggaagaagctgccaccgctgccgtctcttaccagccagccccaccaagtgctggccagtgagcccatcccgttctctgatttgcagcaggtctccaggatagctgcttatgcctacagtgcactttctcagatccgtgtggacgcaaaagaggagctggttgtacagtttgggatcccatgaagagaggggtccttggacagctcttctcctctcttcatcccatctctaccccacccccttggcccccagcctcactgcggcttatacagtaccctaacctgctactaatcacagagaaaaatgtgaagaaggaggagaagaggaaggctagaagcctgagcaagtgagggtagaaccttttgggactggcctttgaagctctggccagggatggggtgggggccaaaaggacagagcctggtatgtcttcatagtcattgagaatgtggagataccagtttgggtggggggtgatcaccaggggacctagggagatccccttcccaccctctctgttggcctcagagtcactcctgccccctctccctgacttggtgctcacatgcacctcactagggtttgtgaccagggtctggatgagcttgaatttgaatgaattgagtttgtatttctagaaccctgggtttttacatgtttggtctttttttgttttggtttgtcaccctcgataaaggaagtatattcatcca

SEQ ID NO: 306755 - DNA, 868 bp, Homo sapiens
ggacgcgtgggtcgacccacgcgtcggccaagacagccagcaacatcattgatgtgtctgctgcagactcacagggcatggagcagcatgagtacatggaccgtgccaggcagtacagcacccgcttggctgtgctgagcagcagcctgacccattggaagaagctgccaccgctgccgtctcttaccagccagccccaccaagtgctggccagtgagcccatcccgttctctgatttgcagcaggtctccaggatagctgcttatgcctacagtgcactttctcagatccgtgtggacgcaaaagaggagctggttgtacagtttgggatcccatgaagagaggggtccttggacagctcttctcctctcttcatcccatctctaccccacccccttggcccccagcctcactgcggcttatacagtaccctaacctgctactaatcacagagaaaaatgtgaagaaggaggagaagaggaaggctagaagcctgagcaagtgagggtagaaccttttgggactggcctttgaagctctggccagggatggggtgggggccaaaaggacagagcctggtatgtcttcatagtcattgagaatgtggagataccagtttgggtggggggtgatcaccaggggacctagggagatccccttcccaccctctctgttggcctcagagtcactcctgccccctctccctgacttggtgctcacatgcacctcactagggtttgtgaccagggtctggatgagcttgaatttgaatgaattgagtttgtatttctagaaccctgggtttttacatgtttggtctttttttgttttggtttgtcaccctcgataaaggaagtatattcatcca

SEQ ID NO: 306756 - DNA, 2035 bp, Homo sapiens
agcggagtgactgaggcggccaagcggctccgggacagggggtacggggggtgggggcgggtggttgcctgcgggaggccgccgcgggtcatgtgaccggaagggctcctcacggacgccgtccctcctcggcgcggcctgagcgcccggcccgaccccggccatggggtgctgctacagcagcgagaacgaggactcggaccaggaccgagaggagcggaagctgctgctggaccctagcagcccccctaccaaagctctcaatggagccgagcccaactaccacagcctgccttccgctcgcactgatgagcaggccctgctctcttccatccttgccaagacagccagcaacatcattgatgtgtctgctgcagactcacagggcatggagcagcatgagtacatggaccgtgccaggcagtacagcacccgcttggctgtgctgagcagcagcctgacccattggaagaagctgccaccgctgccgtctcttaccagccagccccaccaagtgctggccagtgagcccatcccgttctctgatttgcagcaggttcagctgtttcagtccacaccttgttcacagtaagatattcaattcaattcagcaaacatttgttgtgtgcttgctgctctgtgcctgaccagaagaaatgaagccaagatacaaataatagaaccctgtcatgagcacagaaagacctgctgagtttctattgattgtggtaaaccagcctgcatccagttccaagtaacagctgcccacttagtgaatactctctcatgtttcaacactcagttctagtgtagcctcttctataaagcctttcttttccagataaaattggttaatgtgtcctgtgttaggctgattgttttgatgatccctattcatggtctcccctgtatccatctctttttgcctataacattgtagtcccatctcactctgatgctgggaccagacatgtgacttgttttagccaatgagatgtcgataaacatgaagcaaacagaagctttaaaggaggcctgccctcttgctctttgccagtgccatgagaacatggctgatcagctggagggttatgagatgtgtaggtgagagacatgcgaaagagccagagataccagctgaagccatcctagactagcccacagtcagcctacccccagtcaagatcaggagagtcacccaacccacagatgactgccgacacatgagtaagcccagccaaagcagaagaaccctccagctgactctaagacttagaagcaataataaatgtttattatcttaagccactgtgttttgggatggtttattacacggcaatagctaacttctgcatgcccccactgtacttcaaacaaaattttattacagcttgtttactcatctgtgaaatggagacaaaccctaccttgagaactattgtacatctggcatcaggtgctcaataaatggaagcagttgtattctctgttaatttcattataaccaactttgtttactccctataagcttgaggacagggacaagactcagacttctttctcccttctcatcattaccctgcattgagcctggccaaaaaaaaaaaaaaaatccatattcactaaaggtttgatggacaaatgaaaatggatggacaatggaaaaatgaaagaagaaatgaaggaattaatggagtcttcaaggtgtcacatagagagcttgactgctggggagaactgacaaagtgttgatgctgccatgcttactcctgtggctgtgtttttggagtcagtctttcccatctgctattctggcttatgaccaggaggtaatcagatgccagcaccttcatctgtccagactgactaacttgatgaatgacagggttaggggcatacctgccttgtttcggaactggaatttctcatttccaaattgacagtatctttaactgttttgttttttaactgtaaaagctaatatgatagatgaataaagtgaaatgacaagaagtacatcaaatagaaactcaaa

SEQ ID NO: 306757 - DNA, 725 bp, Homo sapiens
  misc_feature (717)..(717): n is a, c, g, or t
agcggagtgactgaggcggccaagcggctccgggacagggggtacggggggtgggggcgggtggttgcctgcgggaggccgccgcgggtcatgtgaccggaagggctcctcacggacgccgtccctcctcggcgcggcctgagcgcccggcccgaccccggccatggggtgctgctacagcagcgagaacgaggactcggaccaggaccgagaggagcggaagctgctgctggaccctagcagcccccctaccaaagctctcaatggagccgagcccaactaccacagcctgccttccgctcgcactgatgagcaggccctgctctcttccatccttgccaagacagccagcaacatcattgatgtgtctgctgcagactcacagggcatggagcagcatgagtacatggaccgtgccaggcagtacagcacccgcttggctgtgctgagcagcagcctgacccattggaagaagctgccaccgctgccgtctcttaccagccagccccaccaagtgctggccagtgagcccaactaccacagcctgccttccgctcgcactgatgagcaggccctgctcttcttccatccttgccaagacagccagcaacatcattgatgtgtctgctgcagacttcacagggcatgggagcagcatgagtacatgggaccgtgccagggagttacagcacccgtttgggtgtgctgaggagcagncttgaccc

SEQ ID NO: 306758 - DNA, 1295 bp, Homo sapiens
tcgagcctcggccctgatgtgctgcccacttagtgaatactctctcatgtttcaacactcagttctagtgtagcctcttctataaagcctttcttttccagataaaattggttaatgtgtcctgtgttaggctgattgttttgatgatccctattcatggtctcccctgtatccatctctttttgcctataacattgtagtcccatctcactctgatgctgggaccagacatgtgacttgttttagccaatgagatgtcgataaacatgaagcaaacagaagctttaaaggaggcctgccctcttgctctttgccagtgccatgagaacatggctgatcagctggagggttatgagatgtgtaggtgagagacatgcgaaagagccagagataccagctgaagccatcctagactagcccacagtcagcctacccccagtcaagatcaggagagtcacccaacccacagatgactgccgacacatgagtaagcccagccaaagcagaagaaccctccagctgactctaagacttagaagcaataataaatgtttattatcttaagccactgtgttttgggatggtttattacacggcaatagctaacttctgcatgcccccactgtacttcaaacaaaattttattacagcttgtttactcatctgtgaaatggagacaaaccctaccttgagaactattgtacatctggcatcaggtgctcaataaatggaagcagttgtattctctgttaatttcattataaccaactttgtttactccctataagcttgaggacagggacaagactcagacttctttctcccttctcatcattaccctgcattgagcctggccaaaaaaaaaaaaaaaatccatattcactaaaggtttgatggacaaatgaaaatggatggacaatggaaaaatgaaagaagaaatgaaggaattaatggagtcttcaaggtgtcacatagagagcttgactgctggggagaactgacaaagtgttgatgctgccatgcttactcctgtggctgtgtttttggagtcagtctttcccatctgctattctggcttatgaccaggaggtaatcagatgccagcaccttcatctgtccagactgactaacttgatgaatgacagggttaggggcatacctgccttgtttcggaactggaatttctcatttccaaattgacagtatctttaactgttttgttttttaactgtaaaagctaatatgatagatgaataaagtgaaatgacaagaagtacatcaaatagaaactcaaa

SEQ ID NO: 306759 - DNA, 940 bp, Homo sapiens
gatgctgcgagtaaacgccttgatataccatgatgagtccgtctcgtagacggactcgcaggctcaatctcgtatccccacagatcaagatcaggagagtcacccaacccacagatgactgccgacacatgagtaagcccagccaaagcagaagaaccctccagctgactctaagacttagaagcaataataaatgtttattatcttaagccactgtgttttgggatggtttattacacggcaatagctaacttctgcatgcccccactgtacttcaaacaaaattttattacagcttgtttactcatctgtgaaatggagacaaaccctaccttgagaactattgtacatctggcatcaggtgctcaataaatggaagcagttgtattctctgttaatttcattataaccaactttgtttactccctataagcttgaggacagggacaagactcagacttctttctcccttctcatcattaccctgcattgagcctggccaaaaaaaaaaaaaaaatccatattcactaaaggtttgatggacaaatgaaaatggatggacaatggaaaaatgaaagaagaaatgaaggaattaatggagtcttcaaggtgtcacatagagagcttgactgctggggagaactgacaaagtgttgatgctgccatgcttactcctgtggctgtgtttttggagtcagtctttcccatctgctattctggcttatgaccaggaggtaatcagatgccagcaccttcatctgtccagactgactaacttgatgaatgacagggttaggggcatacctgccttgtttcggaactggaatttctcatttccaaattgacagtatctttaactgttttgttttttaactgtaaaagctaatatgatagatgaataaagtgaaatgacaagaagtacatcaaatagaaactcaaa

SEQ ID NO: 306760 - DNA, 390 bp, Homo sapiens
gtgacactcttgagggcactgaggccaagggagatgggcctagattgagtctgtgatgagctgagaccttccctcccagatacccctcctcgacaccctgcttctctggcctgaggggatgaggcttacctgggctgggcagggcagactgtagcttaactgcctacccccaccccctctctcttggtcagcacccgcttggctgtgctgagcagcagcctgacccattggaagaagctgccaccgctgccgtctcttaccagccagccccaccaagtgctggccagtgagcccatcccgttctctgatttgcagcaggtgagacacccctcacctgcccctgcccacccttctcacactgcccagggtatggcagagggttcacccact

SEQ ID NO: 306761 - DNA, 5115 bp, Homo sapiens
  misc_feature (4961)..(4961): n is a, c, g, or t
  misc_feature (5002)..(5002): n is a, c, g, or t
  misc_feature (5031)..(5031): n is a, c, g, or t
gagacttgcaggcagcaaacacggtgcgagcgaacaggagtgggggggaaattaaaaaaagctaaacgtggagcagccgatcggggaccgagaaggggaatcgatgcaaggagcacaataaaacaaaagctacttcggaacaaacagcatttaaaaatccacgactcaagataactgaaacctaaaataaaacctgctcatgcaccatggtttttcaaactcggtacccttcatggattattttatgctacatctggctgctccgctttgcacacacaggggaggcgcaggctgcgaaggaagtactactgctggattctaaagcacaacaaacagagttggagtggatttcctctccacccaatgggtgggaagaaattagtggtttggatgagaactataccccgatacgaacataccaggtgtgccaagtcatggagcccaaccaaaacaactggctgcggactaactggatttccaaaggcaatgcacaaaggatttttgtagaattgaaattcaccctgagggattgtaacagtcttcctggagtactgggaacttgcaaggaaacatttaatttgtactattatgaaacagactatgacactggcaggaatataagagaaaacctctatgtaaaaatagacaccattgctgcagatgaaagttttacccaaggtgaccttggtgaaagaaagatgaagcttaacactgaggtgagagagattggacctttgtccaaaaagggattctatcttgcctttcaggatgtaggggcttgcatagctttggtttctgtcaaagtgtactacaagaagtgctggtccattattgagaacttagctatctttccagatacagtgactggttcagaattttcctctttagtcgaggttcgagggacatgtgtcagcagtgcagaggaagaagcggaaaacgcccccaggatgcactgcagtgcagaaggagaatggttagtgcccattggaaaatgtatctgcaaagcaggctaccagcaaaaaggagacacttgtgaaccctgtggccgtgggttctacaagtcttcctctcaagatcttcagtgctctcgttgtccaactcacagtttttctgataaagaaggctcctccagatgtgaatgtgaagatgggtattacagggctccatctgacccaccatacgttgcatgcacaaggcctccatctgcaccacagaacctcattttcaacatcaaccaaaccacagtaagtttggaatggagtcctcctgcagacaatgggggaagaaacgatgtgacctacagaatattgtgtaagcggtgcagttgggagcagggcgaatgtgttccctgtgggagtaacattggatacatgccccagcagactggattagaggataactatgtcactgtcatggacctgctagcccacgctaattatacttttgaagttgaagctgtaaatggagtttctgacttaagccgatcccagaggctctttgctgctgtcagtatcaccactggtcaagcagctccctcgcaagtgagcggagtaatgaaggagagagtactgcagcggagtgtcgagctttcctggcaggaaccagagcatcccaatggagtcatcacagaatatgaaatcaagtattacgagaaagatcaaagggaacggacctactcaacagtaaaaaccaagtctacttcagcctccattaataatctgaaaccaggaacagtgtatgttttccagattcgggcttttactgctgctggttatggaaattacagtcccagacttgatgttgctacactagaggaagctacaggtaaaatgtttgaagctacagctgtctccagtgaacagaatcctgttattatcattgctgtggttgctgtagctgggaccatcattttggtgttcatggtctttggcttcatcattgggagaaggcactgtggttatagcaaagctgaccaagaaggcgatgaagagctttactttcattttaaatttccaggcaccaaaacctacattgaccctgaaacctatgaggacccaaatagagctgtccatcaattcgccaaggagctagatgcctcctgtattaaaattgagcgtgtgattggtgcaggagaattcggtgaagtctgcagtggccgtttgaaacttccagggaaaagagatgttgcagtagccataaaaaccctgaaagttggttacacagaaaaacaaaggagagactttttgtgtgaagcaagcatcatggggcagtttgaccacccaaatgttgtccatttggaaggggttgttacaagagggaaaccagtcatgatagtaatagagttcatggaaaatggagccctagatgcatttctcaggaaacatgatgggcaatttacagtcattcagttagtaggaatgctgagaggaattgctgctggaatgagatatttggctgatatgggatatgttcacagggaccttgcagctcgcaatattcttgtcaacagcaatctcgtttgtaaagtgtcagattttggcctgtcccgagttatagaggatgatccagaagctgtctatacaactactggtggaaaaattccagtaaggtggacagcacccgaagccatccagtaccggaaattcacatcagccagtgatgtatggagctatggaatagtcatgtgggaagttatgtcttatggagaaagaccttattgggacatgtcaaatcaagatgttataaaagcaatagaagaaggttatcgtttaccagcacccatggactgcccagctggccttcaccagctaatgttggattgttggcaaaaggagcgtgctgaaaggccaaaatttgaacagatagttggaattctagacaaaatgattcgaaacccaaatagtctgaaaactcccctgggaacttgtagtaggccaataagccctcttctggatcaaaacactcctgatttcactaccttttgttcagttggagaatggctacaagctattaagatggaaagatataaagataatttcacggcagctggctacaattcccttgaatcagtagccaggatgactattgaggatgtgatgagtttagggatcacactggttggtcatcaaaagaaaatcatgagcagcattcagactatgagagcacaaatgctacatttacatggaactggcattcaagtgtgatatgcatttctcccttttaagggagattacagactgcaagagaacagtactggccttcagtatatgcatagaatgctgctagaagacaagtgatgtcctgggtccttccaacagtgaagagaagatttaagaagcacctatagacttgaactcctaagtgccaccagaatatataaaaagggaatttaggatccaccatcggtggccaggaaaatagcagtgacaataaacaaagtactacctgaaaaacatccaaacaccttgagctctctaacctcctttttgtcttatagactttttaaaatgtacataaagaatttaagaaagaatatatttgtcaaataaaatcatgatcttattgttaaaattaatgaaatattttccttaaatatgtgatttcagactattcctttttaaaatcatttgtgtttattcttcataaggactttgttttagaaagctgtttatagctttggacctttttagtgttaaatctgtaacattactacactgggtacctttgaaagaatctcaaatttcaaaagaaatagcatgattgaagatacatctctgttagaacattggtatcctttttgtgccattttattctgtttaatcagtgctgttttgatattgtttgctaattggcaggtagtcaagaaaatgcaagttgccaagagctctgatattttttaaaaagaatttttttgtaaagatcagacaacacactatcttttcaatgaaaaaagcaataatgatccatacatactataaggcacttttaacagattgtttatagagtgattttactagaaagaatttaataaactcgaagtttaggtttatgagtatataaacaaatgaggcacttcatctgaagaatgttggtgaaggcaagtctctgaaagcagaactatccagtgttatctaaaaattaatctgagcacatcaagattttttcattctcgtgacattaggaaatttaggataaatagttgacatatattttatatcctcttctgttgaatgcagtccaaacatgaaaggaaataattgttttatattataactctgaagcatgataaaggggcagttcacaattttcaccatttaaacacaaatttgctgcacagaatatcaccattgcagttcaaaacaaaacaaaacaaaaagtcttttgtttgtgaacactgatgcaagaaacttgttaaatgaaaggactctttaccctagaaggaagaggtgaaggatctggcttgtttttaaagctttatttattaaaccatattatttgattactgtgttagaatttcataagcaataattaaatgtgtctttatagatattgcaggaatgtatacatattgtgattaatgctttcaaaacttatgaaaatcatgaactaccccagaattgaactgttgtacttccaaagagaattgggctgtttataatgattttaatagagaaagatcccagggatcggtcataattggtcttgtttgataatgtgggcatccacaaacaaacaaacaaataacagaaacaaaatctgtaaatgttcctttgtaaaacttgtaaattttatttatactgtcttgttttgtacacacatttctctgtagtgggctctgaatacattgaaaatgcactatatttttctattttacttgcagagcatcacaaaagaacaggtattttcagtgctacataatgtgttttcccacatttaggaccaaagacggctatagaaaaacnaagtgagaacatgagggttggttttctgttcctgctttagntcacttaggataatcgcctccagctccantcatgttgcttcaatgaacgtgatcttgtgctttttaatggctgcatagtatgccacagtgtatatctgccacactttctttaa

SEQ ID NO: 306762 - DNA, 6617 bp, Homo sapiens
gagacttgcaggcagcaaacacggtgcgagcgaacaggagtgggggggaaattaaaaaaagctaaacgtggagcagccgatcggggaccgagaaggggaatcgatgcaaggagcacaataaaacaaaagctacttcggaacaaacagcatttaaaaatccacgactcaagataactgaaacctaaaataaaacctgctcatgcaccatggtttttcaaactcggtacccttcatggattattttatgctacatctggctgctccgctttgcacacacaggggaggcgcaggctgcgaaggaagtactactgctggattctaaagcacaacaaacagagttggagtggatttcctctccacccaatgggtgggaagaaattagtggtttggatgagaactataccccgatacgaacataccaggtgtgccaagtcatggagcccaaccaaaacaactggctgcggactaactggatttccaaaggcaatgcacaaaggatttttgtagaattgaaattcaccctgagggattgtaacagtcttcctggagtactgggaacttgcaaggaaacatttaatttgtactattatgaaacagactatgacactggcaggaatataagagaaaacctctatgtaaaaatagacaccattgctgcagatgaaagttttacccaaggtgaccttggtgaaagaaagatgaagcttaacactgaggtgagagagattggacctttgtccaaaaagggattctatcttgcctttcaggatgtaggggcttgcatagctttggtttctgtcaaagtgtactacaagaagtgctggtccattattgagaacttagctatctttccagatacagtgactggttcagaattttcctctttagtcgaggttcgagggacatgtgtcagcagtgcagaggaagaagcggaaaacgcccccaggatgcactgcagtgcagaaggagaatggttagtgcccattggaaaatgtatctgcaaagcaggctaccagcaaaaaggagacacttgtgaaccctgtggccgtgggttctacaagtcttcctctcaagatcttcagtgctctcgttgtccaactcacagtttttctgataaagaaggctcctccagatgtgaatgtgaagatgggtattacagggctccatctgacccaccatacgttgcatgcacaaggcctccatctgcaccacagaacctcattttcaacatcaaccaaaccacagtaagtttggaatggagtcctcctgcagacaatgggggaagaaacgatgtgacctacagaatattgtgtaagcggtgcagttgggagcagggcgaatgtgttccctgtgggagtaacattggatacatgccccagcagactggattagaggataactatgtcactgtcatggacctgctagcccacgctaattatacttttgaagttgaagctgtaaatggagtttctgacttaagccgatcccagaggctctttgctgctgtcagtatcaccactggtcaagcagctccctcgcaagtgagcggagtaatgaaggagagagtactgcagcggagtgtcgagctttcctggcaggaaccagagcatcccaatggagtcatcacagaatatgaaatcaagtattacgagaaagatcaaagggaacggacctactcaacagtaaaaaccaagtctacttcagcctccattaataatctgaaaccaggaacagtgtatgttttccagattcgggcttttactgctgctggttatggaaattacagtcccagacttgatgttgctacactagaggaagctacaggtaaaatgtttgaagctacagctgtctccagtgaacagaatcctgttattatcattgctgtggttgctgtagctgggaccatcattttggtgttcatggtctttggcttcatcattgggagaaggcactgtggttatagcaaagctgaccaagaaggcgatgaagagctttactttcattttaaatttccaggcaccaaaacctacattgaccctgaaacctatgaggacccaaatagagctgtccatcaattcgccaaggagctagatgcctcctgtattaaaattgagcgtgtgattggtgcaggagaattcggtgaagtctgcagtggccgtttgaaacttccagggaaaagagatgttgcagtagccataaaaaccctgaaagttggttacacagaaaaacaaaggagagactttttgtgtgaagcaagcatcatggggcagtttgaccacccaaatgttgtccatttggaaggggttgttacaagagggaaaccagtcatgatagtaatagagttcatggaaaatggagccctagatgcatttctcaggaaacatgatgggcaatttacagtcattcagttagtaggaatgctgagaggaattgctgctggaatgagatatttggctgatatgggatatgttcacagggaccttgcagctcgcaatattcttgtcaacagcaatctcgtttgtaaagtgtcagattttggcctgtcccgagttatagaggatgatccagaagctgtctatacaactactggtggaaaaattccagtaaggtggacagcacccgaagccatccagtaccggaaattcacatcagccagtgatgtatggagctatggaatagtcatgtgggaagttatgtcttatggagaaagaccttattgggacatgtcaaatcaagatgttataaaagcaatagaagaaggttatcgtttaccagcacccatggactgcccagctggccttcaccagctaatgttggattgttggcaaaaggagcgtgctgaaaggccaaaatttgaacagatagttggaattctagacaaaatgattcgaaacccaaatagtctgaaaactcccctgggaacttgtagtaggccaataagccctcttctggatcaaaacactcctgatttcactaccttttgttcagttggagaatggctacaagctattaagatggaaagatataaagataatttcacggcagctggctacaattcccttgaatcagtagccaggatgactattgaggatgtgatgagtttagggatcacactggttggtcatcaaaagaaaatcatgagcagcattcagactatgagagcacaaatgctacatttacatggaactggcattcaagtgtgatatgcatttctcccttttaagggagattacagactgcaagagaacagtactggccttcagtatatgcatagaatgctgctagaagacaagtgatgtcctgggtccttccaacagtgaagagaagatttaagaagcacctatagacttgaactcctaagtgccaccagaatatataaaaagggaatttaggatccaccatcggtggccaggaaaatagcagtgacaataaacaaagtactacctgaaaaacatccaaacaccttgagctctctaacctcctttttgtcttatagactttttaaaatgtacataaagaatttaagaaagaatatatttgtcaaataaaatcatgatcttattgttaaaattaatgaaatattttccttaaatatgtgatttcagactattcctttttaaaatcatttgtgtttattcttcataaggactttgttttagaaagctgtttatagctttggacctttttagtgttaaatctgtaacattactacactgggtacctttgaaagaatctcaaatttcaaaagaaatagcatgattgaagatacatctctgttagaacattggtatcctttttgtgccattttattctgtttaatcagtgctgttttgatattgtttgctaattggcaggtagtcaagaaaatgcaagttgccaagagctctgatattttttaaaaagaatttttttgtaaagatcagacaacacactatcttttcaatgaaaaaagcaataatgatccatacatactataaggcacttttaacagattgtttatagagtgattttactagaaagaatttaataaactcgaagtttaggtttatgagtatataaacaaatgaggcacttcatctgaagaatgttggtgaaggcaagtctctgaaagcagaactatccagtgttatctaaaaattaatctgagcacatcaagattttttcattctcgtgacattaggaaatttaggataaatagttgacatatattttatatcctcttctgttgaatgcagtccaaacatgaaaggaaataattgttttatattataactctgaagcatgataaaggggcagttcacaattttcaccatttaaacacaaatttgctgcacagaatatcaccattgcagttcaaaacaaaacaaaacaaaaagtcttttgtttgtgaacactgatgcaagaaacttgttaaatgaaaggactctttaccctagaaggaagaggtgaaggatctggcttgtttttaaagctttatttattaaaccatattatttgattactgtgttagaatttcataagcaataattaaatgtgtctttatagatattgcaggaatgtatacatattgtgattaatgctttcaaaacttatgaaaatcatgaactaccccagaattgaactgttgtacttccaaagagaattgggctgtttataatgattttaatagagaaagatcccagggatcggtcataattggtcttgtttgataatgtgggcatccacaaacaaacaaacaaataacagaaacaaaatctgtaaatgttcctttgtaaaacttgtaaattttatttatactgtcttgttttgtacacacatttctctgtagtgggctctgaatacattgaaaatgcactatatttttctattttacttgcagagcatcacaaaagaacaggtattttcagtgctacataatgtgttttcccacatttaggaccaaagacggctatagaaaaactcaaatggattgcttcccaaacccctccccaccctttttttttggttttaaatcactgtacagtgttatttgatattttaatttattttttgattgactagaaaaatcattttaatttcactaaaatgttttttgtccctaaggaaaagtaatctgtaaaaataattttaattagcataatacagtcacctagacacttccatttgtaatctttgtaatagactgtaaatatatttttggaactataacacaatgtgcttgagggttatttttcagtgtctgcagtgtgtacaagtgtttatactaagtccagcactttacaattctaatcagtagcattggcctttgtgagaatgagtgaaagagtttgagtgagtgttcttaattccttttggattctagactcactaataatgaagttcttttcttgttcatagcttaaggtgcttattttttctattaaaattaaattaacaaaagccattctagaaatagaagacatagtatggtacatgcaaacggtgtctttcctgcttttttctagcactagatttatagttgagtagtctttcttgagtagaagggcagaataaaagtttttttgagtttttttcaaaaataactttttccttcagcaatatacctcatctgccttaaattttttacagctctttacagggaaaggggagaagggatgggaaagacacacagcacaataggaagtgtatgattacatcactatctcgtttgtaagtttcttttcctaatcaacattatgatttcgaaatacatgtatgtgaaacaaatattaagagaaaaagaattaacattgtaatgctgattgtaatactctcttccagaaagagatgagatggtataacgataagaatgtacaacttgcaccttgaaatctttttttttaaataaattagtgctcaggggaggaaaagtagagaaagtgaacgtcaaaaatagaattccaaaattataaaaatgcaaaaggaaatggcctccttgctttaatagagccaccttttttagaacactgtcctcacacttgacctgtgttttgcattcagtactgaaataaaagtaacttgttctacatttgaatctaacattttctcagcaattgatctggtccttgtttactagaactggtggtttatgcttgtcagagcactattagttgaatcatattgtatacttatgtaatctacattagctagtactgtttaggactatattttaattgctcttcttatccgtgtttttaagacaattaaaatggtgtgattcacctctcttttttatttaggtaatgctgatattctcccttttgtttcttgagtagcctagaactatgctactcactgatgtgcatgttcaaataaattactgatgtgtatttttttgctatatgtggagaaatcatggggaactcggggcgagatgtgcttttcgttggttgaatttgtccctccttgcctaagaaatactacaggggtcatccttttataaggacaaactgcttttgaacagtgtcttcaatgtatcaagcacaaataactctttcttcaacatgaatcataagtctctttttaccagcttaaaataataaacaagtctattagacaatgtaaagaaaaaaatgtct

SEQ ID NO: 306763 - DNA, 470 bp, Homo sapiens
tatcggtttccagaggatccccgtcgtccaggagtgcgcaaaagcaatgcagcagaacgcagggggcctctgtaaggcacatggaggtgatggtgtttcttagagagaagatcactgaagaaacttctgctttaatgactttacaaagctggcaatattacaatccttgacctcagtgaaagcagtcatcttcagcgttttccagccctatagccaccccaagtgtggttatgcctcctcgattgctccgtactctaacatctagctggcttccctgtctattgccttttcctgtatctattttcctctatttcctatcattttattatcaccatgcaatgcctctggaataaaacatacaggagtctgtctctgctatggaatgccccatggggcatctcttgtgtacttattgtttaaggtttcctcaaactgtgatttttctgaacacaataaactattttgatgat

SEQ ID NO: 306764 - DNA, 737 bp, Homo sapiens
  misc_feature (143)..(143): n is a, c, g, or t
  misc_feature (715)..(715): n is a, c, g, or t
tcaacttttgataggagatatcgtcttgattgccctgagcctgactgcgtgtctggaggagatcattattttgccatgggcatgttcatataggcgcagaggcaatgcttcgaatcccggtgttcctctgttatgcacatggnggtgatggtgtttcttagagagaagatcactgaagaaacttctgctttaatgactttacaaagctggcaatattacaatccttgacctcagtgaaagcagtcatcttcagcgttttccagccctatagccaccccaagtgtggttatgcctcctcgattgctccgtactctaacatctagctggcttccctgtctattgccttttcctgtatctattttcctctatttcctatcattttattatcaccatgcaatgcctctggaataaaacatacaggagtctgtctctgctatggaatgccccatggggcatctcttgtgtacttattgtttaaggtttcctcaaactgtgatttttctgaacacaataaactattttgatgattgaaaaaaaaaaaaaaaaaaaaaaaaaaaaaaaaaaaaaaaaaaaaaaaaaaaaaaaaaaaaaaacccttgtggcccgcttggcccaagtcaattttaaactggaccaggttaatccttgcggccgaatttggggctaattggcccatttccccctatggggggcggtttaacattccatggcccgnggtttaacacggcggggacggg

SEQ ID NO: 306765 - DNA, 497 bp, Homo sapiens
ggaagaattcctggtggtgatggaagaattcccggtggtgatggaagaattcctggtggtgatggtgtttcttagagagaagatcactgaagaaacttctgctttaatgactttacaaagctggcaatattacaatccttgacctcagtgaaagcagtcatcttcagcgttttccagccctatagccaccccaagtgtggttatgcctcctcgattgctccgtactctaacatctagctggcttccctgtctattgccttttcctgtatctattttcctctatttcctatcattttattatcaccatgcaatgcctctggaataaaacatacaggagtctgtctctgctatggaatgccccatggggcaaaatttttttttgggggggttttttttttttttttttaaaaaaaaaaggggggggtctcttgtgtacttattgtttaaggtttcctcaaactgtgatttttctgaacacaataaactattttgatgat

SEQ ID NO: 306766 - DNA, 420 bp, Homo sapiens
cttaatcatgtgcctaagtgctccctgtatactccgatcaccaatgtacctccagaggtaactgtgctcacgaacagccctgtggaactgagagagcccaacgtcctcatctgtttcatcgacaagttcaccccaccagtggtcaatgtcacgtggcttcgaaatggaaaacctgtcaccacaggagtgtcagagacagtcttcctgcccagggaagggcttccctgtctattgccttttcctgtatctattttcctctatttcctatcattttattatcaccatgcaatgcctctggaataaaacatacaggagtctgtctctgctatggaatgccccatggggcatctcttgtgtacttattgtttaaggtttcctcaaactgtgatttttctgaacacaataaactattttgatgat

SEQ ID NO: 306767 - DNA, 391 bp, Homo sapiens
tttaggtctttaatccacttgaagttgatttttatgtagagtgagagatggaggtctagtttcattcttctgcatgtggctatttagttttcccagcaccatttattgaaaagattgttctttcccccaattaacgttcttggcatctttgtcaaaaatgggttgcctgtagataaatggattaatttggcttccctgtctattgccttttcctgtatctattttcctctatttcctatcattttattatcaccatgcaatgcctctggaataaaacatacaggagtctgtctctgctatggaatgccccatggggcatctcttgtgtacttattgtttaaggtttcctcaaactgtgatttttctgaacacaataaactattttgatgat

SEQ ID NO: 306768 - DNA, 261 bp, Homo sapiens
cgcagggggcctctgtaaggcacatggaggtgatggtgtttcttagagagaagatcactgaagaaacttctgctttaatgactttacaaagctggcaatattacaatccttgacctcagtgaaagcagtcatcttcagcgttttccagccctatagccaccccaagtgtggttatgcctcctcgattgctccgtactctaacatctagctcttggagctcactggtccctgcctctggggctttactgaagaaacccaccg

SEQ ID NO: 306769 - DNA, 128 bp, Homo sapiens
gcggccgcctactactactactgctcgaattcaagcttctaacgatgtacggggatctcttgtgtacttattgtttaaggtttcctcaaactgtgatttttctgaacacaataaactattttgatgat

SEQ ID NO: 306770 - DNA, 129 bp, Homo sapiens
tcggatccaacgttggatccgaatcggatccaattggatccgattcggatccaagctctcttgtgtacttattgtttaaggtttcctcaaactgtgatttttctgaacacaataaactattttgatgat

SEQ ID NO: 306771 - DNA, 287 bp, Homo sapiens
ttcaaaatagtttattgtgttcagaaaaatcacagtttgaggaaaccttaaacaataagtcacaagagatgccccatggggcattccatagcagagacagactcctgtatgttttattccagaggcattgcatggtgataataaaatgataggaaatagaggaaaatagatacaggaaaaggcaatagacagggaagccagctagatgttagagtctcttgtgtacttattgtttaaggtttcctcaaactgtgatttttctgaacacaataaactattttgatgat

SEQ ID NO: 306772 - DNA, 468 bp, Homo sapiens
gacattctcttttcttttattcttgtctgttctgcctcactcccgagctctactgactcccaacagagcgcccaagaagaaaatggccataagtggagtccctgtgctaggatttttcatcatagctgtgctgatgagcgctcaggaatcatgggctatcaaagaagaacatgtgatcatccaggccgagttctatctgaatcctgaccaatcaggcgagtttatgtttgactttgatggtgatgagattttccatgtggatatggcaaagaaggagacggtctggcggcttgaagaatttggacgatttgccagctttgaggctcaaggtgcattggccaacatagctgtggacaaagccaacctggaaatcatgacaaagcgctccaactatactccgatcaccaatgagaggtaactgggctcaccaacaggccctgtggaactcgtccacggcacctggctttc

SEQ ID NO: 306773 - DNA, 1395 bp, Homo sapiens
gacattctcttttcttttattcttgtctgttctgcctcactcccgagctctactgactcccaacagagcgcccaagaagaaaatggccataagtggagtccctgtgctaggatttttcatcatagctgtgctgatgagcgctcaggaatcatgggctatcaaagaagaacatgtgatcatccaggccgagttctatctgaatcctgaccaatcaggcgagtttatgtttgactttgatggtgatgagattttccatgtggatatggcaaagaaggagacggtctggcggcttgaagaatttggacgatttgccagctttgaggctcaaggtgcattggccaacatagctgtggacaaagccaacctggaaatcatgacaaagcgctccaactatactccgatcaccaatgtacctccagaggtaactgtgctcacgaacagccctgtggaactgagagagcccaacgtcctcatctgtttcatcgacaagttcaccccaccagtggtcaatgtcacgtggcttcgaaatggaaaacctgtcaccacaggagtgtcagagacagtcttcctgcccagggaagaccaccttttccgcaagttccactatctccccttcctgccctcaactgaggacgtttacgactgcagggtggagcactggggcttggatgagcctcttctcaagcactgggagtttgatgctccaagccctctcccagagactacagagaacgtggtgtgtgccctgggcctgactgtgggtctggtgggcatcattattgggaccatcttcatcatcaagggagtgcgcaaaagcaatgcagcagaacgcagggggcctctgtaaggcacatggaggtgatggtgtttcttagagagaagatcactgaagaaacttctgctttaatgactttacaaagctggcaatattacaatccttgacctcagtgaaagcagtcatcttcagcgttttccagccctatagccaccccaagtgtggttatgcctcctcgattgctccgtactctaacatctagctggcttccctgtctattgccttttcctgtatctattttcctctatttcctatcattttattatcaccatgcaatgcctctggaataaaacatacaggagtctgtctctgctatggaatgccccatggggcatctcttgtgtacttattgtttaaggtttcctcaaactgtgatttttctgaacacaataaactattttgatgatcttgggtggaatttttggtgtttaagccagttctttgggtggcggtggggggtggggagtcggtcctggggaatatatgtgatcctttcccggtaaaatatctgaatgttgaatttatcttataaattctagaattcatcagacatatcccgg

SEQ ID NO: 306774 - DNA, 1242 bp, Homo sapiens
gacattctcttttcttttattcttgtctgttctgcctcactcccgagctctactgactcccaacagagcgcccaagaagaaaatggccataagtggagtccctgtgctaggatttttcatcatagctgtgctgatgagcgctcaggaatcatgggctatcaaagaagaacatgtgatcatccaggccgagttctatctgaatcctgaccaatcaggcgagtttatgtttgactttgatggtgatgagattttccatgtggatatggcaaagaaggagacggtctggcggcttgaagaatttggacgatttgccagctttgaggctcaaggtgcattggccaacatagctgtggacaaagccaacctggaaatcatgacaaagcgctccaactatactccgatcaccaatgtacctccagaggtaactgtgctcacgaacagccctgtggaactgagagagcccaacgtcctcatctgtttcatcgacaagttcaccccaccagtggtcaatgtcacgtggcttcgaaatggaaaacctgtcaccacaggagtgtcagagacagtcttcctgcccagggaagaccaccttttccgcaagttccactatctccccttcctgccctcaactgaggacgtttacgactgcagggtggagcactggggcttggatgagcctcttctcaagcactgggagtttgatgctccaagccctctcccagagactacagagaacgtggtgtgtgccctgggcctgactgtgggtctggtgggcatcattattgggaccatcttcatcatcaagggagtgcgcaaaagcaatgcagcagaacgcagggggcctctgtaaggcacatggaggtgatggtgtttcttagagagaagatcactgaagaaacttctgctttaatgactttacaaagctggcaatattacaatccttgacctcagtgaaagcagtcatcttcagcgttttccagccctatagccaccccaagtgtggttatgcctcctcgattgctccgtactctaacatctagctggcttccctgtctattgccttttcctgtatctattttcctctatttcctatcattttattatcaccatgcaatgcctctggaataaaacatacaggagtctgtctctgctatggaatgccccatggggcatctcttgtgtacttattgtttaaggtttcctcaaactgtgatttttctgaacacaataaactattttgatgat

SEQ ID NO: 306775 - DNA, 1293 bp, Homo sapiens
gacattctcttttcttttattcttgtctgttctgcctcactcccgagctctactgactcccaacagagcgcccaagaagaaaatggccataagtggagtccctgtgctaggatttttcatcatagctgtgctgatgagcgctcaggaatcatgggctatcaaagaagaacatgtgatcatccaggccgagttctatctgaatcctgaccaatcaggcgagtttatgtttgactttgatggtgatgagattttccatgtggatatggcaaagaaggagacggtctggcggcttgaagaatttggacgatttgccagctttgaggctcaaggtgcattggccaacatagctgtggacaaagccaacctggaaatcatgacaaagcgctccaactatactccgatcaccaatgtacctccagaggtaactgtgctcacgaacagccctgtggaactgagagagcccaacgtcctcatctgtttcatcgacaagttcaccccaccagtggtcaatgtcacgtggcttcgaaatggaaaacctgtcaccacaggagtgtcagagacagtcttcctgcccagggaagaccaccttttccgcaagttccactatctccccttcctgccctcaactgaggacgtttacgactgcagggtggagcactggggcttggatgagcctcttctcaagcactgggagtttgatgctccaagccctctcccagagactacagagaacgtggtgtgtgccctgggcctgactgtgggtctggtgggcatcattattgggaccatcttcatcatcaagggagtgcgcaaaagcaatgcagcagaacgcagggggcctctgtaaggcacatggaggtgatggtgtttcttagagagaagatcactgaagaaacttctgctttaatgactttacaaagctggcaatattacaatccttgacctcagtgaaagcagtcatcttcagcgttttccagccctatagccaccccaagtgtggttatgcctcctcgattgctccgtactctaacatctagctggcttccctgtctattgccttttcctgtatctattttcctctatttcctatcattttattatcaccatgcaatgcctctggaataaaacatacaggagtctgtctctgctatggaatgccccatggggcatctcttgtgtacttattgtttaaggtttcctcaaactgtgatttttctgaacacaataaactattttgatgatgatgctggacgacggggatcctctggaacgctatgaccctgatacgacctg

SEQ ID NO: 306776 - DNA, 2119 bp, Homo sapiens
  misc_feature (1568)..(1568): n is a, c, g, or t
gacattctcttttcttttattcttgtctgttctgcctcactcccgagctctactgactcccaacagagcgcccaagaagaaaatggccataagtggagtccctgtgctaggatttttcatcatagctgtgctgatgagcgctcaggaatcatgggctatcaaagaagaacatgtgatcatccaggccgagttctatctgaatcctgaccaatcaggcgagtttatgtttgactttgatggtgatgagattttccatgtggatatggcaaagaaggagacggtctggcggcttgaagaatttggacgatttgccagctttgaggctcaaggtgcattggccaacatagctgtggacaaagccaacctggaaatcatgacaaagcgctccaactatactccgatcaccaatgtacctccagaggtaactgtgctcacgaacagccctgtggaactgagagagcccaacgtcctcatctgtttcatcgacaagttcaccccaccagtggtcaatgtcacgtggcttcgaaatggaaaacctgtcaccacaggagtgtcagagacagtcttcctgcccagggaagaccaccttttccgcaagttccactatctccccttcctgccctcaactgaggacgtttacgactgcagggtggagcactggggcttggatgagcctcttctcaagcactgggagtttgatgctccaagccctctcccagagactacagagaacgtggtgtgtgccctgggcctgactgtgggtctggtgggcatcattattgggaccatcttcatcatcaagggagtgcgcaaaagcaatgcagcagaacgcagggggcctctgtaaggcacatggaggtgatggtgtttcttagagagaagatcactgaagaaacttctgctttaatgactttacaaagctggcaatattacaatccttgacctcagtgaaagcagtcatcttcagcgttttccagccctatagccaccccaagtgtggttatgcctcctcgattgctccgtactctaacatctagctggcttccctgtctattgccttttcctgtatctattttcctctatttcctatcattttattatcaccatgcaatgcctctggaataaaacatacaggagtctgtctctgctatggaatgccccatggggcatctcttgtgtacttattgtttaaggtttcctcaaactgtgatttttctgaacacaataaactattttgatgattgaaaaaaaaaaaaaaaaaaaaaaaaaaaaaaaaaaaaaaaagggggggggcccccaaaaattcccccggagggggcgcccaaaggaatatacgcggatatacccgaggttatcttgtggaaccaagaggggcgcccccataataggagagagagcgcggaattataaagcgacgcaaagagcgagcccaggggccagcgaggttataaacaacgtaggagcacgcgggcgacaacacgtgaacacaagggaggaacccctgcgggaaagaggaacaccataaaacacgggcggagggcggggacacaacagtggcgggaccaccnacacctcccccacaaagagagactattaaaacgccctcatgagggagaaacaatcaataaaacattcaacaacgggctatacaaacggggggggttacacaacaccaccaagggcggacaaattaatgacagagcgacagcgtactgggacaaaacaagtattgggcgcaccaaccgagggagatttctaagcgtacatatagcagacaaacaatttttttttttaccaccacggggaggcgaaggatcgagtacatcgaacaacacatcagacgaaaagcgcaacacgcgacgaccacgcagcacaaccggccgaaaagaccggccgacacggccagccagcaccgacacgacgcgacgcccgcacaaccaagaccggaccaaggcggcaagcgtcaatccgaacgagagcacacagaagagaaagacgagaacggcacgcgcggccagcgacgcaagagcacgctgacacaaaagcgcactccgcgcgcacacacgcgaaccaaccacacctacaccacccacaacgccacccaaccgacgcacccacc

SEQ ID NO: 306777 - DNA, 1451 bp, Homo sapiens
  misc_feature (1429)..(1429): n is a, c, g, or t
gacattctcttttcttttattcttgtctgttctgcctcactcccgagctctactgactcccaacagagcgcccaagaagaaaatggccataagtggagtccctgtgctaggatttttcatcatagctgtgctgatgagcgctcaggaatcatgggctatcaaagaagaacatgtgatcatccaggccgagttctatctgaatcctgaccaatcaggcgagtttatgtttgactttgatggtgatgagattttccatgtggatatggcaaagaaggagacggtctggcggcttgaagaatttggacgatttgccagctttgaggctcaaggtgcattggccaacatagctgtggacaaagccaacctggaaatcatgacaaagcgctccaactatactccgatcaccaatgtacctccagaggtaactgtgctcacgaacagccctgtggaactgagagagcccaacgtcctcatctgtttcatcgacaagttcaccccaccagtggtcaatgtcacgtggcttcgaaatggaaaacctgtcaccacaggagtgtcagagacagtcttcctgcccagggaagaccaccttttccgcaagttccactatctccccttcctgccctcaactgaggacgtttacgactgcagggtggagcactggggcttggatgagcctcttctcaagcactgggagtttgatgctccaagccctctcccagagactacagagaacgtggtgtgtgccctgggcctgactgtgggtctggtgggcatcattattgggaccatcttcatcatcaagggagtgcgcaaaagcaatgcagcagaacgcagggggcctctgtaaggcacatggaggtgatggtgtttcttagagagaagatcactgaagaaacttctgctttaatgactttacaaagctggcaatattacaatccttgacctcagtgaaagcagtcatcttcagcgttttccagccctatagccaccccaagtgtggttatgcctcctcgattgctccgtactctaacatctagctggcttccctgtctattgccttttcctgtatctattttcctctatttcctatcattttattatcaccatgcaatgcctctggaataaaacatacaggagtctgtctctgctatggaatgccccatggggcatctcttgtgtacttattgtttaaggtttcctcaaactgtgatttttctgaacacaataaactattttgatgattgaaaaaaaaaaaaaaaaaaaaaaaaaaaaaaaaaaaaaaaaaaaaaaaaaaaaaaaaaaaaaaacccttgtggcccgcttggcccaagtcaattttaaactggaccaggttaatccttgcggccgaatttggggctaattggcccatttccccctatggggggcggtttaacattccatggcccgnggtttaacacggcggggacggg

SEQ ID NO: 306778 - DNA, 1360 bp, Homo sapiens
  misc_feature (1248)..(1248): n is a, c, g, or t
  misc_feature (1262)..(1262): n is a, c, g, or t
gacattctcttttcttttattcttgtctgttctgcctcactcccgagctctactgactcccaacagagcgcccaagaagaaaatggccataagtggagtccctgtgctaggatttttcatcatagctgtgctgatgagcgctcaggaatcatgggctatcaaagaagaacatgtgatcatccaggccgagttctatctgaatcctgaccaatcaggcgagtttatgtttgactttgatggtgatgagattttccatgtggatatggcaaagaaggagacggtctggcggcttgaagaatttggacgatttgccagctttgaggctcaaggtgcattggccaacatagctgtggacaaagccaacctggaaatcatgacaaagcgctccaactatactccgatcaccaatgtacctccagaggtaactgtgctcacgaacagccctgtggaactgagagagcccaacgtcctcatctgtttcatcgacaagttcaccccaccagtggtcaatgtcacgtggcttcgaaatggaaaacctgtcaccacaggagtgtcagagacagtcttcctgcccagggaagaccaccttttccgcaagttccactatctccccttcctgccctcaactgaggacgtttacgactgcagggtggagcactggggcttggatgagcctcttctcaagcactgggagtttgatgctccaagccctctcccagagactacagagaacgtggtgtgtgccctgggcctgactgtgggtctggtgggcatcattattgggaccatcttcatcatcaagggagtgcgcaaaagcaatgcagcagaacgcagggggcctctgtaaggcacatggaggtgatggtgtttcttagagagaagatcactgaagaaacttctgctttaatgactttacaaagctggcaatattacaatccttgacctcagtgaaagcagtcatcttcagcgttttccagccctatagccaccccaagtgtggttatgcctcctcgattgctccgtactctaacatctagctggcttccctgtctattgccttttcctgtatctattttcctctatttcctatcattttattatcaccatgcaatgcctctggaataaaacatacaggagtctgtctctgctatggaatgccccatggggcatctcttgtgtacttattgtttaaggtttcctcaaactgtgatttttctgaacacaataaactattttgatgataaaaantaattaataatatntaaatgtaatgaaaatctcctacaaatacttactttattatataaatgtttcccacccttttccacacttcattgcagtgttcgatatttctatcaag

SEQ ID NO: 306779 - DNA, 1269 bp, Homo sapiens
gacattctcttttcttttattcttgtctgttctgcctcactcccgagctctactgactcccaacagagcgcccaagaagaaaatggccataagtggagtccctgtgctaggatttttcatcatagctgtgctgatgagcgctcaggaatcatgggctatcaaagaagaacatgtgatcatccaggccgagttctatctgaatcctgaccaatcaggcgagtttatgtttgactttgatggtgatgagattttccatgtggatatggcaaagaaggagacggtctggcggcttgaagaatttggacgatttgccagctttgaggctcaaggtgcattggccaacatagctgtggacaaagccaacctggaaatcatgacaaagcgctccaactatactccgatcaccaatgtacctccagaggtaactgtgctcacgaacagccctgtggaactgagagagcccaacgtcctcatctgtttcatcgacaagttcaccccaccagtggtcaatgtcacgtggcttcgaaatggaaaacctgtcaccacaggagtgtcagagacagtcttcctgcccagggaagaccaccttttccgcaagttccactatctccccttcctgccctcaactgaggacgtttacgactgcagggtggagcactggggcttggatgagcctcttctcaagcactgggagtttgatgctccaagccctctcccagagactacagagaacgtggtgtgtgccctgggcctgactgtgggtctggtgggcatcattattgggaccatcttcatcatcaagggagtgcgcaaaagcaatgcagcagaacgcagggggcctctgtaaggcacatggaggtgatggtgtttcttagagagaagatcactgaagaaacttctgctttaatgactttacaaagctggcaatattacaatccttgacctcagtgaaagcagtcatcttcagcgttttccagccctatagccaccccaagtgtggttatgcctcctcgattgctccgtactctaacatctagctggcttccctgtctattgccttttcctgtatctattttcctctatttcctatcattttattatcaccatgcaatgcctctggaataaaacatacaggagtctgtctctgctatggaatgccccatggggcatctcttgtgtacttattgtttaaggtttcctcaaactgtgatttttctgaacacaataaactattttgatgatatgtagcgtactcggggatcgtctata

SEQ ID NO: 306780 - DNA, 1172 bp, Homo sapiens
tgctcggtacctgcatttactccatggctccctgtgctaggatttttcatcatagctgtgctgatgagcgctcaggaatcatgggctatcaaagaagaacatgtgatcatccaggccgagttctatctgaatcctgaccaatcaggcgagtttatgtttgactttgatggtgatgagattttccatgtggatatggcaaagaaggagacggtctggcggcttgaagaatttggacgatttgccagctttgaggctcaaggtgcattggccaacatagctgtggacaaagccaacctggaaatcatgacaaagcgctccaactatactccgatcaccaatgtacctccagaggtaactgtgctcacgaacagccctgtggaactgagagagcccaacgtcctcatctgtttcatcgacaagttcaccccaccagtggtcaatgtcacgtggcttcgaaatggaaaacctgtcaccacaggagtgtcagagacagtcttcctgcccagggaagaccaccttttccgcaagttccactatctccccttcctgccctcaactgaggacgtttacgactgcagggtggagcactggggcttggatgagcctcttctcaagcactgggagtttgatgctccaagccctctcccagagactacagagaacgtggtgtgtgccctgggcctgactgtgggtctggtgggcatcattattgggaccatcttcatcatcaagggagtgcgcaaaagcaatgcagcagaacgcagggggcctctgtaaggcacatggaggtgatggtgtttcttagagagaagatcactgaagaaacttctgctttaatgactttacaaagctggcaatattacaatccttgacctcagtgaaagcagtcatcttcagcgttttccagccctatagccaccccaagtgtggttatgcctcctcgattgctccgtactctaacatctagctggcttccctgtctattgccttttcctgtatctattttcctctatttcctatcattttattatcaccatgcaatgcctctggaataaaacatacaggagtctgtctctgctatggaatgccccatggggcatctcttgtgtacttattgtttaaggtttcctcaaactgtgatttttctgaacacaataaactattttgatgat

SEQ ID NO: 306781 - DNA, 1342 bp, Homo sapiens
gacattctcttttcttttattcttgtctgttctgcctcactcccgagctctactgactcccaacagagcgcccaagaagaaaatggccataagtggagtccctgtgctaggatttttcatcatagctgtgctgatgagcgctcaggaatcatgggctatcaaagaagaacatgtgatcatccaggccgagttctatctgaatcctgaccaatcaggcgagtttatgtttgactttgatggtgatgagattttccatgtggatatggcaaagaaggagacggtctggcggcttgaagaatttggacgatttgccagctttgaggctcaaggtgcattggccaacatagctgtggacaaagccaacctggaaatcatgacaaagcgctccaactatactccgatcaccaatgtacctccagaggtaactgtgctcacgaacagccctgtggaactgagagagcccaacgtcctcatctgtttcatcgacaagttcaccccaccagtggtcaatgtcacgtggcttcgaaatggaaaacctgtcaccacaggagtgtcagagacagtcttcctgcccagggaagaccaccttttccgcaagttccactatctccccttcctgccctcaactgaggacgtttacgactgcagggtggagcactggggcttggatgagcctcttctcaagcactgggagtttgatgctccaagccctctcccagagactacagagaacgtggtgtgtgccctgggcctgactgtgggtctggtgggcatcattattgggaccatcttcatcatcaagggagtgcgcaaaagcaatgcagcagaacgcagggggcctctgtaaggcacatggaggtgatggtgtttcttagagagaagatcactgaagaaacttctgctttaatgactttacaaagctggcaatattacaatccttgacctcagtgaaagcagtcatcttcagcgttttccagccctatagccaccccaagtgtggttatgcctcctcgattgctccgtactctaacatctagctggcttccctgtctattgccttttcctgtatctattttcctctatttcctatcattttattatcaccatgcaatgcctctggaatctcttgtgtacttattgtttaaggtttcctcaaactgtgatttttctgaacacaataaactattttgatgatacaattaccccctcttccttttttttatatattttttttttattaaatccggtcggcccggcttgggcccaagccacttttagactcgggcaagcttatgcttgcggccgcattcggggctaacttggccaattggccttatagtgg

SEQ ID NO: 306782 - DNA, 916 bp, Homo sapiens
tggattacacactttaatctgattgacactgaggaagtagggaggacatgacaaagcgctccaactatactccgatcaccaatgtacctccagaggtaactgtgctcacgaacagccctgtggaactgagagagcccaacgtcctcatctgtttcatcgacaagttcaccccaccagtggtcaatgtcacgtggcttcgaaatggaaaacctgtcaccacaggagtgtcagagacagtcttcctgcccagggaagaccaccttttccgcaagttccactatctccccttcctgccctcaactgaggacgtttacgactgcagggtggagcactggggcttggatgagcctcttctcaagcactgggagtttgatgctccaagccctctcccagagactacagagaacgtggtgtgtgccctgggcctgactgtgggtctggtgggcatcattattgggaccatcttcatcatcaagggagtgcgcaaaagcaatgcagcagaacgcagggggcctctgtaaggcacatggaggtgatggtgtttcttagagagaagatcactgaagaaacttctgctttaatgactttacaaagctggcaatattacaatccttgacctcagtgaaagcagtcatcttcagcgttttccagccctatagccaccccaagtgtggttatgcctcctcgattgctccgtactctaacatctagctggcttccctgtctattgccttttcctgtatctattttcctctatttcctatcattttattatcaccatgcaatgcctctggaataaaacatacaggagtctgtctctgctatggaatgccccatggggcatctcttgtgtacttattgtttaaggtttcctcaaactgtgatttttctgaacacaataaactattttgatgat

SEQ ID NO: 306783 - DNA, 823 bp, Homo sapiens
  misc_feature (7)..(7): n is a, c, g, or t
tagatcnagctcggtaccggccccctgtggaactgagagagcccaacgtcctcatctgtttcatcgacaagttcaccccaccagtggtcaatgtcacgtggcttcgaaatggaaaacctgtcaccacaggagtgtcagagacagtcttcctgcccagggaagaccaccttttccgcaagttccactatctccccttcctgccctcaactgaggacgtttacgactgcagggtggagcactggggcttggatgagcctcttctcaagcactgggagtttgatgctccaagccctctcccagagactacagagaacgtggtgtgtgccctgggcctgactgtgggtctggtgggcatcattattgggaccatcttcatcatcaagggagtgcgcaaaagcaatgcagcagaacgcagggggcctctgtaaggcacatggaggtgatggtgtttcttagagagaagatcactgaagaaacttctgctttaatgactttacaaagctggcaatattacaatccttgacctcagtgaaagcagtcatcttcagcgttttccagccctatagccaccccaagtgtggttatgcctcctcgattgctccgtactctaacatctagctggcttccctgtctattgccttttcctgtatctattttcctctatttcctatcattttattatcaccatgcaatgcctctggaataaaacatacaggagtctgtctctgctatggaatgccccatggggcatctcttgtgtacttattgtttaaggtttcctcaaactgtgatttttctgaacacaataaactattttgatgat

SEQ ID NO: 306784 - DNA, 1171 bp, Homo sapiens
gacattctcttttcttttattcttgtctgttctgcctcactcccgagctctactgactcccaacagagcgcccaagaagaaaatggccataagtggagtccctgtgctaggatttttcatcatagctgtgctgatgagcgctcaggaatcatgggctatcaaagaagaacatgtgatcatccaggccgagttctatctgaatcctgaccaatcaggcgagtttatgtttgactttgatggtgatgagattttccatgtggatatggcaaagaaggagacggtctggcggcttgaagaatttggacgatttgccagctttgaggctcaaggtgcattggccaacatagctgtggacaaagccaacctggaaatcatgacaaagcgctccaactatactccgatcaccaatgtacctccagaggtaactgtgctcacgaacagccctgtggaactgagagagcccaacgtcctcatctgtttcatcgacaagttcaccccaccagtggtcaatgtcacgtggcttcgaaatggaaaacctgtcaccacaggagtgtcagagacagtcttcctgcccagggaagaccaccttttccgcaagttccactatctccccttcctgccctcaactgaggacgtttacgactgcagggtggagcactggggcttggatgagcctcttctcaagcactgggagtttgatgctccaagccctctcccagagactacagagaacgtggtgtgtgccctgggcctgactgtgggtctggtgggcatcattattgggaccatcttcatcatcaagggagtgcgcaaaagcaatgcagcagaacgcagggggcctctgtaaggcacatggaggtgatggtgtttcttagagagaagatcactgaagaaacttctgctttaatgactttacaaagctggcaatattacaatccttgacctcagtgaaagcagtcatcttcagcgttttccagccctatagccaccccaagtgtggttatgcctcctcgattgctccgtactctaacatctagctggcttccctgtctattgccttttcctgtatctattttcctctatttccccttcctgccctcaactgaggacgtttacgactgcagggtggagcactggggcttggatgagcctcttctcaagcactgggggt

SEQ ID NO: 306785 - DNA, 1061 bp, Homo sapiens
  misc_feature (1045)..(1045): n is a, c, g, or t
gacattctcttttcttttattcttgtctgttctgcctcactcccgagctctactgactcccaacagagcgcccaagaagaaaatggccataagtggagtccctgtgctaggatttttcatcatagctgtgctgatgagcgctcaggaatcatgggctatcaaagaagaacatgtgatcatccaggccgagttctatctgaatcctgaccaatcaggcgagtttatgtttgactttgatggtgatgagattttccatgtggatatggcaaagaaggagacggtctggcggcttgaagaatttggacgatttgccagctttgaggctcaaggtgcattggccaacatagctgtggacaaagccaacctggaaatcatgacaaagcgctccaactatactccgatcaccaatgtacctccagaggtaactgtgctcacgaacagccctgtggaactgagagagcccaacgtcctcatctgtttcatcgacaagttcaccccaccagtggtcaatgtcacgtggcttcgaaatggaaaacctgtcaccacaggagtgtcagagacagtcttcctgcccagggaagaccaccttttccgcaagttccactatctccccttcctgccctcaactgaggacgtttacgactgcagggtggagcactggggcttggatgagcctcttctcaagcactgggagtttgatgctccaagccctctcccagagactacagagaacgtggtgtgtgccctgggcctgactgtgggtctggtgggcatcattattgggaccatcttcatcatcaagggagtgcgcaaaagcaatgcagcagaacgcagggggcctctgtaaggcacatggaggtgatggtgtttcttagagagaagatcactgaagaaacttctgctttaatgactttacaaagctggcaatattacaatccttgacctcagtgaaagcagtcatcttcagcgttttccagccctatagccaccccaagtgtggttatgcctcctcgattgctccgtactctaacatctagctcaaatnatgggtgccaggctca

SEQ ID NO: 306786 - DNA, 1531 bp, Homo sapiens
gacattctcttttcttttattcttgtctgttctgcctcactcccgagctctactgactcccaacagagcgcccaagaagaaaatggccataagtggagtccctgtgctaggatttttcatcatagctgtgctgatgagcgctcaggaatcatgggctatcaaagaagaacatgtgatcatccaggccgagttctatctgaatcctgaccaatcaggcgagtttatgtttgactttgatggtgatgagattttccatgtggatatggcaaagaaggagacggtctggcggcttgaagaatttggacgatttgccagctttgaggctcaaggtgcattggccaacatagctgtggacaaagccaacctggaaatcatgacaaagcgctccaactatactccgatcaccaatgtacctccagaggtaactgtgctcacgaacagccctgtggaactgagagagcccaacgtcctcatctgtttcatcgacaagttcaccccaccagtggtcaatgtcacgtggcttcgaaatggaaaacctgtcaccacaggagtgtcagagacagtcttcctgcccagggaagaccaccttttccgcaagttccactatctccccttcctgccctcaactgaggacgtttacgactgcagggtggagcactggggcttggatgagcctcttctcaagcactgggagtttgatgctccaagccctctcccagagactacagagaacgtggtgtgtgccctgggcctgactgtgggtctggtgggcatcattattgggaccatcttcatcatcaagggagtgcgcaaaagcaatgcagcagaacgcagggggcctctgtaaggcacatggagtggggttcttagagagaagatcactgaagaaacttctgctttaatgactttacaaagctggcaatattacaatccttgacctcagtgaaagcagtcatcttcagcgttttccagccctatagccaccccaagtgtggtgatggtgtttcttagagagaagatcactgaagaaacttctgctttaatgactttacaaagctggcaatattacaatccttgacctcagtgaaagcagtcatcttcagcgttttccagccctatagccaccccaagtgtggttatgcctcctcgattgctccgtactctaacatctagctggcttccctgtctattgccttttcctgtatctattttcctctatttcctatcattttattatcaccatgcaatgcctctggaataaaacatacaggagtctgtctctgctatggaatgccccatggggcatctcttgtgtacttattgtttaaggtttcctcaaactgtgatttttctgaacacaataaactattttgatgatcttgggtggaatttttggtgtttaagccagttctttgggtggcggtggggggtggggagtcggtcctggggaatatatgtgatcctttcccggtaaaatatctgaatgttgaatttatcttataaattctagaattcatcagacatatcccgg

SEQ ID NO: 306787 - DNA, 1193 bp, Homo sapiens
gacattctcttttcttttattcttgtctgttctgcctcactcccgagctctactgactcccaacagagcgcccaagaagaaaatggccataagtggagtccctgtgctaggatttttcatcatagctgtgctgatgagcgctcaggaatcatgggctatcaaagaagaacatgtgatcatccaggccgagttctatctgaatcctgaccaatcaggcgagtttatgtttgactttgatggtgatgagattttccatgtggatatggcaaagaaggagacggtctggcggcttgaagaatttggacgatttgccagctttgaggctcaaggtgcattggccaacatagctgtggacaaagccaacctggaaatcatgacaaagcgctccaactatactccgatcaccaatgtacctccagaggtaactgtgctcacgaacagccctgtggaactgagagagcccaacgtcctcatctgtttcatcgacaagttcaccccaccagtggtcaatgtcacgtggcttcgaaatggaaccaccttttccgcaagttccactatctccccttcctgccctcaactgaggacgtttacgactgcagggtggagcactggggcttggatgagcctcttctcaagcactgggagtttgatgctccaagccctctcccagagactacagagaacgtggtgtgtgccctgggcctgactgtgggtctggtgggcatcattattgggaccatcttcatcatcaagggagtgcgcaaaagcaatgcagcagaacgcagggggcctctgtaaggcacatggaggtgatggtgtttcttagagagaagatcactgaagaaacttctgctttaatgactttacaaagctggcaatattacaatccttgacctcagtgaaagcagtcatcttcagcgttttccagccctatagccaccccaagtgtggttatgcctcctcgattgctccgtactctaacatctagctggcttccctgtctattgccttttcctgtatctattttcctctatttcctatcattttattatcaccatgcaatgcctctggaataaaacatacaggagtctgtctctgctatggaatgccccatggggcatctcttgtgtacttattgtttaaggtttcctcaaactgtgatttttctgaacacaataaactattttgatgat

SEQ ID NO: 306788 - DNA, 1226 bp, Homo sapiens
gacattctcttttcttttattcttgtctgttctgcctcactcccgagctctactgactcccaacagagcgcccaagaagaaaatggccataagtggagtccctgtgctaggatttttcatcatagctgtgctgatgagcgctcaggaatcatgggctatcaaagaagaacatgtgatcatccaggccgagttctatctgaatcctgaccaatcaggcgagtttatgtttgactttgatggtgatgagattttccatgtggatatggcaaagaaggagacggtctggcggcttgaagaatttggacgatttgccagctttgaggctcaaggtgcattggccaacatagctgtggacaaagccaacctggaaatcatgacaaagcgctccaactatactccgatcaccaatgtacctccagaggtaactgtgctcacgaacagccctgtggaactgagagagcccaacgtcctcatctgtttcatcgacaagttcaccccaccagtggtcaatgtcacgtggcttcgaaatggaaaacctgtcaccacaggagtgtcagagacagtcttcctgcccagggaagaccaccttttccgcaagttccactatctccccttcctgccctcaactgaggacgtttacgactgcagggtggagcactggggcttggatgagcctcttctcaagcactgggagtttgatgctccaagccctctcccagagactacagagaacgtggtgtgtgccctgggcctgactgtgggtctggtgggcatcattattgggaccatcttcatcatcaagggagtgcgcaaaagcaatgcagcagaacgcagggggcctctgtaaggcacatggaggtgatggtgtttcttagagagaagatcactgaagaaacttctgctttaatgactattacaatccttgacctcagtgaaagcagtcatcttcagcgttttccagccctatagccaccccaagtgtggttatgcctcctcgattgctccgtactctaacatctagctggcttccctgtctattgccttttcctgtatctattttcctctatttcctatcattttattatcaccatgcaatgcctctggaataaaacatacaggagtctgtctctgctatggaatgccccatggggcatctcttgtgtacttattgtttaaggtttcctcaaactgtgatttttctgaacacaataaactattttgatgat

SEQ ID NO: 306789 - DNA, 1092 bp, Homo sapiens
tgctcggtacctgcatttactccatggctccctgtgctaggatttttcatcatagctgtgctgatgagcgctcaggaatcatgggctatcaaagaagaacatgtgatcatccaggccgagttctatctgaatcctgaccaatcaggcgagtttatgtttgactttgatggtgatgagattttccatgtggatatggcaaagaaggagacggtctggcggcttgaagaatttggacgatttgccagctttgaggctcaaggtgcattggccaacatagctgtggacaaagccaacctggaaatcatgacaaagcgctccaactatactccgatcaccaatgttcaccccaccagtggtcaatgtcacgtggcttcgaaatggaaaacctgtcaccacaggagtgtcagagacagtcttcctgcccagggaagaccaccttttccgcaagttccactatctccccttcctgccctcaactgaggacgtttacgactgcagggtggagcactggggcttggatgagcctcttctcaagcactgggagtttgatgctccaagccctctcccagagactacagagaacgtggtgtgtgccctgggcctgactgtgggtctggtgggcatcattattgggaccatcttcatcatcaagggagtgcgcaaaagcaatgcagcagaacgcagggggcctctgtaaggcacatggaggtgatggtgtttcttagagagaagatcactgaagaaacttctgctttaatgactttacaaagctggcaatattacaatccttgacctcagtgaaagcagtcatcttcagcgttttccagccctatagccaccccaagtgtggttatgcctcctcgattgctccgtactctaacatctagctggcttccctgtctattgccttttcctgtatctattttcctctatttcctatcattttattatcaccatgcaatgcctctggaataaaacatacaggagtctgtctctgctatggaatgccccatggggcatctcttgtgtacttattgtttaaggtttcctcaaactgtgatttttctgaacacaataaactattttgatgat

SEQ ID NO: 306790 - DNA, 1531 bp, Homo sapiens
gacattctcttttcttttattcttgtctgttctgcctcactcccgagctctactgactcccaacagagcgcccaagaagaaaatggccataagtggagtccctgtgctaggatttttcatcatagctgtgctgatgagcgctcaggaatcatgggctatcaaagaagaacatgtgatcatccaggccgagttctatctgaatcctgaccaatcaggcgagtttatgtttgactttgatggtgatgagattttccatgtggatatggcaaagaaggagacggtctggcggcttgaagaatttggacgatttgccagctttgaggctcaaggtgcattggccaacatagctgtggacaaagccaacctggaaatcatgacaaagcgctccaactatactccgatcaccaatgtacctccagaggtaactgtgctcacgaacagccctgtggaactgagagagcccaacgtcctcatctgtttcatcgacaagttcaccccaccagtggtcaatgtcacgtggcttcgaaatggaaaacctgtcaccacaggagtgtcagagacagtcttcctgcccagggaagaccaccttttccgcaagttccactatctccccttcctgccctcaactgaggacgtttacgactgcagggtggagcactggggcttggatgagcctcttctcaagcactggggtatggaccaacactcaatctcctttatttcaaggtttcctcctatgatgcttgtgtgaaactcggtgttctaactgtttcataatatctgctacaattaatataactgtcttctcctactatccagcttcctcctttttttaatctgtaattctctcaatacatcattctgtcttcctcttctttaatctatgaataacttttctctttattaagaaccctacatttgattctgagtgttacttcttcccacactcattaccatgtactctgccttatttccccccagagtttgatgctccaagccctctcccagagactacagagaacgtggtgtgtgccctgggcctgactgtgggtctggtgggcatcattattgggaccatcttcatcatcaagggagtgcgcaaaagcaatgcagcagaacgcagggggcctctgtaaggcacatggaggtgatggtgtttcttagagagaagatcactgaagaaacttctgctttaatgactttacaaagctggcaatattacaatccttgacctcagtgaaagcagtcatcttcagcgttttccagccctatagccaccccaagtgtggttatgcctcctcgattgctccgtactctaacatctagctggcttccctgtctattgccttttcctgtatctattttcctctatttcctatcattttattatcaccatgcaatgcctctggaataaaacatacaggagtctgtctctgctatggaatgccccatggggcatctcttgtgtacttattgtttaaggtttcctcaaactgtgatttttctgaacacaataaactattttgatgat

SEQ ID NO: 306791 - DNA, 919 bp, Homo sapiens
  misc_feature (883)..(883): n is a, c, g, or t
gacattctcttttcttttattcttgtctgttctgcctcactcccgagctctactgactcccaacagagcgcccaagaagaaaatggccataagtggagtccctgtgctaggatttttcatcatagctgtgctgatgagcgctcaggaatcatgggctatcaaagaagaacatgtgatcatccaggccgagttctatctgaatcctgaccaatcaggcgagtttatgtttgactttgatggtgatgagattttccatgtggatatggcaaagaaggagacggtctggcggcttgaagaatttggacgatttgccagctttgaggctcaaggtgcattggccaacatagctgtggacaaagccaacctggaaatcatgacaaagcgctccaactatactccgatcaccaatgtacctccagaggtaactgtgctcacgaacagccctgtggaactgagagagcccaacgtcctcatctgtttcatcgacaagttcaccccaccagtggtcaatgtcacgtggcttcgaaatggaaaacctgtcaccacaggagtgtcagagacagtcttcctgcccagggaagaccaccttttccgcaagttccactatctccccttcctgccctcaactgaggacgtttacgactgcagggtggagcactggggcttggatgagcctcttctcaagcactgggagtttgatgctccaagccctctcccagagactacagagaacgtggtgtgtgccctgggcctgactgtgggtctggtgggcatcattattgggaccatcttcatcatcaagggagtgcgcaaaagcaatgcagcagaacgcagggggcctctgtaaggcacatggagtgatgtttcttagagagaagaattntccccaaaaccctttgggggaaaaaaaggggaaaaa

SEQ ID NO: 306792 - DNA, 1340 bp, Homo sapiens
gacattctcttttcttttattcttgtctgttctgcctcactcccgagctctactgactcccaacagagcgcccaagaagaaaatggccataagtggagtccctgtgctaggatttttcatcatagctgtgctgatgagcgctcaggaatcatgggctatcaaagaagaacatgtgatcatccaggccgagttctatctgaatcctgaccaatcaggcgagtttatgtttgactttgatggtgatgagattttccatgtggatatggcaaagaaggagacggtctggcggcttgaagaatttggacgatttgccagctttgaggctcaaggtgcattggccaacatagctgtggacaaagccaacctggaaatcatgacaaagcgctccaactatactccgatcaccaatgtacctccagaggtaactgtgctcacgaacagccctgtggaactgagagagcccaacgtcctcatctgtttcatcgacaagttcaccccaccagtggtcaatgtcacgtggcttcgaaatggaaaacctgtcaccacaggagtgtcagagacagtcttcctgcccagggaagaccaccttttccgcaagttccactatctccccttcctgccctcaactgaggacgtttacgactgcagggtggagcactggggcttggatgagcctcttctcaagcactgggagtttgatgctccaagccctctcccagagactacagagaacgtggtgtgtgccctgggcctgactgtgggtctggtgggcatcattattgggaccatcttcatcatcaagggtgatggtgtttcttagagagaagatcactgaagaaacttctgctttaatgactttacaaagctggcaatattacaatccttgacctcagtgaaagcagtcatcttcagcgttttccagccctatagccaccccaagtgtggttatgcctcctcgattgctccgtactctaacatctagctggcttccctgtctattgccttttcctgtatctattttcctctatttcctatcattttattatcaccatgcaatgcctctggaataaaacatacaggagtctgtctctgctatggaatgccccatggggcatctcttgtgtacttattgtttaaggtttcctcaaactgtgatttttctgaacacaataaactattttgatgatcttgggtggaatttttggtgtttaagccagttctttgggtggcggtggggggtggggagtcggtcctggggaatatatgtgatcctttcccggtaaaatatctgaatgttgaatttatcttataaattctagaattcatcagacatatcccgg

SEQ ID NO: 306793 - DNA, 848 bp, Homo sapiens
  misc_feature (821)..(821): n is a, c, g, or t
gacattctcttttcttttattcttgtctgttctgcctcactcccgagctctactgactcccaacagagcgcccaagaagaaaatggccataagtggagtccctgtgctaggatttttcatcatagctgtgctgatgagcgctcaggaatcatgggctatcaaagaagaacatgtgatcatccaggccgagttctatctgaatcctgaccaatcaggcgagtttatgtttgactttgatggtgatgagattttccatgtggatatggcaaagaaggagacggtctggcggcttgaagaatttggacgatttgccagctttgaggctcaaggtgcattggccaacatagctgtggacaaagccaacctggaaatcatgacaaagcgctccaactatactccgatcaccaatgtacctccagaggtaactgtgctcacgaacagccctgtggaactgagagagcccaacgtcctcatctgtttcatcgacaagttcaccccaccagtggtcaatgtcacgtggcttcgaaatggaaaacctgtcaccacaggagtgtcagagacagtcttcctgcccagggaagaccaccttttccgcaagttccactatctccccttcctgccctcaactgaggacgtttacgactgcagggtggagcactggggcttggatgagcctcttctcaagcactgggagtttgatgctccaagccctctcccagagactacagagaacgtggtgtgtgccctgggcctgactgtgggtctggtgggcatcattattgggaccatcttcatcatcaaggcaattccacaggggccantccacaggggccggtaccgagctgatt

SEQ ID NO: 306794 - DNA, 1486 bp, Homo sapiens
gacattctcttttcttttattcttgtctgttctgcctcactcccgagctctactgactcccaacagagcgcccaagaagaaaatggccataagtggagtccctgtgctaggatttttcatcatagctgtgctgatgagcgctcaggaatcatgggctatcaaagaagaacatgtgatcatccaggccgagttctatctgaatcctgaccaatcaggcgagtttatgtttgactttgatggtgatgagattttccatgtggatatggcaaagaaggagacggtctggcggcttgaagaatttggacgatttgccagctttgaggctcaaggtgcattggccaacatagctgtggacaaagccaacctggaaatcatgacaaagcgctccaactatactccgatcaccaatgtacctccagaggtaactgtgctcacgaacagccctgtggaactgagagagcccaacgtcctcatctgtttcatcgacaagttcaccccaccagtggtcaatgtcacgtggcttcgaaatggaaaacctgtcaccacaggagtgtcagagacagtcttcctgcccagggaagaccaccttttccgcaagttccactatctccccttcctgccctcaactgaggacgtttacgactgcagggtggagcactggggcttggatgagcctcttctcaagcactggggtatggaccaacactcaatctcctttatttcaaggtttcctcctatgatgcttgtgtgaaactcggtgttctaactgtttcataatatctgctacaattaatataactgtcttctcctactatccagcttcctcctttttttaatctgtaattctctcaatacatcattctgtcttcctcttctttaatctatgaataacttttctctttattaagaaccctacatttgattctgagtgttacttcttcccacactcattaccatgtactctgccttatttccccccagagtttgatgctccaagccctctcccagagactacagagaacgtggtgtgtgccctgggcctgactgtgggtctggtgggcatcattattgggaccatcttcatcatcaagggagtgcgcaaaagcaatgcagcagaacgcagggggcctctgtaaggcacatggaggtgatggtgtttcttagagagaagatcactgaagaaacttctgctttaatgactttacaaagctggcaatattacaatccttgacctcagtgaaagcagtcatcttcagcgttttccagccctatagccaccccaagtgtggttatgcctcctcgattgctccgtactctaacatctagcttcctatcattttattatcaccatgcaatgcctctggaataaaacatacaggagtctgtctctgctatggaatgccccatggggcatctcttgtgtacttattgtttaaggtttcctcaaactgtgatttttctgaacacaataaactattttgatgat

SEQ ID NO: 306795 - DNA, 619 bp, Homo sapiens
ttcaaaatagtttattgtgttcagaaaaatcacagtttgaggaaaccttaaacaataagtcacaagagatgccccatggggcattccatagcagagacagactcctgtatgttttattccagaggcattgcatggtgataataaaatgataggaaatagaggaaaatagatacaggaaaagagtgcgcaaaagcaatgcagcagaacgcagggggcctctgtaaggcacatggaggtgatggtgtttcttagagagaagatcactgaagaaacttctgctttaatgactttacaaagctggcaatattacaatccttgacctcagtgaaagcagtcatcttcagcgttttccagccctatagccaccccaagtgtggttatgcctcctcgattgctccgtactctaacatctagctggcttccctgtctattgccttttcctgtatctattttcctctatttcctatcattttattatcaccatgcaatgcctctggaataaaacatacaggagtctgtctctgctatggaatgccccatggggcatctcttgtgtacttattgtttaaggtttcctcaaactgtgatttttctgaacacaataaactattttgatgat

SEQ ID NO: 306796 - DNA, 673 bp, Homo sapiens
gacattctcttttcttttattcttgtctgttctgcctcactcccgagctctactgactcccaacagagcgcccaagaagaaaatggccataagtggagtccctgtgctaggatttttcatcatagctgtgctgatgagcgctcaggaatcatgggctatcaaagaagaacatgtgatcatccaggccgagttctatctgaatcctgaccaatcaggcgagtttatgtttgactttgatggtgatgagattttccatgtggatatggcaaagaaggagacggtctggcggcttgaagaatttggacgatttgccagctttgaggctcaaggtgcattggccaacatagctgtggacaaagccaacctggaaatcatgacaaagcgctccaactatactccgatcaccaatgtacctccagaggtaactgtgctcacgaacagccctgtggaactgagagagcccaacgtcctcatctgtttcatcgacaagttcaccccaccagtggtcaatgtcacgtggcttcgaaatggaaaacctgtcaccacaggagtgtcagagacagtcttcctgcccagggaagaccaccttttccgcaagttccactatctccccttcctgccctcaactgaggacgtttacgactgcttggataaaaggaggccgagctcgatt

SEQ ID NO: 306797 - DNA, 553 bp, Homo sapiens
tggattacacactttaatctgattgacactgaggaagtagggaggacatgacaaagcgctccaactatactccgatcaccaatgtacctccagaggtaactgtgctcacgaacagccctgtggaactgagagagcccaacgtcctcatctgtttcatcgacaagttcaccccaccagtggtcaatgtcacgtggcttcgaaatggaaaacctgtcaccacaggagtgtcagagacagtcttcctgcccagggaagaccaccttttccgcaagttccactatctccccttcctgccctcaactgaggacgtttacgactgcagggtggagcactggggcttggatgagcctcttctcaagcactgggagtttgatgctccaagccctctcccagagactacagagaacgtggtgtgtgccctgggcctgactgtgggtctggtgggcatcattattgggaccatcttcatcatcaagggagtgcgcaaaagcaatgcagcagaacgcagggggcctctgtaaggcacatggaggtgagttaggtgtggtcagag

SEQ ID NO: 306798 - DNA, 595 bp, Homo sapiens
ggaagaattcctggtggtgatggaagaattcccggtggtgatggaagaattcctggtggtgatggtgtttcttagagagaagatcactgaagaaacttctgctttaatgactttacaaagctggcaatattacaatccttgacctcagtgaaagcagtcatcttcagcgttttccagccctatagccaccccaagtgtggttatgcctcctcgattgctccgtactctaacatctagctggcttccctgtctattgccttttcctgtatctattttcctctatttcctatcattttattatcaccatgcaatgcctctggaataaaacatacaggagtctgtctctgctatggaatgccccatggggcatctcttgtgtacttattgtttaaggtttcctcaaactgtgatttttctgaacacaataaactattttgatgatcttgggtggaatttttggtgtttaagccagttctttgggtggcggtggggggtggggagtcggtcctggggaatatatgtgatcctttcccggtaaaatatctgaatgttgaatttatcttataaattctagaattcatcagacatatcccgg

SEQ ID NO: 306799 - DNA, 566 bp, Homo sapiens
cgcagggggcctctgtaaggcacatggaggtgatggtgtttcttagagagaagatcactgaagaaacttctgctttaatgactttacaaagctggcaatattacaatccttgacctcagtgaaagcagtcatcttcagcgttttccagccctatagccaccccaagtgtggttatgcctcctcgattgctccgtactctaacatctagctggcttccctgtctattgccttttcctgtatctattttcctctatttcctatcattttattatcaccatgcaatgcctctggaataaaacatacaggagtctgtctctgctatggaatgccccatggggcatctcttgtgtacttattgtttaaggtttcctcaaactgtgatttttctgaacacaataaactattttgatgatcttgggtggaatttttggtgtttaagccagttctttgggtggcggtggggggtggggagtcggtcctggggaatatatgtgatcctttcccggtaaaatatctgaatgttgaatttatcttataaattctagaattcatcagacatatcccgg

SEQ ID NO: 306800 - DNA, 681 bp, Homo sapiens
  misc_feature (143)..(143): n is a, c, g, or t
tcaacttttgataggagatatcgtcttgattgccctgagcctgactgcgtgtctggaggagatcattattttgccatgggcatgttcatataggcgcagaggcaatgcttcgaatcccggtgttcctctgttatgcacatggnggtgatggtgtttcttagagagaagatcactgaagaaacttctgctttaatgactttacaaagctggcaatattacaatccttgacctcagtgaaagcagtcatcttcagcgttttccagccctatagccaccccaagtgtggttatgcctcctcgattgctccgtactctaacatctagctggcttccctgtctattgccttttcctgtatctattttcctctatttcctatcattttattatcaccatgcaatgcctctggaataaaacatacaggagtctgtctctgctatggaatgccccatggggcatctcttgtgtacttattgtttaaggtttcctcaaactgtgatttttctgaacacaataaactattttgatgatcttgggtggaatttttggtgtttaagccagttctttgggtggcggtggggggtggggagtcggtcctggggaatatatgtgatcctttcccggtaaaatatctgaatgttgaatttatcttataaattctagaattcatcagacatatcccgg

SEQ ID NO: 306801 - DNA, 581 bp, Homo sapiens
  misc_feature (37)..(37): n is a, c, g, or t
ccgttgtgaggctcttcgggtggcccgttgtgtggcncatggaggtgatggtgtttcttagagagaagatcactgaagaaacttctgctttaatgactttacaaagctggcaatattacaatccttgacctcagtgaaagcagtcatcttcagcgttttccagccctatagccaccccaagtgtggttatgcctcctcgattgctccgtactctaacatctagctggcttccctgtctattgccttttcctgtatctattttcctctatttcctatcattttattatcaccatgcaatgcctctggaataaaacatacaggagtctgtctctgctatggaatgccccatggggcatctcttgtgtacttattgtttaaggtttcctcaaactgtgatttttctgaacacaataaactattttgatgatcttgggtggaatttttggtgtttaagccagttctttgggtggcggtggggggtggggagtcggtcctggggaatatatgtgatcctttcccggtaaaatatctgaatgttgaatttatcttataaattctagaattcatcagacatatcccgg

SEQ ID NO: 306802 - DNA, 1321 bp, Homo sapiens
  misc_feature (5)..(5): n is a, c, g, or t
  misc_feature (16)..(16): n is a, c, g, or t
  misc_feature (24)..(24): n is a, c, g, or t
  misc_feature (770)..(770): n is a, c, g, or t
cgcgnccgcgcgacgntgcgagangacgacagaaggggggcctctgtaaggcacatggaggtgatggtgtttcttagagagaagatcactgaagaaacttctgctttaatgactttacaaagctggcaatattacaatccttgacctcagtgaaagcagtcatcttcagcgttttccagccctatagccaccccaagtgtggttatgcctcctcgattgctccgtactctaacatctagctggcttccctgtctattgccttttcctgtatctattttcctctatttcctatcattttattatcaccatgcaatgcctctggaataaaacatacaggagtctgtctctgctatggaatgccccatggggcatctcttgtgtacttattgtttaaggtttcctcaaactgtgatttttctgaacacaataaactattttgatgattgaaaaaaaaaaaaaaaaaaaaaaaaaaaaaaaaaaaaaaaagggggggggcccccaaaaattcccccggagggggcgcccaaaggaatatacgcggatatacccgaggttatcttgtggaaccaagaggggcgcccccataataggagagagagcgcggaattataaagcgacgcaaagagcgagcccaggggccagcgaggttataaacaacgtaggagcacgcgggcgacaacacgtgaacacaagggaggaacccctgcgggaaagaggaacaccataaaacacgggcggagggcggggacacaacagtggcgggaccaccnacacctcccccacaaagagagactattaaaacgccctcatgagggagaaacaatcaataaaacattcaacaacgggctatacaaacggggggggttacacaacaccaccaagggcggacaaattaatgacagagcgacagcgtactgggacaaaacaagtattgggcgcaccaaccgagggagatttctaagcgtacatatagcagacaaacaatttttttttttaccaccacggggaggcgaaggatcgagtacatcgaacaacacatcagacgaaaagcgcaacacgcgacgaccacgcagcacaaccggccgaaaagaccggccgacacggccagccagcaccgacacgacgcgacgcccgcacaaccaagaccggaccaaggcggcaagcgtcaatccgaacgagagcacacagaagagaaagacgagaacggcacgcgcggccagcgacgcaagagcacgctgacacaaaagcgcactccgcgcgcacacacgcgaaccaaccacacctacaccacccacaacgccacccaaccgacgcacccacc

SEQ ID NO: 306803 - DNA, 665 bp, Homo sapiens
tgctcggtacctgcatttactccatggctccctgtgctaggatttttcatcatagctgtgctgatgagcgctcaggaatcatgggctatcaaagaagaacatgtgatcatccaggccgagttctatctgaatcctgaccaatcaggcgagtttatgtttgactttgatggtgatgagattttccatgtggatatggcaaagaaggagacggtctggcggcttgaagaatttggacgatttgccagctttgaggctcaaggtgcattggccaacatagctgtggacaaagccaacctggaaatcatgacaaagcgctccaactatactccgatcaccaatgtacctccagaggtaactgtgctcacgaacagccctgtggaactgagagagcccaacgtcctcatctgtttcatcgacaagttcaccccaccagtggtcaatgtcacgtggcttcgaaatggaggcttccctgtctattgccttttcctgtatctattttcctctatttcctatcattttattatcaccatgcaatgcctctggaataaaacatacaggagtctgtctctgctatggaatgccccatggggcatctcttgtgtacttattgtttaaggtttcctcaaactgtgatttttctgaacacaataaactattttgatgat

SEQ ID NO: 306804 - DNA, 591 bp, Homo sapiens
cttgtcttgtcactcatccctactcgccatcattctttcattcctcttggccaatctctctccactacttcctgcctacatgtatgtaggttattcatttccctctcttgattccccccacccaactctctttctccatttctcgcctttcagaagaacatgtgatcatccaggccgagttctatctgaatcctgaccaatcaggcgagtttatgtttgactttgatggtgatgagattttccatgtggatatggcaaagaaggagacggtctggcggcttgaagaatttggacgatttgccagctttgaggctcaaggtgcattggccaacatagctgtggacaaagccaacctggaaatcatgacaaagcgctccaactatactccgatcaccaatggtacctccctctctgctgcactcctggacatgggaatccatagtttgaaagtagttgcttcagctctttgtgttagattattgtaactgattttccctccaagggcctaaccttgccattaacaagccccaaattctcatgccagaggtctgagaactttatgggtttgatcctatcttgttgtgctcaagt

SEQ ID NO: 306805 - DNA, 6722 bp, Homo sapiens
aactgggcaggaggggatagggtccggcgcctcgccctttcccgaggcgcctgcgcactaggcagtcggtctttgccgttaccgctatgtgtggggcgtgtgtggaataacgttattgcccagcggagctgagggccccggagctcgaccgcagcggcagcgacgacaacagcggcgacgacgacgacgacgaggtggggggaggacggcgtgcgagagactcacgggacgcgacgcgccccgcctcccccgtccggtccctctctccacggtaaggggatgacgtagctttgccaaagacttagaagctaagcagaaaatgagcttaacatcctggtttttggtgagcagtggaggcactcgccacaggctgccacgagaaatgatttttgttggaagagatgactgtgagctcatgttgcagtctcgtagtgtggataagcaacacgctgtcatcaactatgatgcgtctacggatgagcatttagtgaaggatttgggcagcctcaatgggacttttgtgaatgatgtaaggattccggaacagacttatatcaccttgaaacttgaagataagctgagatttggatatgatacaaatcttttcactgtagtacaaggagaaatgagggtccctgaagaagctcttaagcatgagaagtttaccattcagcttcagttgtcccaaaaatcttcagaatcagaattatccaaatctgcaagtgccaaaagcatagattcaaaggtagcagacgctgctactgaagtgcagcacaaaactactgaagcactgaaatccgaggaaaaagccatggatatttctgctatgccccgtggtactccattatatgggcagccgtcatggtggggggatgatgaggtggatgaaaaaagagctttcaagacaaatggcaaacctgaagaaaaaaaccatgaagctggaacatcagggtgcagcatagatgccaagcaagttgaggaacaatctgcagctgcaaatgaagaagtactttttcctttctgtagggaaccaagttattttgaaatccctacaaaagaattccagcaaccatcacaaataacagaaagcactattcatgaaatcccaacaaaagacacgccaagttcccatataacaggtgcagggcatgcttcatttaccattgaatttgatgacagtaccccagggaaggtaactattagagaccatgtgacaaagtttacttctgatcagcgccacaagtccaagaagtcttctcctggaactcaagacttgctggggattcaaacaggaatgatggcacccgaaaacaaagttgctgactggctagcacaaaacaaccctcctcaaatgctatgggaaagaacagaagaggattctaaaagcattaaaagtgatgttccagtgtacttgaaaaggttgaaaggaaataaacatgatgatggtacgcaaagtgattcagagaacgctggggctcacaggcgctgtagcaaacgtgcaactcttgaggaacacttaagacgccaccattcagaacacaaaaagctacagaaggtccaggctactgaaaagcatcaagaccaagctgttgtgtttggagtagatgacaatcaggattataataggcctgttatcaacgaaaaacataaagatctaataaaagattgggctctcagttctgctgcagcagtaatggaagaaagaaaaccactgactacatctggatttcaccactcagaggaaggcacatcttcatctggaagcaaacgttgggtttcacagtgggctagtttggctgccaatcatacaaggcatgatcaagaagaaaggataatggaattttctgcacctcttcctttagagaatgagacagagatcagtgagtctggcatgacagtgagaagtactggctctgcaacttccttggctagccagggagagagaaggagacgaactcttccccagcttccaaatgaagaaaagtctcttgagagccacagagcaaaggttgtaacacagaggtcagagataggagaaaaacaagacacagaacttcaggagaaagaaacacctacacaggtataccagaaagataaacaagatgctgacagacccttgagtaaaatgaacagggcagtaaatggagagactctcaaaactggtggagataataaaaccctacttcacttaggcagctctgctcctggaaaagagaaaagtgaaactgataaggaaacttctttggtaaagcaaacattagcaaaacttcaacaacaagaacaaagggaggaggctcagtggacacctactaaattgtcttccaaaaatgtttcaggtcagacagataaatgtagggaggaaacttttaaacaagaatcacaacctccagaaaaaaattcaggacattctacaagcaaaggagacagagtggcacaaagtgagagcaagagaagaaaagctgaggaaattctgaaaagtcagactccaaagggaggagacaagaaggaatcctccaagtcattagtgcgacaagggagcttcactatagaaaaacccagcccaaacatacccatagaacttattccccatataaataaacagacttcctctactccttcttctttagcattaacatctgcaagtagaatacgagaaagaagtgagtctttggatcctgattctagtatggacacaacccttattctaaaagacacagaagcagtaatggcttttctagaagctaaactacgtgaagataataaaactgatgaaggaccagatactcccagttataatagagacaattctatttcaccagaatctgatgtagatacagctagtacaatcagtctggttactggagaaactgaaagaaagtcaacccaaaagcgaaagagtttcactagcctctataaagataggtgttccacaggttctccttccaaagatgttacaaaatcatcatcttcaggtgctagggaaaaaatggaaaagaaaacaaaaagtcgttccacagatgtgggttcaagagcagatggtcgtaaatttgttcagtccagtgggagaataagacagccctcagtagacttaacagatgatgaccaaacctctagtgtacctcattctgccatctctgatattatgtcatctgatcaagaaacttactcttgtaaacctcatggacggactccacttacctcagctgatgagcatgtacattccaaactggaaggaagtaaagtaacgaaatctaagacttctccggtggtatctggttcatctagtaaatcaaccacccttccaaggccacgacctaccaggacttccctcttgcgcagagcacgacttggtgaagcttcagacagtgaacttgctgatgctgacaaagcatctgttgcttctgaagtatccacaacaagttctacatcaaaacctcccacaggaaggcgtaacatctctcggattgatttattggctcagcctcgtagaacacgacttggctcactgtcagctcgtagtgactctgaagcaacaatttctagaagtagtgcctcttcgaggaccgcagaagccatcattagaagtggagccagactagtaccatcagataaattttctcctagaattagagctaacagtatctctcgactctcagactccaaggtcaaaagtatgacctcagctcatggctctgcttcagccctgaaaaccactcgcttgcagagcgctggatcagcaatgcctactagttcttcattcaaacaccggattaaagagcaggaagactacatccgagattggactgctcatcgagaagagatagccaggatcagccaagatcttgctctcattgctcgggagatcaacgatgtagcaggagagatagattcagtgacttcatcaggcactgcccctagtaccacagtaagcactgctgccaccacccctggctctgccatagacactagagaagaggtaggagatcttcatggagaaatgcataagttggttgatcgtgtttttgatgaaagcctcaacttccgaaagattcctccattagttcattccaaaacaccagaaggaaacaacggtcgatctggtgatccaagacctcaagcagcagagcctcccgatcacttaacaattacaaggcggagaacctggagcagggatgaagtcatgggagataatctgctgctgtcatccgtctttcagttctctaagaagataagacaatctatagataagacagctggaaagatcagaatattatttaaagacaaagatcggaattgggatgacatagaaagcaaattaagagccgaaagtgaagtccctattgtgaaaacctcaagcatggagatttcttctatcttacaggaactgaaaagagtagaaaagcagctgcaagcaatcaatgctatgattgatcctgatggaactttggaggctctgaacaacatgggatttcccagtgctatgttgccatctccaccgaaacagaagtccagccctgtgaataaccaccacagcccgggtcagacaccaacacttggccaaccagaagctagggctcttcatcctgctgctgtttcagccgcagctgaatttgagaatgctgaatctgaggctgatttcagtatacatttcaatagattcaaccccgatggggaagaggaagatgttacagtacaagaatgactttctcttgattgttgaaaaatcattacctgtggaatggctaggaatattggaagcagcatagtgttgatgtacgcaaaacaagacagcttggtcagctacaatcttggaatccctgtcttcttaattttatttatttatttttgacgtataatgtagtatatcaatcctttcaaactatttagataaccacttgatgcacaaataggaaaaagcagattgtggcagtgtcgccttttgtggttttatgattttcaaattgaatttaatgattacaccctttcccttcatagatcttttttcttttttttaagccatgctgtgacctacaagcaaactaaatagccaacatttctgaacccctaagtctcctgtgccaagctgctccctgaaatggacttcttcatctgtacagatttgttaaaccattctatttgcttcttaataataggatttatattagtactcattaccattggacacaatgacataagtactctccacagtaaagcagacctttcacaacagtcactctgtgtcctaaaattttccaacatagatgtgatttatataactttgttgatacgtaaattgtcttggggtttacggaaattaactattatgtttgcactaagatttgctgggagtggtaggtggacatatctatatatcaataaggactaaccgtcttttttgtacataggagattgataatactgtatttgttttaagcccacagtgttttactccactttcaaaaagatcaatttggcactttttttcattttttttaatggaaataagatttggtctctcattttaggttaaatgataactagaaagattaaactagacagatagtttaggtggagtatatttttaaaactcagaacatgtatattggtcctgtgttaccaagtttatatgtgacagttgaaaaagaaattcccttgaaatgatcatgaggttaaaattttcttcattaggggacttggagaaccagtagtcgtaagattagttgatagtttcactcccaagcaatgaattgcttctgtgtgtttccctgtaggactcaatagtaaatgctgtctgtcttacacatttataaggaccctgcaagacgacgacaaaggcctttggcctgtgctactaaacaagaagcctatgaaaaatttcttctttaaacttgttttttctctttccagtaagttcacatttggataattttaaaaagaaaagtaattacctttgtgtttccagaacactataattggggtgtatcttaattcagttaaatattattagtagacctggattttcccccttgaccccatcagtctataaaggttaaactgcaacttttatgaaatggtctttaatatttccacaataatcctgtgctatatttgttttaagaaacaaagtaactctatacacttcaagactttacaggattttttaaatcctgtattgttggatcaattaataaagatgcaaaaaaactttatagagatgtaaaaacaaaactataatggatctcctatttttctttaaatacaaaaaaaaaaaggtaaatgaactattctccttgtaaagctaaattccccattctgtctaataaaggaagactgaaaaaaggttttaaagaacataaatggaaagatacaaatgctttgaaggaataaacgaaatgttaaaacagggtcaatccatttgaagaaaaagttggacaaaataatcagcattgctccctcttttatttaatatttgggtactgattatatccacatggaagtagaaggtaaggagtttaggaaaatactagaatctactctgcttacattcttgtttaagtgtttacacagtttggttcaattataaacatttggccttttactatgttatttttattttgtatgaatacattatcctccttatttatttttgttacatttattacttatgttattttgttatgcatttacaactccatttttaaataaagtgtttctggaacttt

SEQ ID NO: 306806 - DNA, 3474 bp, Homo sapiens
aactaaattttacctaacatgattatacattcactcagacccagtaaaattacttaaacatttcattgaataaactttattttctttttgttttatttcagaatattgtactaggttgagtccctcttcagtaaacccgagttacttagtattgtatgtctgtgatttgcactatagatggcagtatatcatttctattagaatgtgtaacttctatagcattgttaaaagtttatttgactaagatcaaaatatttattttgtggattaaaaaatattttccttttgtaaacttaattggaatttgcaatttatgtatcttgtgaagaaatttgacacctggatttggggaggaaaaaacaagataggaaactaaaagaaaaagaaacattattttacactggtaaggcaatgtgagtaaaatgaactcattgtccatctacatggctcagctttttttctatttaccatctgttttccatttggagaaaatcttatccatggaagaattaaatttaacatagttatatattttggattttgaaaataaaacctgtgtagatgaatctcgattttataaaggaaatacatttgaagtgcttataaaaagaaagagtaattggtttattgaagatgttgtgcctctgttactacttgagaatggaataacttctgtctaatcataaaaattgtaatgccaatattggtactttttcaaattactgtgttctcataaaggtttgctttcgtcccattagttggttgatcgtgtttttgatgaaagcctcaacttccgaaagattcctccattagttcattccaaaacaccagaaggaaacaacggtcgatctggtgatccaagacctcaagcagcagagcctcccgatcacttaacaattacaaggcggagaacctggagcagggatgaagtcatgggagataatctgctgctgtcatccgtctttcagttctctaagaagataagacaatctatagataagacagctggaaagatcagaatattatttaaagacaaagatcggaattgggatgacatagaaagcaaattaagagccgaaagtgaagtccctattgtgaaaacctcaagcatggagatttcttctatcttacaggaactgaaaagagtagaaaagcagctgcaagcaatcaatgctatgattgatcctgatggaactttggaggctctgaacaacatgggatttcccagtgctatgttgccatctccaccgaaacagaagtccagccctgtgaataaccaccacagcccgggtcagacaccaacacttggccaaccagaagctagggctcttcatcctgctgctgtttcagccgcagctgaatttgagaatgctgaatctgaggctgatttcagtatacatttcaatagattcaaccccgatggggaagaggaagatgttacagtacaagaatgactttctcttgattgttgaaaaatcattacctgtggaatggctaggaatattggaagcagcatagtgttgatgtacgcaaaacaagacagcttggtcagctacaatcttggaatccctgtcttcttaattttatttatttatttttgacgtataatgtagtatatcaatcctttcaaactatttagataaccacttgatgcacaaataggaaaaagcagattgtggcagtgtcgccttttgtggttttatgattttcaaattgaatttaatgattacaccctttcccttcatagatcttttttcttttttttaagccatgctgtgacctacaagcaaactaaatagccaacatttctgaacccctaagtctcctgtgccaagctgctccctgaaatggacttcttcatctgtacagatttgttaaaccattctatttgcttcttaataataggatttatattagtactcattaccattggacacaatgacataagtactctccacagtaaagcagacctttcacaacagtcactctgtgtcctaaaattttccaacatagatgtgatttatataactttgttgatacgtaaattgtcttggggtttacggaaattaactattatgtttgcactaagatttgctgggagtggtaggtggacatatctatatatcaataaggactaaccgtcttttttgtacataggagattgataatactgtatttgttttaagcccacagtgttttactccactttcaaaaagatcaatttggcactttttttcattttttttaatggaaataagatttggtctctcattttaggttaaatgataactagaaagattaaactagacagatagtttaggtggagtatatttttaaaactcagaacatgtatattggtcctgtgttaccaagtttatatgtgacagttgaaaaagaaattcccttgaaatgatcatgaggttaaaattttcttcattaggggacttggagaaccagtagtcgtaagattagttgatagtttcactcccaagcaatgaattgcttctgtgtgtttccctgtaggactcaatagtaaatgctgtctgtcttacacatttataaggaccctgcaagacgacgacaaaggcctttggcctgtgctactaaacaagaagcctatgaaaaatttcttctttaaacttgttttttctctttccagtaagttcacatttggataattttaaaaagaaaagtaattacctttgtgtttccagaacactataattggggtgtatcttaattcagttaaatattattagtagacctggattttcccccttgaccccatcagtctataaaggttaaactgcaacttttatgaaatggtctttaatatttccacaataatcctgtgctatatttgttttaagaaacaaagtaactctatacacttcaagactttacaggattttttaaatcctgtattgttggatcaattaataaagatgcaaaaaaactttatagagatgtaaaaacaaaactataatggatctcctatttttctttaaatacaaaaaaaaaaaggtaaatgaactattctccttgtaaagctaaattccccattctgtctaataaaggaagactgaaaaaaggttttaaagaacataaatggaaagatacaaatgctttgaaggaataaacgaaatgttaaaacagggtcaatccatttgaagaaaaagttggacaaaataatcagcattgctccctcttttatttaatatttgggtactgattatatccacatggaagtagaaggtaaggagtttaggaaaatactagaatctactctgcttacattcttgtttaagtgtttacacagtttggttcaattataaacatttggccttttactatgttatttttattttgtatgaatacattatcctccttatttatttttgttacatttattacttatgttattttgttatgcatttacaactccatttttaaataaagtgtttctggaacttt

SEQ ID NO: 306807 - DNA, 1133 bp, Homo sapiens
aactaaattttacctaacatgattatacattcactcagacccagtaaaattacttaaacatttcattgaataaactttattttctttttgttttatttcagaatattgtactaggttgagtccctcttcagtaaacccgagttacttagtattgtatgtctgtgatttgcactatagatggcagtatatcatttctattagaatgtgtaacttctatagcattgttaaaagtttatttgactaagatcaaaatatttattttgtggattaaaaaatattttccttttgtaaacttaattggaatttgcaatttatgtatcttgtgaagaaatttgacacctggatttggggaggaaaaaacaagataggaaactaaaagaaaaagaaacattattttacactggtaaggcaatgtgagtaaaatgaactcattgtccatctacatggctcagctttttttctatttaccatctgttttccatttggagaaaatcttatccatggaagaattaaatttaacatagttatatattttggattttgaaaataaaacctgtgtagatgaatctcgattttataaaggaaatacatttgaagtgcttataaaaagaaagagtaattggtttattgaagatgttgtgcctctgttactacttgagaatggaataacttctgtctaatcataaaaattgtaatgccaatattggtactttttcaaattactgtgttctcataaaggtttgctttcgtcccattagttggttgatcgtgtttttgatgaaagcctcaacttccgaaagattcctccattagttcattccaaaacaccagaaggaaacaacggtcgatctggtgatccaagacctcaagcagcagagcctcccgatcacttaacaattacaaggcggagaacctggagcagggatgaaagattttattcaacagtacttcagaaatccatgctgctattgcttatttctgattcctgtaattaaaatttaaaatgtaatgaaacagtatttgaacatggtttgtgaattgtaatattccacacaaatataattctatattgcttatatattgaaataatatattttatcagcatttgatgagtaccaagaagccattaaatt

SEQ ID NO: 306808 - DNA, 7094 bp, Homo sapiens
aactgggcaggaggggatagggtccggcgcctcgccctttcccgaggcgcctgcgcactaggcagtcggtctttgccgttaccgctatgtgtggggcgtgtgtggaataacgttattgcccagcggagctgagggccccggagctcgaccgcagcggcagcgacgacaacagcggcgacgacgacgacgacgaggtggggggaggacggcgtgcgagagactcacgggacgcgacgcgccccgcctcccccgtccggtccctctctccacggtaaggggatgacgtagctttgccaaagacttagaagctaagcagaaaatgagcttaacatcctggtttttggtgagcagtggaggcactcgccacaggctgccacgagaaatgatttttgttggaagagatgactgtgagctcatgttgcagtctcgtagtgtggataagcaacacgctgtcatcaactatgatgcgtctacggatgagcatttagtgaaggatttgggcagcctcaatgggacttttgtgaatgatgtaaggattccggaacagacttatatcaccttgaaacttgaagataagctgagatttggatatgatacaaatcttttcactgtagtacaaggagaaatgagggtccctgaagaagctcttaagcatgagaagtttaccattcagcttcagttgtcccaaaaatcttcagaatcagaattatccaaatctgcaagtgccaaaagcatagattcaaaggtagcagacgctgctactgaagtgcagcacaaaactactgaagcactgaaatccgaggaaaaagccatggatatttctgctatgccccgtggtactccattatatgggcagccgtcatggtggggggatgatgaggtggatgaaaaaagagctttcaagacaaatggcaaacctgaagaaaaaaaccatgaagctggaacatcagggtgcagcatagatgccaagcaagttgaggaacaatctgcagctgcaaatgaagaagtactttttcctttctgtagggaaccaagttattttgaaatccctacaaaagaattccagcaaccatcacaaataacagaaagcactattcatgaaatcccaacaaaagacacgccaagttcccatataacaggtgcagggcatgcttcatttaccattgaatttgatgacagtaccccagggaaggtaactattagagaccatgtgacaaagtttacttctgatcagcgccacaagtccaagaagtcttctcctggaactcaagacttgctggggattcaaacaggaatgatggcacccgaaaacaaagttgctgactggctagcacaaaacaaccctcctcaaatgctatgggaaagaacagaagaggattctaaaagcattaaaagtgatgttccagtgtacttgaaaaggttgaaaggaaataaacatgatgatggtacgcaaagtgattcagagaacgctggggctcacaggcgctgtagcaaacgtgcaactcttgaggaacacttaagacgccaccattcagaacacaaaaagctacagaaggtccaggctactgaaaagcatcaagaccaagctgttactagctctgcgcatcacagaggggggcatggtgttccacatgggaaattgttaaaacagaaatcagaggagccatcggtgtcaatacccttcctacaaactgcattattaagaagttcagggagtcttgggcacagaccaagccaggagatggataaaatgttaaaaaatcaagcaacttctgctacttctgaaaaggataatgatgatgaccaaagtgacaagggtacttataccattgagttagagaatcccaacagtgaggaagtggaagcaagaaaaatgattgacaaggtgtttggagtagatgacaatcaggattataataggcctgttatcaacgaaaaacataaagatctaataaaagattgggctctcagttctgctgcagcagtaatggaagaaagaaaaccactgactacatctggatttcaccactcagaggaaggcacatcttcatctggaagcaaacgttgggtttcacagtgggctagtttggctgccaatcatacaaggcatgatcaagaagaaaggataatggaattttctgcacctcttcctttagagaatgagacagagatcagtgagtctggcatgacagtgagaagtactggctctgcaacttccttggctagccagggagagagaaggagacgaactcttccccagcttccaaatgaagaaaagtctcttgagagccacagagcaaaggttgtaacacagaggtcagagataggagaaaaacaagacacagaacttcaggagaaagaaacacctacacaggtataccagaaagataaacaagatgctgacagacccttgagtaaaatgaacagggcagtaaatggagagactctcaaaactggtggagataataaaaccctacttcacttaggcagctctgctcctggaaaagagaaaagtgaaactgataaggaaacttctttggtaaagcaaacattagcaaaacttcaacaacaagaacaaagggaggaggctcagtggacacctactaaattgtcttccaaaaatgtttcaggtcagacagataaatgtagggaggaaacttttaaacaagaatcacaacctccagaaaaaaattcaggacattctacaagcaaaggagacagagtggcacaaagtgagagcaagagaagaaaagctgaggaaattctgaaaagtcagactccaaagggaggagacaagaaggaatcctccaagtcattagtgcgacaagggagcttcactatagaaaaacccagcccaaacatacccatagaacttattccccatataaataaacagacttcctctactccttcttctttagcattaacatctgcaagtagaatacgagaaagaagtgagtctttggatcctgattctagtatggacacaacccttattctaaaagacacagaagcagtaatggcttttctagaagctaaactacgtgaagataataaaactgatgaaggaccagatactcccagttataatagagacaattctatttcaccagaatctgatgtagatacagctagtacaatcagtctggttactggagaaactgaaagaaagtcaacccaaaagcgaaagagtttcactagcctctataaagataggtgttccacaggttctccttccaaagatgttacaaaatcatcatcttcaggtgctagggaaaaaatggaaaagaaaacaaaaagtcgttccacagatgtgggttcaagagcagatggtcgtaaatttgttcagtccagtgggagaataagacagccctcagtagacttaacagatgatgaccaaacctctagtgtacctcattctgccatctctgatattatgtcatctgatcaagaaacttactcttgtaaacctcatggacggactccacttacctcagctgatgagcatgtacattccaaactggaaggaagtaaagtaacgaaatctaagacttctccggtggtatctggttcatctagtaaatcaaccacccttccaaggccacgacctaccaggacttccctcttgcgcagagcacgacttggtgaagcttcagacagtgaacttgctgatgctgacaaagcatctgttgcttctgaagtatccacaacaagttctacatcaaaacctcccacaggaaggcgtaacatctctcggattgatttattggctcagcctcgtagaacacgacttggctcactgtcagctcgtagtgactctgaagcaacaatttctagaagtagtgcctcttcgaggaccgcagaagccatcattagaagtggagccagactagtaccatcagataaattttctcctagaattagagctaacagtatctctcgactctcagactccaaggtcaaaagtatgacctcagctcatggctctgcttcagtaaattcaagatggaggcgctttcctactgattatgcttccacctcagaagatgaatttggatcaaaccgtaattcccctaaacatacccgtctacgtacttctccagccctgaaaaccactcgcttgcagagcgctggatcagcaatgcctactagttcttcattcaaacaccggattaaagagcaggaagactacatccgagattggactgctcatcgagaagagatagccaggatcagccaagatcttgctctcattgctcgggagatcaacgatgtagcaggagagatagattcagtgacttcatcaggcactgcccctagtaccacagtaagcactgctgccaccacccctggctctgccatagacactagagaagagttggttgatcgtgtttttgatgaaagcctcaacttccgaaagattcctccattagttcattccaaaacaccagaaggaaacaacggtcgatctggtgatccaagacctcaagcagcagagcctcccgatcacttaacaattacaaggcggagaacctggagcagggatgaagtcatgggagataatctgctgctgtcatccgtctttcagttctctaagaagataagacaatctatagataagacagctggaaagatcagaatattatttaaagacaaagatcggaattgggatgacatagaaagcaaattaagagccgaaagtgaagtccctattgtgaaaacctcaagcatggagatttcttctatcttacaggaactgaaaagagtagaaaagcagctgcaagcaatcaatgctatgattgatcctgatggaactttggaggctctgaacaacatgggatttcccagtgctatgttgccatctccaccgaaacagaagtccagccctgtgaataaccaccacagcccgggtcagacaccaacacttggccaaccagaagctagggctcttcatcctgctgctgtttcagccgcagctgaatttgagaatgctgaatctgaggctgatttcagtatacatttcaatagattcaaccccgatggggaagaggaagatgttacagtacaagaatgactttctcttgattgttgaaaaatcattacctgtggaatggctaggaatattggaagcagcatagtgttgatgtacgcaaaacaagacagcttggtcagctacaatcttggaatccctgtcttcttaattttatttatttatttttgacgtataatgtagtatatcaatcctttcaaactatttagataaccacttgatgcacaaataggaaaaagcagattgtggcagtgtcgccttttgtggttttatgattttcaaattgaatttaatgattacaccctttcccttcatagatcttttttcttttttttaagccatgctgtgacctacaagcaaactaaatagccaacatttctgaacccctaagtctcctgtgccaagctgctccctgaaatggacttcttcatctgtacagatttgttaaaccattctatttgcttcttaataataggatttatattagtactcattaccattggacacaatgacataagtactctccacagtaaagcagacctttcacaacagtcactctgtgtcctaaaattttccaacatagatgtgatttatataactttgttgatacgtaaattgtcttggggtttacggaaattaactattatgtttgcactaagatttgctgggagtggtaggtggacatatctatatatcaataaggactaaccgtcttttttgtacataggagattgataatactgtatttgttttaagcccacagtgttttactccactttcaaaaagatcaatttggcactttttttcattttttttaatggaaataagatttggtctctcattttaggttaaatgataactagaaagattaaactagacagatagtttaggtggagtatatttttaaaactcagaacatgtatattggtcctgtgttaccaagtttatatgtgacagttgaaaaagaaattcccttgaaatgatcatgaggttaaaattttcttcattaggggacttggagaaccagtagtcgtaagattagttgatagtttcactcccaagcaatgaattgcttctgtgtgtttccctgtaggactcaatagtaaatgctgtctgtcttacacatttataaggaccctgcaagacgacgacaaaggcctttggcctgtgctactaaacaagaagcctatgaaaaatttcttctttaaacttgttttttctctttccagtaagttcacatttggataattttaaaaagaaaagtaattacctttgtgtttccagaacactataattggggtgtatcttaattcagttaaatattattagtagacctggattttcccccttgaccccatcagtctataaaggttaaactgcaacttttatgaaatggtctttaatatttccacaataatcctgtgctatatttgttttaagaaacaaagtaactctatacacttcaagactttacaggattttttaaatcctgtattgttggatcaattaataaagatgcaaaaaaactttatagagatgtaaaaacaaaactataatggatctcctatttttctttaaatacaaaaaaaaaaaggtaaatgaactattctccttgtaaagctaaattccccattctgtctaataaaggaagactgaaaaaaggttttaaagaacataaatggaaagatacaaatgctttgaaggaataaacgaaatgttaaaacagggtcaatccatttgaagaaaaagttggacaaaataatcagcattgctccctcttttatttaatatttgggtactgattatatccacatggaagtagaaggtaaggagtttaggaaaatactagaatctactctgcttacattcttgtttaagtgtttacacagtttggttcaattataaacatttggccttttactatgttatttttattttgtatgaatacattatcctccttatttatttttgttacatttattacttatgttattttgttatgcatttacaactccatttttaaataaagtgtttctggaacttt

SEQ ID NO: 306809 - DNA, 6800 bp, Homo sapiens
aactgggcaggaggggatagggtccggcgcctcgccctttcccgaggcgcctgcgcactaggcagtcggtctttgccgttaccgctatgtgtggggcgtgtgtggaataacgttattgcccagcggagctgagggccccggagctcgaccgcagcggcagcgacgacaacagcggcgacgacgacgacgacgaggtggggggaggacggcgtgcgagagactcacgggacgcgacgcgccccgcctcccccgtccggtccctctctccacggtaaggggatgacgtagctttgccaaagacttagaagctaagcagaaaatgagcttaacatcctggtttttggtgagcagtggaggcactcgccacaggctgccacgagaaatgatttttgttggaagagatgactgtgagctcatgttgcagtctcgtagtgtggataagcaacacgctgtcatcaactatgatgcgtctacggatgagcatttagtgaaggatttgggcagcctcaatgggacttttgtgaatgatgtaaggattccggaacagacttatatcaccttgaaacttgaagataagctgagatttggatatgatacaaatcttttcactgtagtacaaggagaaatgagggtccctgaagaagctcttaagcatgagaagtttaccattcagcttcagttgtcccaaaaatcttcagaatcagaattatccaaatctgcaagtgccaaaagcatagattcaaaggtagcagacgctgctactgaagtgcagcacaaaactactgaagcactgaaatccgaggaaaaagccatggatatttctgctatgccccgtggtactccattatatgggcagccgtcatggtggggggatgatgaggtggatgaaaaaagagctttcaagacaaatggcaaacctgaagaaaaaaaccatgaagctggaacatcagggtgcagcatagatgccaagcaagttgaggaacaatctgcagctgcaaatgaagaagtactttttcctttctgtagggaaccaagttattttgaaatccctacaaaagaattccagcaaccatcacaaataacagaaagcactattcatgaaatcccaacaaaagacacgccaagttcccatataacaggtgcagggcatgcttcatttaccattgaatttgatgacagtaccccagggaaggtaactattagagaccatgtgacaaagtttacttctgatcagcgccacaagtccaagaagtcttctcctggaactcaagacttgctggggattcaaacaggaatgatggcacccgaaaacaaagttgctgactggctagcacaaaacaaccctcctcaaatgctatgggaaagaacagaagaggattctaaaagcattaaaagtgatgttccagtgtacttgaaaaggttgaaaggaaataaacatgatgatggtacgcaaagtgattcagagaacgctggggctcacaggcgctgtagcaaacgtgcaactcttgaggaacacttaagacgccaccattcagaacacaaaaagctacagaaggtccaggctactgaaaagcatcaagaccaagctgttgtgtttggagtagatgacaatcaggattataataggcctgttatcaacgaaaaacataaagatctaataaaagattgggctctcagttctgctgcagcagtaatggaagaaagaaaaccactgactacatctggatttcaccactcagaggaaggcacatcttcatctggaagcaaacgttgggtttcacagtgggctagtttggctgccaatcatacaaggcatgatcaagaagaaaggataatggaattttctgcacctcttcctttagagaatgagacagagatcagtgagtctggcatgacagtgagaagtactggctctgcaacttccttggctagccagggagagagaaggagacgaactcttccccagcttccaaatgaagaaaagtctcttgagagccacagagcaaaggttgtaacacagaggtcagagataggagaaaaacaagacacagaacttcaggagaaagaaacacctacacaggtataccagaaagataaacaagatgctgacagacccttgagtaaaatgaacagggcagtaaatggagagactctcaaaactggtggagataataaaaccctacttcacttaggcagctctgctcctggaaaagagaaaagtgaaactgataaggaaacttctttggtaaagcaaacattagcaaaacttcaacaacaagaacaaagggaggaggctcagtggacacctactaaattgtcttccaaaaatgtttcaggtcagacagataaatgtagggaggaaacttttaaacaagaatcacaacctccagaaaaaaattcaggacattctacaagcaaaggagacagagtggcacaaagtgagagcaagagaagaaaagctgaggaaattctgaaaagtcagactccaaagggaggagacaagaaggaatcctccaagtcattagtgcgacaagggagcttcactatagaaaaacccagcccaaacatacccatagaacttattccccatataaataaacagacttcctctactccttcttctttagcattaacatctgcaagtagaatacgagaaagaagtgagtctttggatcctgattctagtatggacacaacccttattctaaaagacacagaagcagtaatggcttttctagaagctaaactacgtgaagataataaaactgatgaaggaccagatactcccagttataatagagacaattctatttcaccagaatctgatgtagatacagctagtacaatcagtctggttactggagaaactgaaagaaagtcaacccaaaagcgaaagagtttcactagcctctataaagataggtgttccacaggttctccttccaaagatgttacaaaatcatcatcttcaggtgctagggaaaaaatggaaaagaaaacaaaaagtcgttccacagatgtgggttcaagagcagatggtcgtaaatttgttcagtccagtgggagaataagacagccctcagtagacttaacagatgatgaccaaacctctagtgtacctcattctgccatctctgatattatgtcatctgatcaagaaacttactcttgtaaacctcatggacggactccacttacctcagctgatgagcatgtacattccaaactggaaggaagtaaagtaacgaaatctaagacttctccggtggtatctggttcatctagtaaatcaaccacccttccaaggccacgacctaccaggacttccctcttgcgcagagcacgacttggtgaagcttcagacagtgaacttgctgatgctgacaaagcatctgttgcttctgaagtatccacaacaagttctacatcaaaacctcccacaggaaggcgtaacatctctcggattgatttattggctcagcctcgtagaacacgacttggctcactgtcagctcgtagtgactctgaagcaacaatttctagaagtagtgcctcttcgaggaccgcagaagccatcattagaagtggagccagactagtaccatcagataaattttctcctagaattagagctaacagtatctctcgactctcagactccaaggtcaaaagtatgacctcagctcatggctctgcttcagtaaattcaagatggaggcgctttcctactgattatgcttccacctcagaagatgaatttggatcaaaccgtaattcccctaaacatacccgtctacgtacttctccagccctgaaaaccactcgcttgcagagcgctggatcagcaatgcctactagttcttcattcaaacaccggattaaagagcaggaagactacatccgagattggactgctcatcgagaagagatagccaggatcagccaagatcttgctctcattgctcgggagatcaacgatgtagcaggagagatagattcagtgacttcatcaggcactgcccctagtaccacagtaagcactgctgccaccacccctggctctgccatagacactagagaagagttggttgatcgtgtttttgatgaaagcctcaacttccgaaagattcctccattagttcattccaaaacaccagaaggaaacaacggtcgatctggtgatccaagacctcaagcagcagagcctcccgatcacttaacaattacaaggcggagaacctggagcagggatgaagtcatgggagataatctgctgctgtcatccgtctttcagttctctaagaagataagacaatctatagataagacagctggaaagatcagaatattatttaaagacaaagatcggaattgggatgacatagaaagcaaattaagagccgaaagtgaagtccctattgtgaaaacctcaagcatggagatttcttctatcttacaggaactgaaaagagtagaaaagcagctgcaagcaatcaatgctatgattgatcctgatggaactttggaggctctgaacaacatgggatttcccagtgctatgttgccatctccaccgaaacagaagtccagccctgtgaataaccaccacagcccgggtcagacaccaacacttggccaaccagaagctagggctcttcatcctgctgctgtttcagccgcagctgaatttgagaatgctgaatctgaggctgatttcagtatacatttcaatagattcaaccccgatggggaagaggaagatgttacagtacaagaatgactttctcttgattgttgaaaaatcattacctgtggaatggctaggaatattggaagcagcatagtgttgatgtacgcaaaacaagacagcttggtcagctacaatcttggaatccctgtcttcttaattttatttatttatttttgacgtataatgtagtatatcaatcctttcaaactatttagataaccacttgatgcacaaataggaaaaagcagattgtggcagtgtcgccttttgtggttttatgattttcaaattgaatttaatgattacaccctttcccttcatagatcttttttcttttttttaagccatgctgtgacctacaagcaaactaaatagccaacatttctgaacccctaagtctcctgtgccaagctgctccctgaaatggacttcttcatctgtacagatttgttaaaccattctatttgcttcttaataataggatttatattagtactcattaccattggacacaatgacataagtactctccacagtaaagcagacctttcacaacagtcactctgtgtcctaaaattttccaacatagatgtgatttatataactttgttgatacgtaaattgtcttggggtttacggaaattaactattatgtttgcactaagatttgctgggagtggtaggtggacatatctatatatcaataaggactaaccgtcttttttgtacataggagattgataatactgtatttgttttaagcccacagtgttttactccactttcaaaaagatcaatttggcactttttttcattttttttaatggaaataagatttggtctctcattttaggttaaatgataactagaaagattaaactagacagatagtttaggtggagtatatttttaaaactcagaacatgtatattggtcctgtgttaccaagtttatatgtgacagttgaaaaagaaattcccttgaaatgatcatgaggttaaaattttcttcattaggggacttggagaaccagtagtcgtaagattagttgatagtttcactcccaagcaatgaattgcttctgtgtgtttccctgtaggactcaatagtaaatgctgtctgtcttacacatttataaggaccctgcaagacgacgacaaaggcctttggcctgtgctactaaacaagaagcctatgaaaaatttcttctttaaacttgttttttctctttccagtaagttcacatttggataattttaaaaagaaaagtaattacctttgtgtttccagaacactataattggggtgtatcttaattcagttaaatattattagtagacctggattttcccccttgaccccatcagtctataaaggttaaactgcaacttttatgaaatggtctttaatatttccacaataatcctgtgctatatttgttttaagaaacaaagtaactctatacacttcaagactttacaggattttttaaatcctgtattgttggatcaattaataaagatgcaaaaaaactttatagagatgtaaaaacaaaactataatggatctcctatttttctttaaatacaaaaaaaaaaaggtaaatgaactattctccttgtaaagctaaattccccattctgtctaataaaggaagactgaaaaaaggttttaaagaacataaatggaaagatacaaatgctttgaaggaataaacgaaatgttaaaacagggtcaatccatttgaagaaaaagttggacaaaataatcagcattgctccctcttttatttaatatttgggtactgattatatccacatggaagtagaaggtaaggagtttaggaaaatactagaatctactctgcttacattcttgtttaagtgtttacacagtttggttcaattataaacatttggccttttactatgttatttttattttgtatgaatacattatcctccttatttatttttgttacatttattacttatgttattttgttatgcatttacaactccatttttaaataaagtgtttctggaacttt

SEQ ID NO: 306810 - DNA, 7209 bp, Homo sapiens
aactgggcaggaggggatagggtccggcgcctcgccctttcccgaggcgcctgcgcactaggcagtcggtctttgccgttaccgctatgtgtggggcgtgtgtggaataacgttattgcccagcggagctgagggccccggagctcgaccgcagcggcagcgacgacaacagcggcgacgacgacgacgacgaggtggggggaggacggcgtgcgagagactcacgggacgcgacgcgccccgcctcccccgtccggtccctctctccacggtaaggggatgacgtagctttgccaaagacttagaagctaagcagaaaatgagcttaacatcctggtttttggtgagcagtggaggcactcgccacaggctgccacgagaaatgatttttgttggaagagatgactgtgagctcatgttgcagtctcgtagtgtggataagcaacacgctgtcatcaactatgatgcgtctacggatgagcatttagtgaaggatttgggcagcctcaatgggacttttgtgaatgatgtaaggattccggaacagacttatatcaccttgaaacttgaagataagctgagatttggatatgatacaaatcttttcactgtagtacaaggagaaatgagggtccctgaagaagctcttaagcatgagaagtttaccattcagcttcagttgtcccaaaaatcttcagaatcagaattatccaaatctgcaagtgccaaaagcatagattcaaaggtagcagacgctgctactgaagtgcagcacaaaactactgaagcactgaaatccgaggaaaaagccatggatatttctgctatgccccgtggtactccattatatgggcagccgtcatggtggggggatgatgaggtggatgaaaaaagagctttcaagacaaatggcaaacctgaagaaaaaaaccatgaagctggaacatcagggtgcagcatagatgccaagcaagttgaggaacaatctgcagctgcaaatgaagaagtactttttcctttctgtagggaaccaagttattttgaaatccctacaaaagaattccagcaaccatcacaaataacagaaagcactattcatgaaatcccaacaaaagacacgccaagttcccatataacaggtgcagggcatgcttcatttaccattgaatttgatgacagtaccccagggaaggtaactattagagaccatgtgacaaagtttacttctgatcagcgccacaagtccaagaagtcttctcctggaactcaagacttgctggggattcaaacaggaatgatggcacccgaaaacaaagttgctgactggctagcacaaaacaaccctcctcaaatgctatgggaaagaacagaagaggattctaaaagcattaaaagtgatgttccagtgtacttgaaaaggttgaaaggaaataaacatgatgatggtacgcaaagtgattcagagaacgctggggctcacaggcgctgtagcaaacgtgcaactcttgaggaacacttaagacgccaccattcagaacacaaaaagctacagaaggtccaggctactgaaaagcatcaagaccaagctgttactagctctgcgcatcacagaggggggcatggtgttccacatgggaaattgttaaaacagaaatcagaggagccatcggtgtcaatacccttcctacaaactgcattattaagaagttcagggagtcttgggcacagaccaagccaggagatggataaaatgttaaaaaatcaagcaacttctgctacttctgaaaaggataatgatgatgaccaaagtgacaagggtacttataccattgagttagagaatcccaacagtgaggaagtggaagcaagaaaaatgattgacaaggtgacagcctcttctttttataagctcctttatcagacgtaacctcctcaaaagcaaagactgtcatacagattttgtaatcccctgcagtggctagccaagtagcctgtggagagtgtttggagtagatgacaatcaggattataataggcctgttatcaacgaaaaacataaagatctaataaaagattgggctctcagttctgctgcagcagtaatggaagaaagaaaaccactgactacatctggatttcaccactcagaggaaggcacatcttcatctggaagcaaacgttgggtttcacagtgggctagtttggctgccaatcatacaaggcatgatcaagaagaaaggataatggaattttctgcacctcttcctttagagaatgagacagagatcagtgagtctggcatgacagtgagaagtactggctctgcaacttccttggctagccagggagagagaaggagacgaactcttccccagcttccaaatgaagaaaagtctcttgagagccacagagcaaaggttgtaacacagaggtcagagataggagaaaaacaagacacagaacttcaggagaaagaaacacctacacaggtataccagaaagataaacaagatgctgacagacccttgagtaaaatgaacagggcagtaaatggagagactctcaaaactggtggagataataaaaccctacttcacttaggcagctctgctcctggaaaagagaaaagtgaaactgataaggaaacttctttggtaaagcaaacattagcaaaacttcaacaacaagaacaaagggaggaggctcagtggacacctactaaattgtcttccaaaaatgtttcaggtcagacagataaatgtagggaggaaacttttaaacaagaatcacaacctccagaaaaaaattcaggacattctacaagcaaaggagacagagtggcacaaagtgagagcaagagaagaaaagctgaggaaattctgaaaagtcagactccaaagggaggagacaagaaggaatcctccaagtcattagtgcgacaagggagcttcactatagaaaaacccagcccaaacatacccatagaacttattccccatataaataaacagacttcctctactccttcttctttagcattaacatctgcaagtagaatacgagaaagaagtgagtctttggatcctgattctagtatggacacaacccttattctaaaagacacagaagcagtaatggcttttctagaagctaaactacgtgaagataataaaactgatgaaggaccagatactcccagttataatagagacaattctatttcaccagaatctgatgtagatacagctagtacaatcagtctggttactggagaaactgaaagaaagtcaacccaaaagcgaaagagtttcactagcctctataaagataggtgttccacaggttctccttccaaagatgttacaaaatcatcatcttcaggtgctagggaaaaaatggaaaagaaaacaaaaagtcgttccacagatgtgggttcaagagcagatggtcgtaaatttgttcagtccagtgggagaataagacagccctcagtagacttaacagatgatgaccaaacctctagtgtacctcattctgccatctctgatattatgtcatctgatcaagaaacttactcttgtaaacctcatggacggactccacttacctcagctgatgagcatgtacattccaaactggaaggaagtaaagtaacgaaatctaagacttctccggtggtatctggttcatctagtaaatcaaccacccttccaaggccacgacctaccaggacttccctcttgcgcagagcacgacttggtgaagcttcagacagtgaacttgctgatgctgacaaagcatctgttgcttctgaagtatccacaacaagttctacatcaaaacctcccacaggaaggcgtaacatctctcggattgatttattggctcagcctcgtagaacacgacttggctcactgtcagctcgtagtgactctgaagcaacaatttctagaagtagtgcctcttcgaggaccgcagaagccatcattagaagtggagccagactagtaccatcagataaattttctcctagaattagagctaacagtatctctcgactctcagactccaaggtcaaaagtatgacctcagctcatggctctgcttcagtaaattcaagatggaggcgctttcctactgattatgcttccacctcagaagatgaatttggatcaaaccgtaattcccctaaacatacccgtctacgtacttctccagccctgaaaaccactcgcttgcagagcgctggatcagcaatgcctactagttcttcattcaaacaccggattaaagagcaggaagactacatccgagattggactgctcatcgagaagagatagccaggatcagccaagatcttgctctcattgctcgggagatcaacgatgtagcaggagagatagattcagtgacttcatcaggcactgcccctagtaccacagtaagcactgctgccaccacccctggctctgccatagacactagagaagagttggttgatcgtgtttttgatgaaagcctcaacttccgaaagattcctccattagttcattccaaaacaccagaaggaaacaacggtcgatctggtgatccaagacctcaagcagcagagcctcccgatcacttaacaattacaaggcggagaacctggagcagggatgaagtcatgggagataatctgctgctgtcatccgtctttcagttctctaagaagataagacaatctatagataagacagctggaaagatcagaatattatttaaagacaaagatcggaattgggatgacatagaaagcaaattaagagccgaaagtgaagtccctattgtgaaaacctcaagcatggagatttcttctatcttacaggaactgaaaagagtagaaaagcagctgcaagcaatcaatgctatgattgatcctgatggaactttggaggctctgaacaacatgggatttcccagtgctatgttgccatctccaccgaaacagaagtccagccctgtgaataaccaccacagcccgggtcagacaccaacacttggccaaccagaagctagggctcttcatcctgctgctgtttcagccgcagctgaatttgagaatgctgaatctgaggctgatttcagtatacatttcaatagattcaaccccgatggggaagaggaagatgttacagtacaagaatgactttctcttgattgttgaaaaatcattacctgtggaatggctaggaatattggaagcagcatagtgttgatgtacgcaaaacaagacagcttggtcagctacaatcttggaatccctgtcttcttaattttatttatttatttttgacgtataatgtagtatatcaatcctttcaaactatttagataaccacttgatgcacaaataggaaaaagcagattgtggcagtgtcgccttttgtggttttatgattttcaaattgaatttaatgattacaccctttcccttcatagatcttttttcttttttttaagccatgctgtgacctacaagcaaactaaatagccaacatttctgaacccctaagtctcctgtgccaagctgctccctgaaatggacttcttcatctgtacagatttgttaaaccattctatttgcttcttaataataggatttatattagtactcattaccattggacacaatgacataagtactctccacagtaaagcagacctttcacaacagtcactctgtgtcctaaaattttccaacatagatgtgatttatataactttgttgatacgtaaattgtcttggggtttacggaaattaactattatgtttgcactaagatttgctgggagtggtaggtggacatatctatatatcaataaggactaaccgtcttttttgtacataggagattgataatactgtatttgttttaagcccacagtgttttactccactttcaaaaagatcaatttggcactttttttcattttttttaatggaaataagatttggtctctcattttaggttaaatgataactagaaagattaaactagacagatagtttaggtggagtatatttttaaaactcagaacatgtatattggtcctgtgttaccaagtttatatgtgacagttgaaaaagaaattcccttgaaatgatcatgaggttaaaattttcttcattaggggacttggagaaccagtagtcgtaagattagttgatagtttcactcccaagcaatgaattgcttctgtgtgtttccctgtaggactcaatagtaaatgctgtctgtcttacacatttataaggaccctgcaagacgacgacaaaggcctttggcctgtgctactaaacaagaagcctatgaaaaatttcttctttaaacttgttttttctctttccagtaagttcacatttggataattttaaaaagaaaagtaattacctttgtgtttccagaacactataattggggtgtatcttaattcagttaaatattattagtagacctggattttcccccttgaccccatcagtctataaaggttaaactgcaacttttatgaaatggtctttaatatttccacaataatcctgtgctatatttgttttaagaaacaaagtaactctatacacttcaagactttacaggattttttaaatcctgtattgttggatcaattaataaagatgcaaaaaaactttatagagatgtaaaaacaaaactataatggatctcctatttttctttaaatacaaaaaaaaaaaggtaaatgaactattctccttgtaaagctaaattccccattctgtctaataaaggaagactgaaaaaaggttttaaagaacataaatggaaagatacaaatgctttgaaggaataaacgaaatgttaaaacagggtcaatccatttgaagaaaaagttggacaaaataatcagcattgctccctcttttatttaatatttgggtactgattatatccacatggaagtagaaggtaaggagtttaggaaaatactagaatctactctgcttacattcttgtttaagtgtttacacagtttggttcaattataaacatttggccttttactatgttatttttattttgtatgaatacattatcctccttatttatttttgttacatttattacttatgttattttgttatgcatttacaactccatttttaaataaagtgtttctggaacttt

SEQ ID NO: 306811 - DNA, 7156 bp, Homo sapiens
aactgggcaggaggggatagggtccggcgcctcgccctttcccgaggcgcctgcgcactaggcagtcggtctttgccgttaccgctatgtgtggggcgtgtgtggaataacgttattgcccagcggagctgagggccccggagctcgaccgcagcggcagcgacgacaacagcggcgacgacgacgacgacgaggtggggggaggacggcgtgcgagagactcacgggacgcgacgcgccccgcctcccccgtccggtccctctctccacggtaaggggatgacgtagctttgccaaagacttagaagctaagcagaaaatgagcttaacatcctggtttttggtgagcagtggaggcactcgccacaggctgccacgagaaatgatttttgttggaagagatgactgtgagctcatgttgcagtctcgtagtgtggataagcaacacgctgtcatcaactatgatgcgtctacggatgagcatttagtgaaggatttgggcagcctcaatgggacttttgtgaatgatgtaaggattccggaacagacttatatcaccttgaaacttgaagataagctgagatttggatatgatacaaatcttttcactgtagtacaaggagaaatgagggtccctgaagaagctcttaagcatgagaagtttaccattcagcttcagttgtcccaaaaatcttcagaatcagaattatccaaatctgcaagtgccaaaagcatagattcaaaggtagcagacgctgctactgaagtgcagcacaaaactactgaagcactgaaatccgaggaaaaagccatggatatttctgctatgccccgtggtactccattatatgggcagccgtcatggtggggggatgatgaggtggatgaaaaaagagctttcaagacaaatggcaaacctgaagaaaaaaaccatgaagctggaacatcagggtgcagcatagatgccaagcaagttgaggaacaatctgcagctgcaaatgaagaagtactttttcctttctgtagggaaccaagttattttgaaatccctacaaaagaattccagcaaccatcacaaataacagaaagcactattcatgaaatcccaacaaaagacacgccaagttcccatataacaggtgcagggcatgcttcatttaccattgaatttgatgacagtaccccagggaaggtaactattagagaccatgtgacaaagtttacttctgatcagcgccacaagtccaagaagtcttctcctggaactcaagacttgctggggattcaaacaggaatgatggcacccgaaaacaaagttgctgactggctagcacaaaacaaccctcctcaaatgctatgggaaagaacagaagaggattctaaaagcattaaaagtgatgttccagtgtacttgaaaaggttgaaaggaaataaacatgatgatggtacgcaaagtgattcagagaacgctggggctcacaggcgctgtagcaaacgtgcaactcttgaggaacacttaagacgccaccattcagaacacaaaaagctacagaaggtccaggctactgaaaagcatcaagaccaagctgttactagctctgcgcatcacagaggggggcatggtgttccacatgggaaattgttaaaacagaaatcagaggagccatcggtgtcaatacccttcctacaaactgcattattaagaagttcagggagtcttgggcacagaccaagccaggagatggataaaatgttaaaaaatcaagcaacttctgctacttctgaaaaggataatgatgatgaccaaagtgacaagggtacttataccattgagttagagaatcccaacagtgaggaagtggaagcaagaaaaatgattgacaaggtgacagcctcttctttttataagctcctttatcagacgtaacctcctcaaaagcaaagactgtcatacagattttgtaatcccctgcagtggctagccaagtagcctgtggagagtgtttggagtagatgacaatcaggattataataggcctgttatcaacgaaaaacataaagatctaataaaagattgggctctcagttctgctgcagcagtaatggaagaaagaaaaccactgactacatctggatttcaccactcagaggaaggcacatcttcatctggaagcaaacgttgggtttcacagtgggctagtttggctgccaatcatacaaggcatgatcaagaagaaaggataatggaattttctgcacctcttcctttagagaatgagacagagatcagtgagtctggcatgacagtgagaagtactggctctgcaacttccttggctagccagggagagagaaggagacgaactcttccccagcttccaaatgaagaaaagtctcttgagagccacagagcaaaggttgtaacacagaggtcagagataggagaaaaacaagacacagaacttcaggagaaagaaacacctacacaggtataccagaaagataaacaagatgctgacagacccttgagtaaaatgaacagggcagtaaatggagagactctcaaaactggtggagataataaaaccctacttcacttaggcagctctgctcctggaaaagagaaaagtgaaactgataaggaaacttctttggtaaagcaaacattagcaaaacttcaacaacaagaacaaagggaggaggctcagtggacacctactaaattgtcttccaaaaatgtttcaggtcagacagataaatgtagggaggaaacttttaaacaagaatcacaacctccagaaaaaaattcaggacattctacaagcaaaggagacagagtggcacaaagtgagagcaagagaagaaaagctgaggaaattctgaaaagtcagactccaaagggaggagacaagaaggaatcctccaagtcattagtgcgacaagggagcttcactatagaaaaacccagcccaaacatacccatagaacttattccccatataaataaacagacttcctctactccttcttctttagcattaacatctgcaagtagaatacgagaaagaagtgagtctttggatcctgattctagtatggacacaacccttattctaaaagacacagaagcagtaatggcttttctagaagctaaactacgtgaagataataaaactgatgaaggaccagatactcccagttataatagagacaattctatttcaccagaatctgatgtagatacagctagtacaatcagtctggttactggagaaactgaaagaaagtcaacccaaaagcgaaagagtttcactagcctctataaagataggtgttccacaggttctccttccaaagatgttacaaaatcatcatcttcaggtgctagggaaaaaatggaaaagaaaacaaaaagtcgttccacagatgtgggttcaagagcagatggtcgtaaatttgttcagtccagtgggagaataagacagccctcagtagacttaacagatgatgaccaaacctctagtgtacctcattctgccatctctgatattatgtcatctgatcaagaaacttactcttgtaaacctcatggacggactccacttacctcagctgatgagcatgtacattccaaactggaaggaagtaaagtaacgaaatctaagacttctccggtggtatctggttcatctagtaaatcaaccacccttccaaggccacgacctaccaggacttccctcttgcgcagagcacgacttggtgaagcttcagacagtgaacttgctgatgctgacaaagcatctgttgcttctgaagtatccacaacaagttctacatcaaaacctcccacaggaaggcgtaacatctctcggattgatttattggctcagcctcgtagaacacgacttggctcactgtcagctcgtagtgactctgaagcaacaatttctagaagtagtgcctcttcgaggaccgcagaagccatcattagaagtggagccagactagtaccatcagataaattttctcctagaattagagctaacagtatctctcgactctcagactccaaggtcaaaagtatgacctcagctcatggctctgcttcagtaaattcaagatggaggcgctttcctactgattatgcttccacctcagaagatgaatttggatcaaaccgtaattcccctaaacatacccgtctacgtacttctccagccctgaaaaccactcgcttgcagagcgctggatcagcaatgcctactagttcttcattcaaacaccggattaaagagcaggaagactacatccgagattggactgctcatcgagaagagatagccaggatcagccaagatcttgctctcattgctcgggagatcaacgatgtagcaggagagatagattcagtgacttcatcaggcactgcccctagtaccacagtaagcactgctgccaccacccctggctctgccatagacactagagaagagttggttgatcgtgtttttgatgaaagcctcaacttccgaaagattcctccattagttcattccaaaacaccagaaggaaacaacggtcgatctggtgatccaagacctcaagcagcagagcctcccgatcacttaacaattacaaggcggagaacctggagcagggatgaagtcatgggagataatctgctgctgtcatccgtctttcagttctctaagaagataagacaatctatagataagacagctggaaagatcagaatattatttaaagacaaagatcggaattgggatgacatagaaagcaaattaagagccgaaagtgaagtccctattgtgaaaacctcaagcatggagatttcttctatcttacaggaactgaaaagagtagaaaagcagctgcaagcaatcaatgctatgattgatcctgatggaactttggaggctctgaacaacatgggatttcccagtgctatgttgccatctccaccgaaacagaagtccagccctgtgaataaccaccacagcccgggtcagacaccaacacttggccaaccagaagctagggctcttcatcctgctgctgtttcagccgcagctgaatttgagaatgctgaatctgaggctgatttcagtatacatttcaatagattcaaccccgatggggaagaggaagatgttacagtacaagaatgactttctcttgattgttgaaaaatcattacctgtggaatggctaggaatattggaagcagcatagtgttgatgtacgcaaaacaagacagcttggtcagctacaatcttggaatccctgtcttcttaattttatttatttatttttgacgtataatgtagtatatcaatcctttcaaactatttagataaccacttgatgcacaaataggaaaaagcagattgtggcagtgtcgccttttgtggttttatgattttcaaattgaatttaatgattacaccctttcccttcatagatcttttttcttttttttaagccatgctgtgacctacaagcaaactaaatagccaacatttctgaacccctaagtctcctgtgccaagctgctccctgaaatggacttcttcatctgtacagatttgttaaaccattctatttgcttcttaataataggatttatattagtactcattaccattggacacaatgacataagtactctccacagtaaagcagacctttcacaacagtcactctgtgtcctaaaattttccaacatagatgtgatttatataactttgttgatacgtaaattgtcttggggtttacggaaattaactattatgtttgcactaagatttgctgggagtggtaggtggacatatctatatatcaataaggactaaccgtcttttttgtacataggagattgataatactgtatttgttttaagcccacagtgttttactccactttcaaaaagatcaatttggcactttttttcattttttttaatggaaataagatttggtctctcattttaggttaaatgataactagaaagattaaactagacagatagtttaggtggagtatatttttaaaactcagaacatgtatattggtcctgtgttaccaagtttatatgtgacagttgaaaaagaaattcccttgaaatgatcatgaggttaaaattttcttcattaggggacttggagaaccagtagtcgtaagattagttgatagtttcactcccaagcaatgaattgcttctgtgtgtttccctgtaggactcaatagtaaatgctgtctgtcttacacatttataaggaccctgcaagacgacgacaaaggcctttggcctgtgctactaaacaagaagcctatgaaaaatttcttctttaaacttgttttttctctttccagtaagttcacatttggataattttaaaaagaaaagtaattacctttgtgtttccagaacactataattggggtgtatcttaattcagttaaatattattagtagacctggattttcccccttgaccccatcagtctataaaggttaaactgcaacttttatgaaatggtctttaatatttccacaataatcctgtgctatatttgttttaagaaacaaagtaactctatacacttcaagactttacaggattttttaaatcctgtattgttggatcaattaataaagatgcaaaaaaactttatagagatgtaaaaacaaaactataatggatctcctatttttctttaaatacaaaaaaaaaaaggtaaatgaactattctccttgtaaagctaaattccccattctgtctaataaaggaagactgaaaaaaggttttaaagaacataaatggaaagatacaaatgctttgaaggaataaacgaaatgttaaaacagggtcaatccatttgaagaaaaagttggacaaaataatcagcattgctccctcttttatttaatatttgggtactgattatatccacatggaagtagaaggtaaggagtttaggggttcaattataaacatttggccttttactatgttatttttattttgtatgaatacattatcctccttatttatttttgttacatttattacttatgttattttgttatgcatttacaactccatttttaaataaagtgtttctggaacttt

SEQ ID NO: 306812 - DNA, 7151 bp, Homo sapiens
aactgggcaggaggggatagggtccggcgcctcgccctttcccgaggcgcctgcgcactaggcagtcggtctttgccgttaccgctatgtgtggggcgtgtgtggaataacgttattgcccagcggagctgagggccccggagctcgaccgcagcggcagcgacgacaacagcggcgacgacgacgacgacgaggtggggggaggacggcgtgcgagagactcacgggacgcgacgcgccccgcctcccccgtccggtccctctctccacggtaaggggatgacgtagctttgccaaagacttagaagctaagcagaaaatgagcttaacatcctggtttttggtgagcagtggaggcactcgccacaggctgccacgagaaatgatttttgttggaagagatgactgtgagctcatgttgcagtctcgtagtgtggataagcaacacgctgtcatcaactatgatgcgtctacggatgagcatttagtgaaggatttgggcagcctcaatgggacttttgtgaatgatgtaaggattccggaacagacttatatcaccttgaaacttgaagataagctgagatttggatatgatacaaatcttttcactgtagtacaaggagaaatgagggtccctgaagaagctcttaagcatgagaagtttaccattcagcttcagttgtcccaaaaatcttcagaatcagaattatccaaatctgcaagtgccaaaagcatagattcaaaggtagcagacgctgctactgaagtgcagcacaaaactactgaagcactgaaatccgaggaaaaagccatggatatttctgctatgccccgtggtactccattatatgggcagccgtcatggtggggggatgatgaggtggatgaaaaaagagctttcaagacaaatggcaaacctgaagaaaaaaaccatgaagctggaacatcagggtgcagcatagatgccaagcaagttgaggaacaatctgcagctgcaaatgaagaagtactttttcctttctgtagggaaccaagttattttgaaatccctacaaaagaattccagcaaccatcacaaataacagaaagcactattcatgaaatcccaacaaaagacacgccaagttcccatataacaggtgcagggcatgcttcatttaccattgaatttgatgacagtaccccagggaaggtaactattagagaccatgtgacaaagtttacttctgatcagcgccacaagtccaagaagtcttctcctggaactcaagacttgctggggattcaaacaggaatgatggcacccgaaaacaaagttgctgactggctagcacaaaacaaccctcctcaaatgctatgggaaagaacagaagaggattctaaaagcattaaaagtgatgttccagtgtacttgaaaaggttgaaaggaaataaacatgatgatggtacgcaaagtgattcagagaacgctggggctcacaggcgctgtagcaaacgtgcaactcttgaggaacacttaagacgccaccattcagaacacaaaaagctacagaaggtccaggctactgaaaagcatcaagaccaagctgttactagctctgcgcatcacagaggggggcatggtgttccacatgggaaattgttaaaacagaaatcagaggagccatcggtgtcaatacccttcctacaaactgcattattaagaagttcagggagtcttgggcacagaccaagccaggagatggataaaatgttaaaaaatcaagcaacttctgctacttctgaaaaggataatgatgatgaccaaagtgacaagggtacttataccattgagttagagaatcccaacagtgaggaagtggaagcaagaaaaatgattgacaaggtgacagcctcttctttttataagctcctttatcagacgtaacctcctcaaaagcaaagactgtcatacagattttgtaatcccctgcagtggctagccaagtagcctgtggagagtgtttggagtagatgacaatcaggattataataggcctgttatcaacgaaaaacataaagatctaataaaagattgggctctcagttctgctgcagcagtaatggaagaaagaaaaccactgactacatctggatttcaccactcagaggaaggcacatcttcatctggaagcaaacgttgggtttcacagtgggctagtttggctgccaatcatacaaggcatgatcaagaagaaaggataatggaattttctgcacctcttcctttagagaatgagacagagatcagtgagtctggcatgacagtgagaagtactggctctgcaacttccttggctagccagggagagagaaggagacgaactcttccccagcttccaaatgaagaaaagtctcttgagagccacagagcaaaggttgtaacacagaggtcagagataggagaaaaacaagacacagaacttcaggagaaagaaacacctacacaggtataccagaaagataaacaagatgctgacagacccttgagtaaaatgaacagggcagtaaatggagagactctcaaaactggtggagataataaaaccctacttcacttaggcagctctgctcctggaaaagagaaaagtgaaactgataaggaaacttctttggtaaagcaaacattagcaaaacttcaacaacaagaacaaagggaggaggctcagtggacacctactaaattgtcttccaaaaatgtttcaggtcagacagataaatgtagggaggaaacttttaaacaagaatcacaacctccagaaaaaaattcaggacattctacaagcaaaggagacagagtggcacaaagtgagagcaagagaagaaaagctgaggaaattctgaaaagtcagactccaaagggaggagacaagaaggaatcctccaagtcattagtgcgacaagggagcttcactatagaaaaacccagcccaaacatacccatagaacttattccccatataaataaacagacttcctctactccttcttctttagcattaacatctgcaagtagaatacgagaaagaagtgagtctttggatcctgattctagtatggacacaacccttattctaaaagacacagaagcagtaatggcttttctagaagctaaactacgtgaagataataaaactgatgaaggaccagatactcccagttataatagagacaattctatttcaccagaatctgatgtagatacagctagtacaatcagtctggttactggagaaactgaaagaaagtcaacccaaaagcgaaagagtttcactagcctctataaagataggtgttccacaggttctccttccaaagatgttacaaaatcatcatcttcaggtgctagggaaaaaatggaaaagaaaacaaaaagtcgttccacagatgtgggttcaagagcagatggtcgtaaatttgttcagtccagtgggagaataagacagccctcagtagacttaacagatgatgaccaaacctctagtgtacctcattctgccatctctgatattatgtcatctgatcaagaaacttactcttgtaaacctcatggacggactccacttacctcagctgatgagcatgtacattccaaactggaaggaagtaaagtaacgaaatctaagacttctccggtggtatctggttcatctagtaaatcaaccacccttccaaggccacgacctaccaggacttccctcttgcgcagagcacgacttggtgaagcttcagacagtgaacttgctgatgctgacaaagcatctgttgcttctgaagtatccacaacaagttctacatcaaaacctcccacaggaaggcgtaacatctctcggattgatttattggctcagcctcgtagaacacgacttggctcactgtcagctcgtagtgactctgaagcaacaatttctagaagtagtgcctcttcgaggaccgcagaagccatcattagaagtggagccagactagtaccatcagataaattttctcctagaattagagctaacagtatctctcgactctcagactccaaggtcaaaagtatgacctcagctcatggctctgcttcagtaaattcaagatggaggcgctttcctactgattatgcttccacctcagaagatgaatttggatcaaaccgtaattcccctaaacatacccgtctacgtacttctccagccctgaaaaccactcgcttgcagagcgctggatcagcaatgcctactagttcttcattcaaacaccggattaaagagcaggaagactacatccgagattggactgctcatcgagaagagatagccaggatcagccaagatcttgctctcattgctcgggagatcaacgatgtagcaggagagatagattcagtgacttcatcaggcactgcccctagtaccacagtaagcactgctgccaccacccctggctctgccatagacactagagaagagttggttgatcgtgtttttgatgaaagcctcaacttccgaaagattcctccattagttcattccaaaacaccagaaggaaacaacggtcgatctggtgatccaagacctcaagcagcagagcctcccgatcacttaacaattacaaggcggagaacctggagcagggatgaagtcatgggagataatctgctgctgtcatccgtctttcagttctctaagaagataagacaatctatagataagacagctggaaagatcagaatattatttaaagacaaagatcggaattgggatgacatagaaagcaaattaagagccgaaagtgaagtccctattgtgaaaacctcaagcatggagatttcttctatcttacaggaactgaaaagagtagaaaagcagctgcaagcaatcaatgctatgattgatcctgatggaactttggaggctctgaacaacatgggatttcccagtgctatgttgccatctccaccgaaacagaagtccagccctgtgaataaccaccacagcccgggtcagacaccaacacttggccaaccagaagctagggctcttcatcctgctgctgtttcagccgcagctgaatttgagaatgctgaatctgaggctgatttcagtatacatttcaatagattcaaccccgatggggaagaggaagatgttacagtacaagaatgactttctcttgattgttgaaaaatcattacctgtggaatggctaggaatattggaagcagcatagtgttgatgtacgcaaaacaagacagcttggtcagctacaatcttggaatccctgtcttcttaattttatttatttatttttgacgtataatgtagtatatcaatcctttcaaactatttagataaccacttgatgcacaaataggaaaaagcagattgtggcagtgtcgccttttgtggttttatgattttcaaattgaatttaatgattacaccctttcccttcatagatcttttttcttttttttaagccatgctgtgacctacaagcaaactaaatagccaacatttctgaacccctaagtctcctgtgccaagctgctccctgaaatggacttcttcatctgtacagatttgttaaaccattctatttgcttcttaataataggatttatattagtactcattaccattggacacaatgacataagtactctccacagtaaagcagacctttcacaacagtcactctgtgtcctaaaattttccaacatagatgtgatttatataactttgttgatacgtaaattgtcttggggtttacggaaattaactattatgtttgcactaagatttgctgggagtggtaggtggacatatctatatatcaataaggactaaccgtcttttttgtacataggagattgataatactgtatttgttttaagcccacagtgttttactccactttcaaaaagatcaatttggcactttttttcattttttttaatggaaataagatttggtctctcattttaggttaaatgataactagaaagattaaactagacagatagtttaggtggagtatatttttaaaactcagaacatgtatattggtcctgtgttaccaagtttatatgtgacagttgaaaaagaaattcccttgaaatgatcatgaggttaaaattttcttcattaggggacttggagaaccagtagtcgtaagattagttgatagtttcactcccaagcaatgaattgcttctgtgtgtttccctgtaggactcaatagtaaatgctgtctgtcttacacatttataaggaccctgcaagacgacgacaaaggcctttggcctgtgctactaaacaagaagcctatgaaaaatttcttctttaaacttgttttttctctttccagtaagttcacatttggataattttaaaaagaaaagtaattacctttgtgtttccagaacactataattggggtgtatcttaattcagttaaatattattagtagacctggattttcccccttgaccccatcagtctataaaggttaaactgcaacttttatgaaatggtctttaatatttccacaataatcctgtgctatatttgttttaagaaacaaagtaactctatacacttcaagactttacaggattttttaaatcctgtattgttggatcaattaataaagatgcaaaaaaactttatagagatgtaaaaacaaaactataatggatctcctatttttctttaaatacaaaaaaagaagactgaaaaaaggttttaaagaacataaatggaaagatacaaatgctttgaaggaataaacgaaatgttaaaacagggtcaatccatttgaagaaaaagttggacaaaataatcagcattgctccctcttttatttaatatttgggtactgattatatccacatggaagtagaaggtaaggagtttaggaaaatactagaatctactctgcttacattcttgtttaagtgtttacacagtttggttcaattataaacatttggccttttactatgttatttttattttgtatgaatacattatcctccttatttatttttgttacatttattacttatgttattttgttatgcatttacaactccatttttaaataaagtgtttctggaacttt

SEQ ID NO: 306813 - DNA, 5568 bp, Homo sapiens
atacaaaacttgagaaagcaaagtctccaacagcagatgccaaagtggtttctttgtctttacagactagctctgcgcatcacagaggggggcatggtgttccacatgggaaattgttaaaacagaaatcagaggagccatcggtgtcaatacccttcctacaaactgcattattaagaagttcagggagtcttgggcacagaccaagccaggagatggataaaatgttaaaaaatcaagcaacttctgctacttctgaaaaggataatgatgatgaccaaagtgacaagggtacttataccattgagttagagaatcccaacagtgaggaagtggaagcaagaaaaatgattgacaaggtgtttggagtagatgacaatcaggattataataggcctgttatcaacgaaaaacataaagatctaataaaagattgggctctcagttctgctgcagcagtaatggaagaaagaaaaccactgactacatctggatttcaccactcagaggaaggcacatcttcatctggaagcaaacgttgggtttcacagtgggctagtttggctgccaatcatacaaggcatgatcaagaagaaaggataatggaattttctgcacctcttcctttagagaatgagacagagatcagtgagtctggcatgacagtgagaagtactggctctgcaacttccttggctagccagggagagagaaggagacgaactcttccccagcttccaaatgaagaaaagtctcttgagagccacagagcaaaggttgtaacacagaggtcagagataggagaaaaacaagacacagaacttcaggagaaagaaacacctacacaggtataccagaaagataaacaagatgctgacagacccttgagtaaaatgaacagggcagtaaatggagagactctcaaaactggtggagataataaaaccctacttcacttaggcagctctgctcctggaaaagagaaaagtgaaactgataaggaaacttctttggtaaagcaaacattagcaaaacttcaacaacaagaacaaagggaggaggctcagtggacacctactaaattgtcttccaaaaatgtttcaggtcagacagataaatgtagggaggaaacttttaaacaagaatcacaacctccagaaaaaaattcaggacattctacaagcaaaggagacagagtggcacaaagtgagagcaagagaagaaaagctgaggaaattctgaaaagtcagactccaaagggaggagacaagaaggaatcctccaagtcattagtgcgacaagggagcttcactatagaaaaacccagcccaaacatacccatagaacttattccccatataaataaacagacttcctctactccttcttctttagcattaacatctgcaagtagaatacgagaaagaagtgagtctttggatcctgattctagtatggacacaacccttattctaaaagacacagaagcagtaatggcttttctagaagctaaactacgtgaagataataaaactgatgaaggaccagatactcccagttataatagagacaattctatttcaccagaatctgatgtagatacagctagtacaatcagtctggttactggagaaactgaaagaaagtcaacccaaaagcgaaagagtttcactagcctctataaagataggtgttccacaggttctccttccaaagatgttacaaaatcatcatcttcaggtgctagggaaaaaatggaaaagaaaacaaaaagtcgttccacagatgtgggttcaagagcagatggtcgtaaatttgttcagtccagtgggagaataagacagccctcagtagacttaacagatgatgaccaaacctctagtgtacctcattctgccatctctgatattatgtcatctgatcaagaaacttactcttgtaaacctcatggacggactccacttacctcagctgatgagcatgtacattccaaactggaaggaagtaaagtaacgaaatctaagacttctccggtggtatctggttcatctagtaaatcaaccacccttccaaggccacgacctaccaggacttccctcttgcgcagagcacgacttggtgaagcttcagacagtgaacttgctgatgctgacaaagcatctgttgcttctgaagtatccacaacaagttctacatcaaaacctcccacaggaaggcgtaacatctctcggattgatttattggctcagcctcgtagaacacgacttggctcactgtcagctcgtagtgactctgaagcaacaatttctagaagtagtgcctcttcgaggaccgcagaagccatcattagaagtggagccagactagtaccatcagataaattttctcctagaattagagctaacagtatctctcgactctcagactccaaggtcaaaagtatgacctcagctcatggctctgcttcagtaaattcaagatggaggcgctttcctactgattatgcttccacctcagaagatgaatttggatcaaaccgtaattcccctaaacatacccgtctacgtacttctccagccctgaaaaccactcgcttgcagagcgctggatcagcaatgcctactagttcttcattcaaacaccggattaaagagcaggaagactacatccgagattggactgctcatcgagaagagatagccaggatcagccaagatcttgctctcattgctcgggagatcaacgatgtagcaggagagatagattcagtgacttcatcaggcactgcccctagtaccacagtaagcactgctgccaccacccctggctctgccatagacactagagaagagttggttgatcgtgtttttgatgaaagcctcaacttccgaaagattcctccattagttcattccaaaacaccagaaggaaacaacggtcgatctggtgatccaagacctcaagcagcagagcctcccgatcacttaacaattacaaggcggagaacctggagcagggatgaagtcatgggagataatctgctgctgtcatccgtctttcagttctctaagaagataagacaatctatagataagacagctggaaagatcagaatattatttaaagacaaagatcggaattgggatgacatagaaagcaaattaagagccgaaagtgaagtccctattgtgaaaacctcaagcatggagatttcttctatcttacaggaactgaaaagagtagaaaagcagctgcaagcaatcaatgctatgattgatcctgatggaactttggaggctctgaacaacatgggatttcccagtgctatgttgccatctccaccgaaacagaagtccagccctgtgaataaccaccacagcccgggtcagacaccaacacttggccaaccagaagctagggctcttcatcctgctgctgtttcagccgcagctgaatttgagaatgctgaatctgaggctgatttcagtatacatttcaatagattcaaccccgatggggaagaggaagatgttacagtacaagaatgactttctcttgattgttgaaaaatcattacctgtggaatggctaggaatattggaagcagcatagtgttgatgtacgcaaaacaagacagcttggtcagctacaatcttggaatccctgtcttcttaattttatttatttatttttgacgtataatgtagtatatcaatcctttcaaactatttagataaccacttgatgcacaaataggaaaaagcagattgtggcagtgtcgccttttgtggttttatgattttcaaattgaatttaatgattacaccctttcccttcatagatcttttttcttttttttaagccatgctgtgacctacaagcaaactaaatagccaacatttctgaacccctaagtctcctgtgccaagctgctccctgaaatggacttcttcatctgtacagatttgttaaaccattctatttgcttcttaataataggatttatattagtactcattaccattggacacaatgacataagtactctccacagtaaagcagacctttcacaacagtcactctgtgtcctaaaattttccaacatagatgtgatttatataactttgttgatacgtaaattgtcttggggtttacggaaattaactattatgtttgcactaagatttgctgggagtggtaggtggacatatctatatatcaataaggactaaccgtcttttttgtacataggagattgataatactgtatttgttttaagcccacagtgttttactccactttcaaaaagatcaatttggcactttttttcattttttttaatggaaataagatttggtctctcattttaggttaaatgataactagaaagattaaactagacagatagtttaggtggagtatatttttaaaactcagaacatgtatattggtcctgtgttaccaagtttatatgtgacagttgaaaaagaaattcccttgaaatgatcatgaggttaaaattttcttcattaggggacttggagaaccagtagtcgtaagattagttgatagtttcactcccaagcaatgaattgcttctgtgtgtttccctgtaggactcaatagtaaatgctgtctgtcttacacatttataaggaccctgcaagacgacgacaaaggcctttggcctgtgctactaaacaagaagcctatgaaaaatttcttctttaaacttgttttttctctttccagtaagttcacatttggataattttaaaaagaaaagtaattacctttgtgtttccagaacactataattggggtgtatcttaattcagttaaatattattagtagacctggattttcccccttgaccccatcagtctataaaggttaaactgcaacttttatgaaatggtctttaatatttccacaataatcctgtgctatatttgttttaagaaacaaagtaactctatacacttcaagactttacaggattttttaaatcctgtattgttggatcaattaataaagatgcaaaaaaactttatagagatgtaaaaacaaaactataatggatctcctatttttctttaaatacaaaaaaaaaaaggtaaatgaactattctccttgtaaagctaaattccccattctgtctaataaaggaagactgaaaaaaggttttaaagaacataaatggaaagatacaaatgctttgaaggaataaacgaaatgttaaaacagggtcaatccatttgaagaaaaagttggacaaaataatcagcattgctccctcttttatttaatatttgggtactgattatatccacatggaagtagaaggtaaggagtttaggaaaatactagaatctactctgcttacattcttgtttaagtgtttacacagtttggttcaattataaacatttggccttttactatgttatttttattttgtatgaatacattatcctccttatttatttttgttacatttattacttatgttattttgttatgcatttacaactccatttttaaataaagtgtttctggaacttt

SEQ ID NO: 306814 - DNA, 7239 bp, Homo sapiens
aactgggcaggaggggatagggtccggcgcctcgccctttcccgaggcgcctgcgcactaggcagtcggtctttgccgttaccgctatgtgtggggcgtgtgtggaataacgttattgcccagcggagctgagggccccggagctcgaccgcagcggcagcgacgacaacagcggcgacgacgacgacgacgaggtggggggaggacggcgtgcgagagactcacgggacgcgacgcgccccgcctcccccgtccggtccctctctccacggtaaggggatgacgtagctttgccaaagacttagaagctaagcagaaaatgagcttaacatcctggtttttggtgagcagtggaggcactcgccacaggctgccacgagaaatgatttttgttggaagagatgactgtgagctcatgttgcagtctcgtagtgtggataagcaacacgctgtcatcaactatgatgcgtctacggatgagcatttagtgaaggatttgggcagcctcaatgggacttttgtgaatgatgtaaggattccggaacagacttatatcaccttgaaacttgaagataagctgagatttggatatgatacaaatcttttcactgtagtacaaggagaaatgagggtccctgaagaagctcttaagcatgagaagtttaccattcagcttcagttgtcccaaaaatcttcagaatcagaattatccaaatctgcaagtgccaaaagcatagattcaaaggtagcagacgctgctactgaagtgcagcacaaaactactgaagcactgaaatccgaggaaaaagccatggatatttctgctatgccccgtggtactccattatatgggcagccgtcatggtggggggatgatgaggtggatgaaaaaagagctttcaagacaaatggcaaacctgaagaaaaaaaccatgaagctggaacatcagggtgcagcatagatgccaagcaagttgaggaacaatctgcagctgcaaatgaagaagtactttttcctttctgtagggaaccaagttattttgaaatccctacaaaagaattccagcaaccatcacaaataacagaaagcactattcatgaaatcccaacaaaagacacgccaagttcccatataacaggtgcagggcatgcttcatttaccattgaatttgatgacagtaccccagggaaggtaactattagagaccatgtgacaaagtttacttctgatcagcgccacaagtccaagaagtcttctcctggaactcaagacttgctggggattcaaacaggaatgatggcacccgaaaacaaagttgctgactggctagcacaaaacaaccctcctcaaatgctatgggaaagaacagaagaggattctaaaagcattaaaagtgatgttccagtgtacttgaaaaggttgaaaggaaataaacatgatgatggtacgcaaagtgattcagagaacgctggggctcacaggcgctgtagcaaacgtgcaactcttgaggaacacttaagacgccaccattcagaacacaaaaagctacagaaggtccaggctactgaaaagcatcaagaccaagctgttactagctctgcgcatcacagaggggggcatggtgttccacatgggaaattgttaaaacagaaatcagaggagccatcggtgtcaatacccttcctacaaactgcattattaagaagttcagggagtcttgggcacagaccaagccaggagatggataaaatgttaaaaaatcaagcaacttctgctacttctgaaaaggataatgatgatgaccaaagtgacaagggtacttataccattgagttagagaatcccaacagtgaggaagtggaagcaagaaaaatgattgacaaggtgacagcctcttctttttataagctcctttatcagacgtaacctcctcaaaagcaaagactgtcatacagattttgtaatcccctgcagtggctagccaagtagcctgtggagagtgtttggagtagatgacaatcaggattataataggcctgttatcaacgaaaaacataaagatctaataaaagattgggctctcagttctgctgcagcagtaatggaagaaagaaaaccactgactacatctggatttcaccactcagaggaaggcacatcttcatctggaagcaaacgttgggtttcacagtgggctagtttggctgccaatcatacaaggcatgatcaagaagaaaggataatggaattttctgcacctcttcctttagagaatgagacagagatcagtgagtctggcatgacagtgagaagtactggctctgcaacttccttggctagccagggagagagaaggagacgaactcttccccagcttccaaatgaagaaaagtctcttgagagccacagagcaaaggttgtaacacagaggtcagagataggagaaaaacaagacacagaacttcaggagaaagaaacacctacacaggtataccagaaagataaacaagatgctgacagacccttgagtaaaatgaacagggcagtaaatggagagactctcaaaactggtggagataataaaaccctacttcacttaggcagctctgctcctggaaaagagaaaagtgaaactgataaggaaacttctttggtaaagcaaacattagcaaaacttcaacaacaagaacaaagggaggaggctcagtggacacctactaaattgtcttccaaaaatgtttcaggtcagacagataaatgtagggaggaaacttttaaacaagaatcacaacctccagaaaaaaattcaggacattctacaagcaaaggagacagagtggcacaaagtgagagcaagagaagaaaagctgaggaaattctgaaaagtcagactccaaagggaggagacaagaaggaatcctccaagtcattagtgcgacaagggagcttcactatagaaaaacccagcccaaacatacccatagaacttattccccatataaataaacagacttcctctactccttcttctttagcattaacatctgcaagtagaatacgagaaagaagtgagtctttggatcctgattctagtatggacacaacccttattctaaaagacacagaagcagtaatggcttttctagaagctaaactacgtgaagataataaaactgatgaaggaccagatactcccagttataatagagacaattctatttcaccagaatctgatgtagatacagctagtacaatcagtctggttactggagaaactgaaagaaagtcaacccaaaagcgaaagagtttcactagcctctataaagataggtgttccacaggttctccttccaaagatgttacaaaatcatcatcttcaggtgctagggaaaaaatggaaaagaaaacaaaaagtcgttccacagatgtgggttcaagagcagatggtcgtaaatttgttcagtccagtgggagaataagacagccctcagtagacttaacagatgatgaccaaacctctagtgtacctcattctgccatctctgatattatgtcatctgatcaagaaacttactcttgtaaacctcatggacggactccacttacctcagctgatgagcatgtacattccaaactggaaggaagtaaagtaacgaaatctaagacttctccggtggtatctggttcatctagtaaatcaaccacccttccaaggccacgacctaccaggacttccctcttgcgcagagcacgacttggtgaagcttcagacagtgaacttgctgatgctgacaaagcatctgttgcttctgaagtatccacaacaagttctacatcaaaacctcccacaggaaggcgtaacatctctcggattgatttattggctcagcctcgtagaacacgacttggctcactgtcagctcgtagtgactctgaagcaacaatttctagaagtagtgcctcttcgaggaccgcagaagccatcattagaagtggagccagactagtaccatcagataaattttctcctagaattagagctaacagtatctctcgactctcagactccaaggtcaaaagtatgacctcagctcatggctctgcttcagtaaattcaagatggaggcgctttcctactgattatgcttccacctcagaagatgaatttggatcaaaccgtaattcccctaaacatacccgtctacgtacttctccagccctgaaaaccactcgcttgcagagcgctggatcagcaatgcctactagttcttcattcaaacaccggattaaagagcaggaagactacatccgagattggactgctcatcgagaagagatagccaggatcagccaagatcttgctctcattgctcgggagatcaacgatgtagcaggagagatagattcagtgacttcatcaggcactgcccctagtaccacagtaagcactgctgccaccacccctggctctgccatagacactagagaagaggtaggagatcttcatggagaaatgcataagttggttgatcgtgtttttgatgaaagcctcaacttccgaaagattcctccattagttcattccaaaacaccagaaggaaacaacggtcgatctggtgatccaagacctcaagcagcagagcctcccgatcacttaacaattacaaggcggagaacctggagcagggatgaagtcatgggagataatctgctgctgtcatccgtctttcagttctctaagaagataagacaatctatagataagacagctggaaagatcagaatattatttaaagacaaagatcggaattgggatgacatagaaagcaaattaagagccgaaagtgaagtccctattgtgaaaacctcaagcatggagatttcttctatcttacaggaactgaaaagagtagaaaagcagctgcaagcaatcaatgctatgattgatcctgatggaactttggaggctctgaacaacatgggatttcccagtgctatgttgccatctccaccgaaacagaagtccagccctgtgaataaccaccacagcccgggtcagacaccaacacttggccaaccagaagctagggctcttcatcctgctgctgtttcagccgcagctgaatttgagaatgctgaatctgaggctgatttcagtatacatttcaatagattcaaccccgatggggaagaggaagatgttacagtacaagaatgactttctcttgattgttgaaaaatcattacctgtggaatggctaggaatattggaagcagcatagtgttgatgtacgcaaaacaagacagcttggtcagctacaatcttggaatccctgtcttcttaattttatttatttatttttgacgtataatgtagtatatcaatcctttcaaactatttagataaccacttgatgcacaaataggaaaaagcagattgtggcagtgtcgccttttgtggttttatgattttcaaattgaatttaatgattacaccctttcccttcatagatcttttttcttttttttaagccatgctgtgacctacaagcaaactaaatagccaacatttctgaacccctaagtctcctgtgccaagctgctccctgaaatggacttcttcatctgtacagatttgttaaaccattctatttgcttcttaataataggatttatattagtactcattaccattggacacaatgacataagtactctccacagtaaagcagacctttcacaacagtcactctgtgtcctaaaattttccaacatagatgtgatttatataactttgttgatacgtaaattgtcttggggtttacggaaattaactattatgtttgcactaagatttgctgggagtggtaggtggacatatctatatatcaataaggactaaccgtcttttttgtacataggagattgataatactgtatttgttttaagcccacagtgttttactccactttcaaaaagatcaatttggcactttttttcattttttttaatggaaataagatttggtctctcattttaggttaaatgataactagaaagattaaactagacagatagtttaggtggagtatatttttaaaactcagaacatgtatattggtcctgtgttaccaagtttatatgtgacagttgaaaaagaaattcccttgaaatgatcatgaggttaaaattttcttcattaggggacttggagaaccagtagtcgtaagattagttgatagtttcactcccaagcaatgaattgcttctgtgtgtttccctgtaggactcaatagtaaatgctgtctgtcttacacatttataaggaccctgcaagacgacgacaaaggcctttggcctgtgctactaaacaagaagcctatgaaaaatttcttctttaaacttgttttttctctttccagtaagttcacatttggataattttaaaaagaaaagtaattacctttgtgtttccagaacactataattggggtgtatcttaattcagttaaatattattagtagacctggattttcccccttgaccccatcagtctataaaggttaaactgcaacttttatgaaatggtctttaatatttccacaataatcctgtgctatatttgttttaagaaacaaagtaactctatacacttcaagactttacaggattttttaaatcctgtattgttggatcaattaataaagatgcaaaaaaactttatagagatgtaaaaacaaaactataatggatctcctatttttctttaaatacaaaaaaaaaaaggtaaatgaactattctccttgtaaagctaaattccccattctgtctaataaaggaagactgaaaaaaggttttaaagaacataaatggaaagatacaaatgctttgaaggaataaacgaaatgttaaaacagggtcaatccatttgaagaaaaagttggacaaaataatcagcattgctccctcttttatttaatatttgggtactgattatatccacatggaagtagaaggtaaggagtttaggaaaatactagaatctactctgcttacattcttgtttaagtgtttacacagtttggttcaattataaacatttggccttttactatgttatttttattttgtatgaatacattatcctccttatttatttttgttacatttattacttatgttattttgttatgcatttacaactccatttttaaataaagtgtttctggaacttt

SEQ ID NO: 306815 - DNA, 7036 bp, Homo sapiens
aactgggcaggaggggatagggtccggcgcctcgccctttcccgaggcgcctgcgcactaggcagtcggtctttgccgttaccgctatgtgtggggcgtgtgtggaataacgttattgcccagcggagctgagggccccggagctcgaccgcagcggcagcgacgacaacagcggcgacgacgacgacgacgaggtggggggaggacggcgtgcgagagactcacgggacgcgacgcgccccgcctcccccgtccggtccctctctccacggtaaggggatgacgtagctttgccaaagacttagaagctaagcagaaaatgagcttaacatcctggtttttggtgagcagtggaggcactcgccacaggctgccacgagaaatgatttttgttggaagagatgactgtgagctcatgttgcagtctcgtagtgtggataagcaacacgctgtcatcaactatgatgcgtctacggatgagcatttagtgaaggatttgggcagcctcaatgggacttttgtgaatgatgtaaggattccggaacagacttatatcaccttgaaacttgaagataagctgagatttggatatgatacaaatcttttcactgtagtacaaggagaaatgagggtccctgaagaagctcttaagcatgagaagtttaccattcagcttcagttgtcccaaaaatcttcagaatcagaattatccaaatctgcaagtgccaaaagcatagattcaaaggtagcagacgctgctactgaagtgcagcacaaaactactgaagcactgaaatccgaggaaaaagccatggatatttctgctatgccccgtggtactccattatatgggcagccgtcatggtggggggatgatgaggtggatgaaaaaagagctttcaagacaaatggcaaacctgaagaaaaaaaccatgaagctggaacatcagggtgcagcatagatgccaagcaagttgaggaacaatctgcagctgcaaatgaagaagtactttttcctttctgtagggaaccaagttattttgaaatccctacaaaagaattccagcaaccatcacaaataacagaaagcactattcatgaaatcccaacaaaagacacgccaagttcccatataacaggtgcagggcatgcttcatttaccattgaatttgatgacagtaccccagggaaggtaactattagagaccatgtgacaaagtttacttctgatcagcgccacaagtccaagaagtcttctcctggaactcaagacttgctggggattcaaacaggaatgatggcacccgaaaacaaagttgctgactggctagcacaaaacaaccctcctcaaatgctatgggaaagaacagaagaggattctaaaagcattaaaagtgatgttccagtgtacttgaaaaggttgaaaggaaataaacatgatgatggtacgcaaagtgattcagagaacgctggggctcacaggcgctgtagcaaacgtgcaactcttgaggaacacttaagacgccaccattcagaacacaaaaagctacagaaggtccaggctactgaaaagcatcaagaccaagctgttactagctctgcgcatcacagaggggggcatggtgttccacatgggaaattgttaaaacagaaatcagaggagccatcggtgtcaatacccttcctacaaactgcattattaagaagttcagggagtcttgggcacagaccaagccaggagatggataaaatgttaaaaaatcaagcaacttctgctacttctgaaaaggataatgatgatgaccaaagtgacaagggtacttataccattgagttagagaatcccaacagtgaggaagtggaagcaagaaaaatgattgacaaggtgacagcctcttctttttataagctcctttatcagacgtaacctcctcaaaagcaaagactgtcatacagattttgtaatcccctgcagtggctagccaagtagcctgtggagagtgtttggagtagatgacaatcaggattataataggcctgttatcaacgaaaaacataaagatctaataaaagattgggctctcagttctgctgcagcagtaatggaagaaagaaaaccactgactacatctggatttcaccactcagaggaaggcacatcttcatctggaagcaaacgttgggtttcacagtgggctagtttggctgccaatcatacaaggcatgatcaagaagaaaggataatggaattttctgcacctcttcctttagagaatgagacagagatcagtgagtctggcatgacagtgagaagtactggctctgcaacttccttggctagccagggagagagaaggagacgaactcttccccagcttccaaatgaagaaaagtctcttgagagccacagagcaaaggttgtaacacagaggtcagagataggagaaaaacaagacacagaacttcaggagaaagaaacacctacacaggtataccagaaagataaacaagatgctgacagacccttgagtaaaatgaacagggcagtaaatggagagactctcaaaactggtggagataataaaaccctacttcacttaggcagctctgctcctggaaaagagaaaagtgaaactgataaggaaacttctttggtaaagcaaacattagcaaaacttcaacaacaagaacaaagggaggaggctcagtggacacctactaaattgtcttccaaaaatgtttcaggtcagacagataaatgtagggaggaaacttttaaacaagaatcacaacctccagaaaaaaattcaggacattctacaagcaaaggagacagagtggcacaaagtgagagcaagagaagaaaagctgaggaaattctgaaaagtcagactccaaagggaggagacaagaaggaatcctccaagtcattagtgcgacaagggagcttcactatagaaaaacccagcccaaacatacccatagaacttattccccatataaataaacagacttcctctactccttcttctttagcattaacatctgcaagtagaatacgagaaagaagtgagtctttggatcctgattctagtatggacacaacccttattctaaaagacacagaagcagtaatggcttttctagaagctaaactacgtgaagataataaaactgatgaaggaccagatactcccagttataatagagacaattctatttcaccagaatctgatgtagatacagctagtacaatcagtctggttactggagaaactgaaagaaagtcaacccaaaagcgaaagagtttcactagcctctataaagataggtgttccacaggttctccttccaaagatgttacaaaatcatcatcttcaggtgctagggaaaaaatggaaaagaaaacaaaaagtcgttccacagatgtgggttcaagagcagatggtcgtaaatttgttcagtccagtgggagaataagacagccctcagtagacttaacagatgatgaccaaacctctagtgtacctcattctgccatctctgatattatgtcatctgatcaagaaacttactcttgtaaacctcatggacggactccacttacctcagctgatgagcatgtacattccaaactggaaggaagtaaagtaacgaaatctaagacttctccggtggtatctggttcatctagtaaatcaaccacccttccaaggccacgacctaccaggacttccctcttgcgcagagcacgacttggtgaagcttcagacagtgaacttgctgatgctgacaaagcatctgttgcttctgaagtatccacaacaagttctacatcaaaacctcccacaggaaggcgtaacatctctcggattgatttattggctcagcctcgtagaacacgacttggctcactgtcagctcgtagtgactctgaagcaacaatttctagaagtagtgcctcttcgaggaccgcagaagccatcattagaagtggagccagactagtaccatcagataaattttctcctagaattagagctaacagtatctctcgactctcagactccaaggtcaaaagtatgacctcagctcatggctctgcttcagtaaattcaagatggaggcgctttcctactgattatgcttccacctcagaagatgaatttggatcaaaccgtaattcccctaaacatacccgtctacgtacttctccagccctgaaaaccactcgcttgcagagcgctggatcagcaatgcctactagttcttcattcaaacaccggattaaagagcaggaagactacatccgagattggactgctcatcgagaagagatagccaggatcagccaagatcttgctctcattgctcgggagatcaacgatgtagcaggagagatagattcagtgacttcatcaggcactgcccctagtaccacagtaagcactgctgccaccacccctggctctgccatagacactagagaagaggtaggagatcttcatggagaaatgcataagttggttgatcgtgtttttgatgaaagcctcaacttccgaaagattcctccattagttcattccaaaacaccagaaggaaacaacggtcgatctggtgatccaagacctcaagcagcagagcctcccgatcacttaacaattacaaggcggagaacctggagcagggatgaagtcatgggagataatctgctgctgtcatccgtctttcagttctctaagaagataagacaatctatagataagacagctggaaagatcagaatattatttaaagacaaagatcggaattgggatgacatagaaagcaaattaagagccgaaagtgaagtccctattgtgaaaacctcaagcatggagatttcttctatcttacaggaactgaaaagagtagaaaagcagctgcaagaatgctgaatctgaggctgatttcagtatacatttcaatagattcaaccccgatggggaagaggaagatgttacagtacaagaatgactttctcttgattgttgaaaaatcattacctgtggaatggctaggaatattggaagcagcatagtgttgatgtacgcaaaacaagacagcttggtcagctacaatcttggaatccctgtcttcttaattttatttatttatttttgacgtataatgtagtatatcaatcctttcaaactatttagataaccacttgatgcacaaataggaaaaagcagattgtggcagtgtcgccttttgtggttttatgattttcaaattgaatttaatgattacaccctttcccttcatagatcttttttcttttttttaagccatgctgtgacctacaagcaaactaaatagccaacatttctgaacccctaagtctcctgtgccaagctgctccctgaaatggacttcttcatctgtacagatttgttaaaccattctatttgcttcttaataataggatttatattagtactcattaccattggacacaatgacataagtactctccacagtaaagcagacctttcacaacagtcactctgtgtcctaaaattttccaacatagatgtgatttatataactttgttgatacgtaaattgtcttggggtttacggaaattaactattatgtttgcactaagatttgctgggagtggtaggtggacatatctatatatcaataaggactaaccgtcttttttgtacataggagattgataatactgtatttgttttaagcccacagtgttttactccactttcaaaaagatcaatttggcactttttttcattttttttaatggaaataagatttggtctctcattttaggttaaatgataactagaaagattaaactagacagatagtttaggtggagtatatttttaaaactcagaacatgtatattggtcctgtgttaccaagtttatatgtgacagttgaaaaagaaattcccttgaaatgatcatgaggttaaaattttcttcattaggggacttggagaaccagtagtcgtaagattagttgatagtttcactcccaagcaatgaattgcttctgtgtgtttccctgtaggactcaatagtaaatgctgtctgtcttacacatttataaggaccctgcaagacgacgacaaaggcctttggcctgtgctactaaacaagaagcctatgaaaaatttcttctttaaacttgttttttctctttccagtaagttcacatttggataattttaaaaagaaaagtaattacctttgtgtttccagaacactataattggggtgtatcttaattcagttaaatattattagtagacctggattttcccccttgaccccatcagtctataaaggttaaactgcaacttttatgaaatggtctttaatatttccacaataatcctgtgctatatttgttttaagaaacaaagtaactctatacacttcaagactttacaggattttttaaatcctgtattgttggatcaattaataaagatgcaaaaaaactttatagagatgtaaaaacaaaactataatggatctcctatttttctttaaatacaaaaaaaaaaaggtaaatgaactattctccttgtaaagctaaattccccattctgtctaataaaggaagactgaaaaaaggttttaaagaacataaatggaaagatacaaatgctttgaaggaataaacgaaatgttaaaacagggtcaatccatttgaagaaaaagttggacaaaataatcagcattgctccctcttttatttaatatttgggtactgattatatccacatggaagtagaaggtaaggagtttaggaaaatactagaatctactctgcttacattcttgtttaagtgtttacacagtttggttcaattataaacatttggccttttactatgttatttttattttgtatgaatacattatcctccttatttatttttgttacatttattacttatgttattttgttatgcatttacaactccatttttaaataaagtgtttctggaacttt

SEQ ID NO: 306816 - DNA, 6761 bp, Homo sapiens
aactgggcaggaggggatagggtccggcgcctcgccctttcccgaggcgcctgcgcactaggcagtcggtctttgccgttaccgctatgtgtggggcgtgtgtggaataacgttattgcccagcggagctgagggccccggagctcgaccgcagcggcagcgacgacaacagcggcgacgacgacgacgacgaggtggggggaggacggcgtgcgagagactcacgggacgcgacgcgccccgcctcccccgtccggtccctctctccacggtaaggggatgacgtagctttgccaaagacttagaagctaagcagaaaatgagcttaacatcctggtttttggtgagcagtggaggcactcgccacaggctgccacgagaaatgatttttgttggaagagatgactgtgagctcatgttgcagtctcgtagtgtggataagcaacacgctgtcatcaactatgatgcgtctacggatgagcatttagtgaaggatttgggcagcctcaatgggacttttgtgaatgatgtaaggattccggaacagacttatatcaccttgaaacttgaagataagctgagatttggatatgatacaaatcttttcactgtagtacaaggagaaatgagggtccctgaagaagctcttaagcatgagaagtttaccattcagcttcagttgtcccaaaaatcttcagaatcagaattatccaaatctgcaagtgccaaaagcatagattcaaaggtagcagacgctgctactgaagtgcagcacaaaactactgaagcactgaaatccgaggaaaaagccatggatatttctgctatgccccgtggtactccattatatgggcagccgtcatggtggggggatgatgaggtggatgaaaaaagagctttcaagacaaatggcaaacctgaagaaaaaaaccatgaagctggaacatcagggtgcagcatagatgccaagcaagttgaggaacaatctgcagctgcaaatgaagaagtactttttcctttctgtagggaaccaagttattttgaaatccctacaaaagaattccagcaaccatcacaaataacagaaagcactattcatgaaatcccaacaaaagacacgccaagttcccatataacaggtgcagggcatgcttcatttaccattgaatttgatgacagtaccccagggaaggtaactattagagaccatgtgacaaagtttacttctgatcagcgccacaagtccaagaagtcttctcctggaactcaagacttgctggggattcaaacaggaatgatggcacccgaaaacaaagttgctgactggctagcacaaaacaaccctcctcaaatgctatgggaaagaacagaagaggattctaaaagcattaaaagtgatgttccagtgtacttgaaaaggttgaaaggaaataaacatgatgatggtacgcaaagtgattcagagaacgctggggctcacaggcgctgtagcaaacgtgcaactcttgaggaacacttaagacgccaccattcagaacacaaaaagctacagaaggtccaggctactgaaaagcatcaagaccaagctgttactagctctgcgcatcacagaggggggcatggtgttccacatgggaaattgttaaaacagaaatcagaggagccatcggtgtcaatacccttcctacaaactgcattattaagaagttcagggagtcttgggcacagaccaagccaggagatggataaaatgttaaaaaatcaagcaacttctgctacttctgaaaaggataatgatgatgaccaaagtgacaagggtacttataccattgagttagagaatcccaacagtgaggaagtggaagcaagaaaaatgattgacaaggtgacagcctcttctttttataagctcctttatcagacgtaacctcctcaaaagcaaagactgtcatacagattttgtaatcccctgcagtggctagccaagtagcctgtggagagtgtttggagtagatgacaatcaggattataataggcctgttatcaacgaaaaacataaagatctaataaaagattgggctctcagttctgctgcagcagtaatggaagaaagaaaaccactgactacatctggatttcaccactcagaggaaggcacatcttcatctggaagcaaacgttgggtttcacagtgggctagtttggctgccaatcatacaaggcatgatcaagaagaaaggataatggaattttctgcacctcttcctttagagaatgagacagagatcagtgagtctggcatgacagtgagaagtactggctctgcaacttccttggctagccagggagagagaaggagacgaactcttccccagcttccaaatgaagaaaagtctcttgagagccacagagcaaaggttgtaacacagaggtcagagataggagaaaaacaagacacagaacttcaggagaaagaaacacctacacaggtataccagaaagataaacaagatgctgacagacccttgagtaaaatgaacagggcagtaaatggagagactctcaaaactggtggagataataaaaccctacttcacttaggcagctctgctcctggaaaagagaaaagtgaaactgataaggaaacttctttggtaaagcaaacattagcaaaacttcaacaacaagaacaaagggaggaggctcagtggacacctactaaattgtcttccaaaaatgtttcaggtcagacagataaatgtagggaggaaacttttaaacaagaatcacaacctccagaaaaaaattcaggacattctacaagcaaaggagacagagtggcacaaagtgagagcaagagaagaaaagctgaggaaattctgaaaagtcagactccaaagggaggagacaagaaggaatcctccaagtcattagtgcgacaagggagcttcactatagaaaaacccagcccaaacatacccatagaacttattccccatataaataaacagacttcctctactccttcttctttagcattaacatctgcaagtagaatacgagaaagaagtgagtctttggatcctgattctagtatggacacaacccttattctaaaagacacagaagcagtaatggcttttctagaagctaaactacgtgaagataataaaactgatgaaggaccagatactcccagttataatagagacaattctatttcaccagaatctgatgtagatacagctagtacaatcagtctggttactggagaaactgaaagaaagtcaacccaaaagcgaaagagtttcactagcctctataaagataggtgttccacaggttctccttccaaagatgttacaaaatcatcatcttcaggtgctagggaaaaaatggaaaagaaaacaaaaagtcgttccacagatgtgggttcaagagcagatggtcgtaaatttgttcagtccagtgggagaataagacagccctcagtagacttaacagatgatgaccaaacctctagtgtacctcattctgccatctctgatattatgtcatctgatcaagaaacttactcttgtaaacctcatggacggactccacttacctcagctgatgagcatgtacattccaaactggaaggaagtaaagtaacgaaatctaagacttctccggtggtatctggttcatctagtaaatcaaccacccttccaaggccacgacctaccaggacttccctcttgcgcagagcacgacttggtgaagcttcagacagtgaacttgctgatgctgacaaagcatctgttgcttctgaagtatccacaacaagttctacatcaaaacctcccacaggaaggcgtaacatctctcggattgatttattggctcagcctcgtagaacacgacttggctcactgtcagctcgtagtgactctgaagcaacaatttctagaagtagtgcctcttcgaggaccgcagaagccatcattagaagtggagccagactagtaccatcagataaattttctcctagaattagagctaacagtatctctcgactctcagactccaaggtcaaaagtatgacctcagctcatggctctgcttcagtaaattcaagatggaggcgctttcctactgattatgcttccacctcagaagatgaatttggatcaaaccgtaattcccctaaacatacccgtctacgtacttctccagccctgaaaaccactcgcttgcagagcgctggatcagcaatgcctactagttcttcattcaaacaccggattaaagagcaggaagactacatccgagattggactgctcatcgagaagagatagccaggatcagccaagatcttgctctcattgctcgggagatcaacgatgtagcaggagagatagattcagtgacttcatcaggcactgcccctagtaccacagtaagcactgctgccaccacccctggctctgccatagacactagagaagaggtaggagatcttcatggagaaatgcataagttggttgatcgtgtttttgatgaaagcctcaacttccgaaagattcctccattagttcattccaaaacaccagaaggaaacaacggtcgatctggtgatccaagacctcaagcagcagagcctcccgatcacttaacaattacaaggcggagaacctggagcagggatgaagtcatgggagataatctgctgctgtcatccgtctttcagttctctaagaagataagacaatctatagataagacagctggaaagatcagaatattatttaaagacaaagatcggaattgggatgacatagaaagcaaattaagagccgaaagtgaagtccctattgtgaaaacctcaagcatggagatttcttctatcttacaggaactgaaaagagtagaaaagcagctgcaagcaatcaatgctatgattgatcctgatggaactttggaggctctgaacaacatgggatttcccagtgctatgttgccatctccaccgaaacagaagtccagccctgtgaataaccaccacagcccggccatgctgtgacctacaagcaaactaaatagccaacatttctgaacccctaagtctcctgtgccaagctgctccctgaaatggacttcttcatctgtacagatttgttaaaccattctatttgcttcttaataataggatttatattagtactcattaccattggacacaatgacataagtactctccacagtaaagcagacctttcacaacagtcactctgtgtcctaaaattttccaacatagatgtgatttatataactttgttgatacgtaaattgtcttggggtttacggaaattaactattatgtttgcactaagatttgctgggagtggtaggtggacatatctatatatcaataaggactaaccgtcttttttgtacataggagattgataatactgtatttgttttaagcccacagtgttttactccactttcaaaaagatcaatttggcactttttttcattttttttaatggaaataagatttggtctctcattttaggttaaatgataactagaaagattaaactagacagatagtttaggtggagtatatttttaaaactcagaacatgtatattggtcctgtgttaccaagtttatatgtgacagttgaaaaagaaattcccttgaaatgatcatgaggttaaaattttcttcattaggggacttggagaaccagtagtcgtaagattagttgatagtttcactcccaagcaatgaattgcttctgtgtgtttccctgtaggactcaatagtaaatgctgtctgtcttacacatttataaggaccctgcaagacgacgacaaaggcctttggcctgtgctactaaacaagaagcctatgaaaaatttcttctttaaacttgttttttctctttccagtaagttcacatttggataattttaaaaagaaaagtaattacctttgtgtttccagaacactataattggggtgtatcttaattcagttaaatattattagtagacctggattttcccccttgaccccatcagtctataaaggttaaactgcaacttttatgaaatggtctttaatatttccacaataatcctgtgctatatttgttttaagaaacaaagtaactctatacacttcaagactttacaggattttttaaatcctgtattgttggatcaattaataaagatgcaaaaaaactttatagagatgtaaaaacaaaactataatggatctcctatttttctttaaatacaaaaaaaaaaaggtaaatgaactattctccttgtaaagctaaattccccattctgtctaataaaggaagactgaaaaaaggttttaaagaacataaatggaaagatacaaatgctttgaaggaataaacgaaatgttaaaacagggtcaatccatttgaagaaaaagttggacaaaataatcagcattgctccctcttttatttaatatttgggtactgattatatccacatggaagtagaaggtaaggagtttaggaaaatactagaatctactctgcttacattcttgtttaagtgtttacacagtttggttcaattataaacatttggccttttactatgttatttttattttgtatgaatacattatcctccttatttatttttgttacatttattacttatgttattttgttatgcatttacaactccatttttaaataaagtgtttctggaacttt

SEQ ID NO: 306817 - DNA, 6878 bp, Homo sapiens
aactgggcaggaggggatagggtccggcgcctcgccctttcccgaggcgcctgcgcactaggcagtcggtctttgccgttaccgctatgtgtggggcgtgtgtggaataacgttattgcccagcggagctgagggccccggagctcgaccgcagcggcagcgacgacaacagcggcgacgacgacgacgacgaggtggggggaggacggcgtgcgagagactcacgggacgcgacgcgccccgcctcccccgtccggtccctctctccacggtaaggggatgacgtagctttgccaaagacttagaagctaagcagaaaatgagcttaacatcctggtttttggtgagcagtggaggcactcgccacaggctgccacgagaaatgatttttgttggaagagatgactgtgagctcatgttgcagtctcgtagtgtggataagcaacacgctgtcatcaactatgatgcgtctacggatgagcatttagtgaaggatttgggcagcctcaatgggacttttgtgaatgatgtaaggattccggaacagacttatatcaccttgaaacttgaagataagctgagatttggatatgatacaaatcttttcactgtagtacaaggagaaatgagggtccctgaagaagctcttaagcatgagaagtttaccattcagcttcagttgtcccaaaaatcttcagaatcagaattatccaaatctgcaagtgccaaaagcatagattcaaaggtagcagacgctgctactgaagtgcagcacaaaactactgaagcactgaaatccgaggaaaaagccatggatatttctgctatgccccgtggtactccattatatgggcagccgtcatggtggggggatgatgaggtggatgaaaaaagagctttcaagacaaatggcaaacctgaagaaaaaaaccatgaagctggaacatcagggtgcagcatagatgccaagcaagttgaggaacaatctgcagctgcaaatgaagaagtactttttcctttctgtagggaaccaagttattttgaaatccctacaaaagaattccagcaaccatcacaaataacagaaagcactattcatgaaatcccaacaaaagacacgccaagttcccatataacaggtgcagggcatgcttcatttaccattgaatttgatgacagtaccccagggaaggtaactattagagaccatgtgacaaagtttacttctgatcagcgccacaagtccaagaagtcttctcctggaactcaagacttgctggggattcaaacaggaatgatggcacccgaaaacaaagttgctgactggctagcacaaaacaaccctcctcaaatgctatgggaaagaacagaagaggattctaaaagcattaaaagtgatgttccagtgtacttgaaaaggttgaaaggaaataaacatgatgatggtacgcaaagtgattcagagaacgctggggctcacaggcgctgtagcaaacgtgcaactcttgaggaacacttaagacgccaccattcagaacacaaaaagctacagaaggtccaggctactgaaaagcatcaagaccaagctgttactagctctgcgcatcacagaggggggcatggtgttccacatgggaaattgttaaaacagaaatcagaggagccatcggtgtcaatacccttcctacaaactgcattattaagaagttcagggagtcttgggcacagaccaagccaggagatggataaaatgttaaaaaatcaagcaacttctgctacttctgaaaaggataatgatgatgaccaaagtgacaagggtacttataccattgagttagagaatcccaacagtgaggaagtggaagcaagaaaaatgattgacaaggtgacagcctcttctttttataagctcctttatcagacgtaacctcctcaaaagcaaagactgtcatacagattttgtaatcccctgcagtggctagccaagtagcctgtggagagtgtttggagtagatgacaatcaggattataataggcctgttatcaacgaaaaacataaagatctaataaaagattgggctctcagttctgctgcagcagtaatggaagaaagaaaaccactgactacatctggatttcaccactcagaggaaggcacatcttcatctggaagcaaacgttgggtttcacagtgggctagtttggctgccaatcatacaaggcatgatcaagaagaaaggataatggaattttctgcacctcttcctttagagaatgagacagagatcagtgagtctggcatgacagtgagaagtactggctctgcaacttccttggctagccagggagagagaaggagacgaactcttccccagcttccaaatgaagaaaagtctcttgagagccacagagcaaaggttgtaacacagaggtcagagataggagaaaaacaagacacagaacttcaggagaaagaaacacctacacaggtataccagaaagataaacaagatgctgacagacccttgagtaaaatgaacagggcagtaaatggagagactctcaaaactggtggagataataaaaccctacttcacttaggcagctctgctcctggaaaagagaaaagtgaaactgataaggaaacttctttggtaaagcaaacattagcaaaacttcaacaacaagaacaaagggaggaggctcagtggacacctactaaattgtcttccaaaaatgtttcaggtcagacagataaatgtagggaggaaacttttaaacaagaatcacaacctccagaaaaaaattcaggacattctacaagcaaaggagacagagtggcacaaagtgagagcaagagaagaaaagctgaggaaattctgaaaagtcagactccaaagggaggagacaagaaggaatcctccaagtcattagtgcgacaagggagcttcactatagaaaaacccagcccaaacatacccatagaacttattccccatataaataaacagacttcctctactccttcttctttagcattaacatctgcaagtagaatacgagaaagaagtgagtctttggatcctgattctagtatggacacaacccttattctaaaagacacagaagcagtaatggcttttctagaagctaaactacgtgaagataataaaactgatgaaggaccagatactcccagttataatagagacaattctatttcaccagaatctgatgtagatacagctagtacaatcagtctggttactggagaaactgaaagaaagtcaacccaaaagcgaaagagtttcactagcctctataaagataggtgttccacaggttctccttccaaagatgttacaaaatcatcatcttcaggtgctagggaaaaaatggaaaagaaaacaaaaagtcgttccacagatgtgggttcaagagcagatggtcgtaaatttgttcagtccagtgggagaataagacagccctcagtagacttaacagatgatgaccaaacctctagtgtacctcattctgccatctctgatattatgtcatctgatcaagaaacttactcttgtaaacctcatggacggactccacttacctcagctgatgagcatgtacattccaaactggaaggaagtaaagtaacgaaatctaagacttctccggtggtatctggttcatctagtaaatcaaccacccttccaaggccacgacctaccaggacttccctcttgcgcagagcacgacttggtgaagcttcagacagtgaacttgctgatgctgacaaagcatctgttgcttctgaagtatccacaacaagttctacatcaaaacctcccacaggaaggcgtaacatctctcggattgatttattggctcagcctcgtagaacacgacttggctcactgtcagctcgtagtgactctgaagcaacaatttctagaagtagtgcctcttcgaggaccgcagaagccatcattagaagtggagccagactagtaccatcagataaattttctcctagaattagagctaacagtatctctcgactctcagactccaaggtcaaaagtatgacctcagctcatggctctgcttcagtaaattcaagatggaggcgctttcctactgattatgcttccacctcagaagatgaatttggatcaaaccgtaattcccctaaacatacccgtctacgtacttctccagccctgaaaaccactcgcttgcagagcgctggatcagcaatgcctactagttcttcattcaaacaccggattaaagagcaggaagactacatccgagattggactgctcatcgagaagagatagccaggatcagccaagatcttgctctcattgctcgggagatcaacgatgtagcaggagagatagattcagtgacttcatcaggcactgcccctagtaccacagtaagcactgctgccaccacccctggctctgccatagacactagagaagaggtaggagatcttcatggagaaatgcataagttggttgatcgtgtttttgatgaaagcctcaacttccgaaagattcctccattagttcattccaaaacaccagaaggaaacaacggtcgatctggtgatccaagacctcaagcagcagagcctcccgatcacttaacaattacaaggcggagaacctggagcagggatgaagtcatgggagataatctgctgctgtcatccgtctttcagttctctaagaagataagacaatctatagataagacagctggaaagatcagaatattatttaaagacaaagatcggaattgggatgacatagaaagcaaattaagagccgaaagtgaagtccctattgtgaaaacctcaagcatggagatttcttctatcttacaggaactgaaaagagtagaaaagcagctgcaagcaatcaatgctatgattgatcctgatggaactttggaggctctgaacaacatgggatttcccagtgctatgttgccatctccaccgaaacagaagtccagccctgtgaataaccaccacagcccggattcaaccccgatggggaagaggaagatgttacagtacaagaatgactttctcttgattgttgaaaaatcattacctgtggaatggctaggaatattggaagcagcatagtgttgatccatgctgtgacctacaagcaaactaaatagccaacatttctgaacccctaagtctcctgtgccaagctgctccctgaaatggacttcttcatctgtacagatttgttaaaccattctatttgcttcttaataataggatttatattagtactcattaccattggacacaatgacataagtactctccacagtaaagcagacctttcacaacagtcactctgtgtcctaaaattttccaacatagatgtgatttatataactttgttgatacgtaaattgtcttggggtttacggaaattaactattatgtttgcactaagatttgctgggagtggtaggtggacatatctatatatcaataaggactaaccgtcttttttgtacataggagattgataatactgtatttgttttaagcccacagtgttttactccactttcaaaaagatcaatttggcactttttttcattttttttaatggaaataagatttggtctctcattttaggttaaatgataactagaaagattaaactagacagatagtttaggtggagtatatttttaaaactcagaacatgtatattggtcctgtgttaccaagtttatatgtgacagttgaaaaagaaattcccttgaaatgatcatgaggttaaaattttcttcattaggggacttggagaaccagtagtcgtaagattagttgatagtttcactcccaagcaatgaattgcttctgtgtgtttccctgtaggactcaatagtaaatgctgtctgtcttacacatttataaggaccctgcaagacgacgacaaaggcctttggcctgtgctactaaacaagaagcctatgaaaaatttcttctttaaacttgttttttctctttccagtaagttcacatttggataattttaaaaagaaaagtaattacctttgtgtttccagaacactataattggggtgtatcttaattcagttaaatattattagtagacctggattttcccccttgaccccatcagtctataaaggttaaactgcaacttttatgaaatggtctttaatatttccacaataatcctgtgctatatttgttttaagaaacaaagtaactctatacacttcaagactttacaggattttttaaatcctgtattgttggatcaattaataaagatgcaaaaaaactttatagagatgtaaaaacaaaactataatggatctcctatttttctttaaatacaaaaaaaaaaaggtaaatgaactattctccttgtaaagctaaattccccattctgtctaataaaggaagactgaaaaaaggttttaaagaacataaatggaaagatacaaatgctttgaaggaataaacgaaatgttaaaacagggtcaatccatttgaagaaaaagttggacaaaataatcagcattgctccctcttttatttaatatttgggtactgattatatccacatggaagtagaaggtaaggagtttaggaaaatactagaatctactctgcttacattcttgtttaagtgtttacacagtttggttcaattataaacatttggccttttactatgttatttttattttgtatgaatacattatcctccttatttatttttgttacatttattacttatgttattttgttatgcatttacaactccatttttaaataaagtgtttctggaacttt

SEQ ID NO: 306818 - DNA, 3167 bp, Homo sapiens
agtgtgggaggccagctgttacaacggacatgaagatgtgtgattattttcagtaggcagacatctaataaattcaagatggaggcgctttcctactgattatgcttccacctcagaagatgaatttggatcaaaccgtaattcccctaaacatacccgtctacgtacttctccagccctgaaaaccactcgcttgcagagcgctggatcagcaatgcctactagttcttcattcaaacaccggattaaagagcaggaagactacatccgagattggactgctcatcgagaagagatagccaggatcagccaagatcttgctctcattgctcgggagatcaacgatgtagcaggagagatagattcagtgacttcatcaggcactgcccctagtaccacagtaagcactgctgccaccacccctggctctgccatagacactagagaagagttggttgatcgtgtttttgatgaaagcctcaacttccgaaagattcctccattagttcattccaaaacaccagaaggaaacaacggtcgatctggtgatccaagacctcaagcagcagagcctcccgatcacttaacaattacaaggcggagaacctggagcagggatgaagtcatgggagataatctgctgctgtcatccgtctttcagttctctaagaagataagacaatctatagataagacagctggaaagatcagaatattatttaaagacaaagatcggaattgggatgacatagaaagcaaattaagagccgaaagtgaagtccctattgtgaaaacctcaagcatggagatttcttctatcttacaggaactgaaaagagtagaaaagcagctgcaagcaatcaatgctatgattgatcctgatggaactttggaggctctgaacaacatgggatttcccagtgctatgttgccatctccaccgaaacagaagtccagccctgtgaataaccaccacagcccgggtcagacaccaacacttggccaaccagaagctagggctcttcatcctgctgctgtttcagccgcagctgaatttgagaatgctgaatctgaggctgatttcagtatacatttcaatagattcaaccccgatggggaagaggaagatgttacagtacaagaatgactttctcttgattgttgaaaaatcattacctgtggaatggctaggaatattggaagcagcatagtgttgatgtacgcaaaacaagacagcttggtcagctacaatcttggaatccctgtcttcttaattttatttatttatttttgacgtataatgtagtatatcaatcctttcaaactatttagataaccacttgatgcacaaataggaaaaagcagattgtggcagtgtcgccttttgtggttttatgattttcaaattgaatttaatgattacaccctttcccttcatagatcttttttcttttttttaagccatgctgtgacctacaagcaaactaaatagccaacatttctgaacccctaagtctcctgtgccaagctgctccctgaaatggacttcttcatctgtacagatttgttaaaccattctatttgcttcttaataataggatttatattagtactcattaccattggacacaatgacataagtactctccacagtaaagcagacctttcacaacagtcactctgtgtcctaaaattttccaacatagatgtgatttatataactttgttgatacgtaaattgtcttggggtttacggaaattaactattatgtttgcactaagatttgctgggagtggtaggtggacatatctatatatcaataaggactaaccgtcttttttgtacataggagattgataatactgtatttgttttaagcccacagtgttttactccactttcaaaaagatcaatttggcactttttttcattttttttaatggaaataagatttggtctctcattttaggttaaatgataactagaaagattaaactagacagatagtttaggtggagtatatttttaaaactcagaacatgtatattggtcctgtgttaccaagtttatatgtgacagttgaaaaagaaattcccttgaaatgatcatgaggttaaaattttcttcattaggggacttggagaaccagtagtcgtaagattagttgatagtttcactcccaagcaatgaattgcttctgtgtgtttccctgtaggactcaatagtaaatgctgtctgtcttacacatttataaggaccctgcaagacgacgacaaaggcctttggcctgtgctactaaacaagaagcctatgaaaaatttcttctttaaacttgttttttctctttccagtaagttcacatttggataattttaaaaagaaaagtaattacctttgtgtttccagaacactataattggggtgtatcttaattcagttaaatattattagtagacctggattttcccccttgaccccatcagtctataaaggttaaactgcaacttttatgaaatggtctttaatatttccacaataatcctgtgctatatttgttttaagaaacaaagtaactctatacacttcaagactttacaggattttttaaatcctgtattgttggatcaattaataaagatgcaaaaaaactttatagagatgtaaaaacaaaactataatggatctcctatttttctttaaatacaaaaaaaaaaaggtaaatgaactattctccttgtaaagctaaattccccattctgtctaataaaggaagactgaaaaaaggttttaaagaacataaatggaaagatacaaatgctttgaaggaataaacgaaatgttaaaacagggtcaatccatttgaagaaaaagttggacaaaataatcagcattgctccctcttttatttaatatttgggtactgattatatccacatggaagtagaaggtaaggagtttaggaaaatactagaatctactctgcttacattcttgtttaagtgtttacacagtttggttcaattataaacatttggccttttactatgttatttttattttgtatgaatacattatcctccttatttatttttgttacatttattacttatgttattttgttatgcatttacaactccatttttaaataaagtgtttctggaacttt

SEQ ID NO: 306819 - DNA, 5692 bp, Homo sapiens
aactgggcaggaggggatagggtccggcgcctcgccctttcccgaggcgcctgcgcactaggcagtcggtctttgccgttaccgctatgtgtggggcgtgtgtggaataacgttattgcccagcggagctgagggccccggagctcgaccgcagcggcagcgacgacaacagcggcgacgacgacgacgacgaggtggggggaggacggcgtgcgagagactcacgggacgcgacgcgccccgcctcccccgtccggtccctctctccacggtaaggggatgacgtagctttgccaaagacttagaagctaagcagaaaatgagcttaacatcctggtttttggtgagcagtggaggcactcgccacaggctgccacgagaaatgatttttgttggaagagatgactgtgagctcatgttgcagtctcgtagtgtggataagcaacacgctgtcatcaactatgatgcgtctacggatgagcatttagtgaaggatttgggcagcctcaatgggacttttgtgaatgatgtaaggattccggaacagacttatatcaccttgaaacttgaagataagctgagatttggatatgatacaaatcttttcactgtagtacaaggagaaatgagggtccctgaagaagctcttaagcatgagaagtttaccattcagcttcagttgtcccaaaaatcttcagaatcagaattatccaaatctgcaagtgccaaaagcatagattcaaaggtagcagacgctgctactgaagtgcagcacaaaactactgaagcactgaaatccgaggaaaaagccatggatatttctgctatgccccgtggtactccattatatgggcagccgtcatggtggggggatgatgaggtggatgaaaaaagagctttcaagacaaatggcaaacctgaagaaaaaaaccatgaagctggaacatcagggtgcagcatagatgccaagcaagttgaggaacaatctgcagctgcaaatgaagaagtactttttcctttctgtagggaaccaagttattttgaaatccctacaaaagaattccagcaaccatcacaaataacagaaagcactattcatgaaatcccaacaaaagacacgccaagttcccatataacaggtgcagggcatgcttcatttaccattgaatttgatgacagtaccccagggaaggtaactattagagaccatgtgacaaagtttacttctgatcagcgccacaagtccaagaagtcttctcctggaactcaagacttgctggggattcaaacaggaatgatggcacccgaaaacaaagttgctgactggctagcacaaaacaaccctcctcaaatgctatgggaaagaacagaagaggattctaaaagcattaaaagtgatgttccagtgtacttgaaaaggttgaaaggaaataaacatgatgatggtacgcaaagtgattcagagaacgctggggctcacaggcgctgtagcaaacgtgcaactcttgaggaacacttaagacgccaccattcagaacacaaaaagctacagaaggtccaggctactgaaaagcatcaagaccaagctgttactagctctgcgcatcacagaggggggcatggtgttccacatgggaaattgttaaaacagaaatcagaggagccatcggtgtcaatacccttcctacaaactgcattattaagaagttcagggagtcttgggcacagaccaagccaggagatggataaaatgttaaaaaatcaagcaacttctgctacttctgaaaaggataatgatgatgaccaaagtgacaagggtacttataccattgagttagagaatcccaacagtgaggaagtggaagcaagaaaaatgattgacaaggtgacagcctcttctttttataagctcctttatcagacgtaacctcctcaaaagcaaagactgtcatacagattttgtaatcccctgcagtggctagccaagtagcctgtggagagtgtttggagtagatgacaatcaggattataataggcctgttatcaacgaaaaacataaagatctaataaaagattgggctctcagttctgctgcagcagtaatggaagaaagaaaaccactgactacatctggatttcaccactcagaggaaggcacatcttcatctggaagcaaacgttgggtttcacagtgggctagtttggctgccaatcatacaaggcatgatcaagaagaaaggataatggaattttctgcacctcttcctttagagaatgagacagagatcagtgagtctggcatgacagtgagaagtactggctctgcaacttccttggctagccagggagagagaaggagacgaactcttccccagcttccaaatgaagaaaagtctcttgagagccacagagcaaaggttgtaacacagaggtcagagataggagaaaaacaagacacagaacttcaggagaaagaaacacctacacaggtataccagaaagataaacaagatgctgacagacccttgagtaaaatgaacagggcagtaaatggagagactctcaaaactggtggagataataaaaccctacttcacttaggcagctctgctcctggaaaagagaaaagtgaaactgataaggaaacttctttggtaaagcaaacattagcaaaacttcaacaacaagaacaaagggaggaggctcagtggacacctactaaattgtcttccaaaaatgtttcaggtcagacagataaatgtagggaggaaacttttaaacaagaatcacaacctccagaaaaaaattcaggacattctacaagcaaaggagacagagtggcacaaagtgagagcaagagaagaaaagctgaggaaattctgaaaagtcagactccaaagggaggagacaagaaggaatcctccaagtcattagtgcgacaagggagcttcactatagaaaaacccagcccaaacatacccatagaacttattccccatataaataaacagacttcctctactccttcttctttagcattaacatctgcaagtagaatacgagaaagaagtgagtctttggatcctgattctagtatggacacaacccttattctaaaagacacagaagcagtaatggcttttctagaagctaaactacgtgaagataataaaactgatgaaggaccagatactcccagttataatagagacaattctatttcaccagaatctgatgtagatacagctagtacaatcagtctggttactggagaaactgaaagaaagtcaacccaaaagcgaaagagtttcactagcctctataaagataggtgttccacaggttctccttccaaagatgttacaaaatcatcatcttcaggtgctagggaaaaaatggaaaagaaaacaaaaagtcgttccacagatgtgggttcaagagcagatggtcgtaaatttgttcagtccagtgggagaataagacagccctcagtagacttaacagatgatgaccaaacctctagtgtacctcattctgccatctctgatattatgtcatctgatcaagaaacttactcttgtaaacctcatggacggactccacttacctcagctgatgagcatgtacattccaaactggaaggaagtaaagtaacgaaatctaagacttctccggtggtatctggttcatctagtaaatcaaccacccttccaaggccacgacctaccaggacttccctcttgcgcagagcacgacttggtgaagcttcagacagtgaacttgctgatgctgacaaagcatctgttgcttctgaagtatccacaacaagttctacatcaaaacctcccacaggaaggcgtaacatctctcggattgatttattggctcagcctcgtagaacacgacttggctcactgtcagctcgtagtgactctgaagcaacaatttctagaagtagtgcctcttcgaggaccgcagaagccatcattagaagtggagccagactagtaccatcagataaattttctcctagaattagagctaacagtatctctcgactctcagactccaaggtcaaaagtatgacctcagctcatggctctgcttcagtaaattcaagatggaggcgctttcctactgattatgcttccacctcagaagatgaatttggatcaaaccgtaattcccctaaacatacccgtctacgtacttctccagccctgaaaaccactcgcttgcagagcgctggatcagcaatgcctactagttcttcattcaaacaccggattaaagagcaggaagactacatccgagattggactgctcatcgagaagagatagccaggatcagccaagatcttgctctcattgctcgggagatcaacgatgtagcaggagagatagattcagtgacttcatcaggcactgcccctagtaccacagtaagcactgctgccaccacccctggctctgccatagacactagagaagaggtaggagatcttcatggagaaatgcataagttggttgatcgtgtttttgatgaaagcctcaacttccgaaagattcctccattagttcattccaaaacaccagaaggaaacaacggtcgatctggtgatccaagacctcaagcagcagagcctcccgatcacttaacaattacaaggcggagaacctggagcagggatgaagtcatgggagataatctgctgctgtcatccgtctttcagttctctaagaagataagacaatctatagataagacagctggaaagatcagaatattatttaaagacaaagatcggaattgggatgacatagaaagcaaattaagagccgaaagtgaagtccctattgtgaaaacctcaagcatggagatttcttctatcttacaggaactgaaaagagtagaaaagcagctgcaagcaatcaatgctatgattgatcctgatggaactttggaggctctgaacaacatgggatttcccagtgctatgttgccatctccaccgaaacagaagtccagccctgtgaataaccaccacagcccgggtcagacaccaacacttggccaaccagaagctagggctcttcatcctgctgctgtttcagccgcagctgaatttgagaatgctgaatctgaggctgatttcagtatacatttcaatagattcaaccccgatggggaagaggaagaaaaaaaaaaaaaaaaaaaaaacaaaaagaaaaaaaaacaaaaaaaaaaaaaaaaaaacacagaaagaaagaaaaacagaacgaagaccacaacaacaagaacaaatgacagaaaataataagtagacatgacacaacaacaaggcgggggggcggggcacacataacatcccccgaccacgggaggaggccagacaaacgcaccaccccacttttagacacgcacagggcaggccgaaccaggtaggaggaggcctcacttaatcaatacggagagcagcggagggcgggtagctaaagagagagccttaggttgtcgggaagcaaaaaaggagggggagaatctatttcgagaagagacacaagaccacccagccggatcacgcccaacgaccacaacgcacaacgcccaaccaccaccaaccagacacacacgacaccccaaggccaacaaccccatacatcagacgcacagcagcaaacaaccaccaca

SEQ ID NO: 306820 - DNA, 5174 bp, Homo sapiens
aactgggcaggaggggatagggtccggcgcctcgccctttcccgaggcgcctgcgcactaggcagtcggtctttgccgttaccgctatgtgtggggcgtgtgtggaataacgttattgcccagcggagctgagggccccggagctcgaccgcagcggcagcgacgacaacagcggcgacgacgacgacgacgaggtggggggaggacggcgtgcgagagactcacgggacgcgacgcgccccgcctcccccgtccggtccctctctccacggtaaggggatgacgtagctttgccaaagacttagaagctaagcagaaaatgagcttaacatcctggtttttggtgagcagtggaggcactcgccacaggctgccacgagaaatgatttttgttggaagagatgactgtgagctcatgttgcagtctcgtagtgtggataagcaacacgctgtcatcaactatgatgcgtctacggatgagcatttagtgaaggatttgggcagcctcaatgggacttttgtgaatgatgtaaggattccggaacagacttatatcaccttgaaacttgaagataagctgagatttggatatgatacaaatcttttcactgtagtacaaggagaaatgagggtccctgaagaagctcttaagcatgagaagtttaccattcagcttcagttgtcccaaaaatcttcagaatcagaattatccaaatctgcaagtgccaaaagcatagattcaaaggtagcagacgctgctactgaagtgcagcacaaaactactgaagcactgaaatccgaggaaaaagccatggatatttctgctatgccccgtggtactccattatatgggcagccgtcatggtggggggatgatgaggtggatgaaaaaagagctttcaagacaaatggcaaacctgaagaaaaaaaccatgaagctggaacatcagggtgcagcatagatgccaagcaagttgaggaacaatctgcagctgcaaatgaagaagtactttttcctttctgtagggaaccaagttattttgaaatccctacaaaagaattccagcaaccatcacaaataacagaaagcactattcatgaaatcccaacaaaagacacgccaagttcccatataacaggtgcagggcatgcttcatttaccattgaatttgatgacagtaccccagggaaggtaactattagagaccatgtgacaaagtttacttctgatcagcgccacaagtccaagaagtcttctcctggaactcaagacttgctggggattcaaacaggaatgatggcacccgaaaacaaagttgctgactggctagcacaaaacaaccctcctcaaatgctatgggaaagaacagaagaggattctaaaagcattaaaagtgatgttccagtgtacttgaaaaggttgaaaggaaataaacatgatgatggtacgcaaagtgattcagagaacgctggggctcacaggcgctgtagcaaacgtgcaactcttgaggaacacttaagacgccaccattcagaacacaaaaagctacagaaggtccaggctactgaaaagcatcaagaccaagctgttactagctctgcgcatcacagaggggggcatggtgttccacatgggaaattgttaaaacagaaatcagaggagccatcggtgtcaatacccttcctacaaactgcattattaagaagttcagggagtcttgggcacagaccaagccaggagatggataaaatgttaaaaaatcaagcaacttctgctacttctgaaaaggataatgatgatgaccaaagtgacaagggtacttataccattgagttagagaatcccaacagtgaggaagtggaagcaagaaaaatgattgacaaggtgacagcctcttctttttataagctcctttatcagacgtaacctcctcaaaagcaaagactgtcatacagattttgtaatcccctgcagtggctagccaagtagcctgtggagagtgtttggagtagatgacaatcaggattataataggcctgttatcaacgaaaaacataaagatctaataaaagattgggctctcagttctgctgcagcagtaatggaagaaagaaaaccactgactacatctggatttcaccactcagaggaaggcacatcttcatctggaagcaaacgttgggtttcacagtgggctagtttggctgccaatcatacaaggcatgatcaagaagaaaggataatggaattttctgcacctcttcctttagagaatgagacagagatcagtgagtctggcatgacagtgagaagtactggctctgcaacttccttggctagccagggagagagaaggagacgaactcttccccagcttccaaatgaagaaaagtctcttgagagccacagagcaaaggttgtaacacagaggtcagagataggagaaaaacaagacacagaacttcaggagaaagaaacacctacacaggtataccagaaagataaacaagatgctgacagacccttgagtaaaatgaacagggcagtaaatggagagactctcaaaactggtggagataataaaaccctacttcacttaggcagctctgctcctggaaaagagaaaagtgaaactgataaggaaacttctttggtaaagcaaacattagcaaaacttcaacaacaagaacaaagggaggaggctcagtggacacctactaaattgtcttccaaaaatgtttcaggtcagacagataaatgtagggaggaaacttttaaacaagaatcacaacctccagaaaaaaattcaggacattctacaagcaaaggagacagagtggcacaaagtgagagcaagagaagaaaagctgaggaaattctgaaaagtcagactccaaagggaggagacaagaaggaatcctccaagtcattagtgcgacaagggagcttcactatagaaaaacccagcccaaacatacccatagaacttattccccatataaataaacagacttcctctactccttcttctttagcattaacatctgcaagtagaatacgagaaagaagtgagtctttggatcctgattctagtatggacacaacccttattctaaaagacacagaagcagtaatggcttttctagaagctaaactacgtgaagataataaaactgatgaaggaccagatactcccagttataatagagacaattctatttcaccagaatctgatgtagatacagctagtacaatcagtctggttactggagaaactgaaagaaagtcaacccaaaagcgaaagagtttcactagcctctataaagataggtgttccacaggttctccttccaaagatgttacaaaatcatcatcttcaggtgctagggaaaaaatggaaaagaaaacaaaaagtcgttccacagatgtgggttcaagagcagatggtcgtaaatttgttcagtccagtgggagaataagacagccctcagtagacttaacagatgatgaccaaacctctagtgtacctcattctgccatctctgatattatgtcatctgatcaagaaacttactcttgtaaacctcatggacggactccacttacctcagctgatgagcatgtacattccaaactggaaggaagtaaagtaacgaaatctaagacttctccggtggtatctggttcatctagtaaatcaaccacccttccaaggccacgacctaccaggacttccctcttgcgcagagcacgacttggtgaagcttcagacagtgaacttgctgatgctgacaaagcatctgttgcttctgaagtatccacaacaagttctacatcaaaacctcccacaggaaggcgtaacatctctcggattgatttattggctcagcctcgtagaacacgacttggctcactgtcagctcgtagtgactctgaagcaacaatttctagaagtagtgcctcttcgaggaccgcagaagccatcattagaagtggagccagactagtaccatcagataaattttctcctagaattagagctaacagtatctctcgactctcagactccaaggtcaaaagtatgacctcagctcatggctctgcttcagtaaattcaagatggaggcgctttcctactgattatgcttccacctcagaagatgaatttggatcaaaccgtaattcccctaaacatacccgtctacgtacttctccagccctgaaaaccactcgcttgcagagcgctggatcagcaatgcctactagttcttcattcaaacaccggattaaagagcaggaagactacatccgagattggactgctcatcgagaagagatagccaggatcagccaagatcttgctctcattgctcgggagatcaacgatgtagcaggagagatagattcagtgacttcatcaggcactgcccctagtaccacagtaagcactgctgccaccacccctggctctgccatagacactagagaagaggtaggagatcttcatggagaaatgcataagttggttgatcgtgtttttgatgaaagcctcaacttccgaaagattcctccattagttcattccaaaacaccagaaggaaacaacggtcgatctggtgatccaagacctcaagcagcagagcctcccgatcacttaacaattacaaggcggagaacctggagcagggatgaagtcatgggagataatctgctgctgtcatccgtctttcagttctctaagaagataagacaatctatagataagacagctggaaagatcaggtacatgtacatatagctttaactttaatatcacctcactttgctttttgctttttctcaaggttaaaaatgtatcatcagaatgaatatgtttacctttggaaaaatttgtcccaaagtaaatatctatccagtactactttataactttaaatttattactaattcaaaacataaatagacttacagattttattcaacagtacttcagaaatccatgctgctattgcttatttctgattcctgtaattaaaatttaaaatgtaatgaaacagtatttgaacatggtttgtgaattgtaatattccacacaaatataattctatattgcttatatattgaaataatatattttatcagcatttgatgagtaccaagaagccattaaatt

SEQ ID NO: 306821 - DNA, 3951 bp, Homo sapiens
aactgggcaggaggggatagggtccggcgcctcgccctttcccgaggcgcctgcgcactaggcagtcggtctttgccgttaccgctatgtgtggggcgtgtgtggaataacgttattgcccagcggagctgagggccccggagctcgaccgcagcggcagcgacgacaacagcggcgacgacgacgacgacgaggtggggggaggacggcgtgcgagagactcacgggacgcgacgcgccccgcctcccccgtccggtccctctctccacggtaaggggatgacgtagctttgccaaagacttagaagctaagcagaaaatgagcttaacatcctggtttttggtgagcagtggaggcactcgccacaggctgccacgagaaatgatttttgttggaagagatgactgtgagctcatgttgcagtctcgtagtgtggataagcaacacgctgtcatcaactatgatgcgtctacggatgagcatttagtgaaggatttgggcagcctcaatgggacttttgtgaatgatgtaaggattccggaacagacttatatcaccttgaaacttgaagataagctgagatttggatatgatacaaatcttttcactgtagtacaaggagaaatgagggtccctgaagaagctcttaagcatgagaagtttaccattcagcttcagttgtcccaaaaatcttcagaatcagaattatccaaatctgcaagtgccaaaagcatagattcaaaggtagcagacgctgctactgaagtgcagcacaaaactactgaagcactgaaatccgaggaaaaagccatggatatttctgctatgccccgtggtactccattatatgggcagccgtcatggtggggggatgatgaggtggatgaaaaaagagctttcaagacaaatggcaaacctgaagaaaaaaaccatgaagctggaacatcagggtgcagcatagatgccaagcaagttgaggaacaatctgcagctgcaaatgaagaagtactttttcctttctgtagggaaccaagttattttgaaatccctacaaaagaattccagcaaccatcacaaataacagaaagcactattcatgaaatcccaacaaaagacacgccaagttcccatataacaggtgcagggcatgcttcatttaccattgaatttgatgacagtaccccagggaaggtaactattagagaccatgtgacaaagtttacttctgatcagcgccacaagtccaagaagtcttctcctggaactcaagacttgctggggattcaaacaggaatgatggcacccgaaaacaaagttgctgactggctagcacaaaacaaccctcctcaaatgctatgggaaagaacagaagaggattctaaaagcattaaaagtgatgttccagtgtacttgaaaaggttgaaaggaaataaacatgatgatggtacgcaaagtgattcagagaacgctggggctcacaggcgctgtagcaaacgtgcaactcttgaggaacacttaagacgccaccattcagaacacaaaaagctacagaaggtccaggctactgaaaagcatcaagaccaagctgttactagctctgcgcatcacagaggggggcatggtgttccacatgggaaattgttaaaacagaaatcagaggagccatcggtgtcaatacccttcctacaaactgcattattaagaagttcagggagtcttgggcacagaccaagccaggagatggataaaatgttaaaaaatcaagcaacttctgctacttctgaaaaggataatgatgatgaccaaagtgacaagggtacttataccattgagttagagaatcccaacagtgaggaagtggaagcaagaaaaatgattgacaaggtgacagcctcttctttttataagctcctttatcagacgtaacctcctcaaaagcaaagactgtcatacagattttgtaatcccctgcagtggctagccaagtagcctgtggagagtgtttggagtagatgacaatcaggattataataggcctgttatcaacgaaaaacataaagatctaataaaagattgggctctcagttctgctgcagcagtaatggaagaaagaaaaccactgactacatctggatttcaccactcagaggaaggcacatcttcatctggaagcaaacgttgggtttcacagtgggctagtttggctgccaatcatacaaggcatgatcaagaagaaaggataatggaattttctgcacctcttcctttagagaatgagacagagatcagtgagtctggcatgacagtgagaagtactggctctgcaacttccttggctagccagggagagagaaggagacgaactcttccccagcttccaaatgaagaaaagtctcttgagagccacagagcaaaggttgtaacacagaggtcagagataggagaaaaacaagacacagaacttcaggagaaagaaacacctacacaggtataccagaaagataaacaagatgctgacagacccttgagtaaaatgaacagggcagtaaatggagagactctcaaaactggtggagataataaaaccctacttcacttaggcagctctgctcctggaaaagagaaaagtgaaactgataaggaaacttctttggtaaagcaaacattagcaaaacttcaacaacaagaacaaagggaggaggctcagtggacacctactaaattgtcttccaaaaatgtttcaggtcagacagataaatgtagggaggaaacttttaaacaagaatcacaacctccagaaaaaaattcaggacattctacaagcaaaggagacagagtggcacaaagtgagagcaagagaagaaaagctgaggaaattctgaaaagtcagactccaaagggaggagacaagaaggaatcctccaagtcattagtgcgacaagggagcttcactatagaaaaacccagcccaaacatacccatagaacttattccccatataaataaacagacttcctctactccttcttctttagcattaacatctgcaagtagaatacgagaaagaagtgagtctttggatcctgattctagtatggacacaacccttattctaaaagacacagaagcagtaatggcttttctagaagctaaactacgtgaagataataaaactgatgaaggaccagatactcccagttataatagagacaattctatttcaccagaatctgatgtagatacagctagtacaatcagtctggttactggagaaactgaaagaaagtcaacccaaaagcgaaagagtttcactagcctctataaagataggtgttccacaggttctccttccaaagatgttacaaaatcatcatcttcaggtgctagggaaaaaatggaaaagaaaacaaaaagtcgttccacagatgtgggttcaagagcagatggtcgtaaatttgttcagtccagtgggagaataagacagccctcagtagacttaacagatgatgaccaaacctctagtgtacctcattctgccatctctgatattatgtcatctgatcaagaaacttactcttgtaaacctcatggacggactccacttacctcagctgatgagcatgtacattccaaactggaaggaagtaaagtaacgaaatctaagacttctccggtggtatctggttcatctagtaaatcaaccacccttccaaggccacgacctaccaggacttccctcttgcgcagagcacgacttggtgaagcttcagacagtgaacttgctgatgctgacaaagcatctgttgcttctgaagtatccacaacaagttctacatcgggaggaaaaaaccatgaagctggacatcagggtgcagcatagatgccagcaagttggggacaatctgcagctgcaattgaggagtcttttccttcttgagggccagtattta

SEQ ID NO: 306822 - DNA, 2460 bp, Homo sapiens
aactgggcaggaggggatagggtccggcgcctcgccctttcccgaggcgcctgcgcactaggcagtcggtctttgccgttaccgctatgtgtggggcgtgtgtggaataacgttattgcccagcggagctgagggccccggagctcgaccgcagcggcagcgacgacaacagcggcgacgacgacgacgacgaggtggggggaggacggcgtgcgagagactcacgggacgcgacgcgccccgcctcccccgtccggtccctctctccacggtaaggggatgacgtagctttgccaaagacttagaagctaagcagaaaatgagcttaacatcctggtttttggtgagcagtggaggcactcgccacaggctgccacgagaaatgatttttgttggaagagatgactgtgagctcatgttgcagtctcgtagtgtggataagcaacacgctgtcatcaactatgatgcgtctacggatgagcatttagtgaaggatttgggcagcctcaatgggacttttgtgaatgatgtaaggattccggaacagacttatatcaccttgaaacttgaagataagctgagatttggatatgatacaaatcttttcactgtagtacaaggagaaatgagggtccctgaagaagctcttaagcatgagaagtttaccattcagcttcagttgtcccaaaaatcttcagaatcagaattatccaaatctgcaagtgccaaaagcatagattcaaaggtagcagacgctgctactgaagtgcagcacaaaactactgaagcactgaaatccgaggaaaaagccatggatatttctgctatgccccgtggtactccattatatgggcagccgtcatggtggggggatgatgaggtggatgaaaaaagagctttcaagacaaatggcaaacctgaagaaaaaaaccatgaagctggaacatcagggtgcagcatagatgccaagcaagttgaggaacaatctgcagctgcaaatgaagaagtactttttcctttctgtagggaaccaagttattttgaaatccctacaaaagaattccagcaaccatcacaaataacagaaagcactattcatgaaatcccaacaaaagacacgccaagttcccatataacaggtgcagggcatgcttcatttaccattgaatttgatgacagtaccccagggaaggtaactattagagaccatgtgacaaagtttacttctgatcagcgccacaagtccaagaagtcttctcctggaactcaagacttgctggggattcaaacaggaatgatggcacccgaaaacaaagttgctgactggctagcacaaaacaaccctcctcaaatgctatgggaaagaacagaagaggattctaaaagcattaaaagtgatgttccagtgtacttgaaaaggttgaaaggaaataaacatgatgatggtacgcaaagtgattcagagaacgctggggctcacaggcgctgtagcaaacgtgcaactcttgaggaacacttaagacgccaccattcagaacacaaaaagctacagaaggtccaggctactgaaaagcatcaagaccaagctgttactagctctgcgcatcacagaggggggcatggtgttccacatgggaaattgttaaaacagaaatcagaggagccatcggtgtcaatacccttcctacaaactgcattattaagaagttcagggagtcttgggcacagaccaagccaggagatggataaaatgttaaaaaatcaagcaacttctgctacttctgaaaaggataatgatgatgaccaaagtgacaagggtacttataccattgagttagagaatcccaacagtgaggaagtggaagcaagaaaaatgattgacaaggtgacagcctcttctttttataagctcctttatcagacgtaacctcctcaaaagcaaagactgtcatacagattttgtaatcccctgcagtggctagccaagtagcctgtggagagtgtttggagtagatgacaatcaggattataataggcctgttatcaacgaaaaacataaagatctaataaaagattgggctctcagttctgctgcagcagtaatggaagaaagaaaaccactgactacatctggatttcaccactcagaggaaggcacatcttcatctggaagcaaacgttgggtttcacagtgggctagtttggctgccaatcatacaaggcatgatcaagaagaaaggataatggaattttctgcacctcttcctttagagaatggtattctctttctctctttcattctttatcccttttttcttctctttctccatttctctctctttctcttactcttctctgcttttttgtgaatcatatatcagttgttattataaaaaacaagccaaatctatatagtaagaagtaagttaaacctaaataaacatattcacatattctcat

SEQ ID NO: 306823 - DNA, 2345 bp, Homo sapiens
aactgggcaggaggggatagggtccggcgcctcgccctttcccgaggcgcctgcgcactaggcagtcggtctttgccgttaccgctatgtgtggggcgtgtgtggaataacgttattgcccagcggagctgagggccccggagctcgaccgcagcggcagcgacgacaacagcggcgacgacgacgacgacgaggtggggggaggacggcgtgcgagagactcacgggacgcgacgcgccccgcctcccccgtccggtccctctctccacggtaaggggatgacgtagctttgccaaagacttagaagctaagcagaaaatgagcttaacatcctggtttttggtgagcagtggaggcactcgccacaggctgccacgagaaatgatttttgttggaagagatgactgtgagctcatgttgcagtctcgtagtgtggataagcaacacgctgtcatcaactatgatgcgtctacggatgagcatttagtgaaggatttgggcagcctcaatgggacttttgtgaatgatgtaaggattccggaacagacttatatcaccttgaaacttgaagataagctgagatttggatatgatacaaatcttttcactgtagtacaaggagaaatgagggtccctgaagaagctcttaagcatgagaagtttaccattcagcttcagttgtcccaaaaatcttcagaatcagaattatccaaatctgcaagtgccaaaagcatagattcaaaggtagcagacgctgctactgaagtgcagcacaaaactactgaagcactgaaatccgaggaaaaagccatggatatttctgctatgccccgtggtactccattatatgggcagccgtcatggtggggggatgatgaggtggatgaaaaaagagctttcaagacaaatggcaaacctgaagaaaaaaaccatgaagctggaacatcagggtgcagcatagatgccaagcaagttgaggaacaatctgcagctgcaaatgaagaagtactttttcctttctgtagggaaccaagttattttgaaatccctacaaaagaattccagcaaccatcacaaataacagaaagcactattcatgaaatcccaacaaaagacacgccaagttcccatataacaggtgcagggcatgcttcatttaccattgaatttgatgacagtaccccagggaaggtaactattagagaccatgtgacaaagtttacttctgatcagcgccacaagtccaagaagtcttctcctggaactcaagacttgctggggattcaaacaggaatgatggcacccgaaaacaaagttgctgactggctagcacaaaacaaccctcctcaaatgctatgggaaagaacagaagaggattctaaaagcattaaaagtgatgttccagtgtacttgaaaaggttgaaaggaaataaacatgatgatggtacgcaaagtgattcagagaacgctggggctcacaggcgctgtagcaaacgtgcaactcttgaggaacacttaagacgccaccattcagaacacaaaaagctacagaaggtccaggctactgaaaagcatcaagaccaagctgttactagctctgcgcatcacagaggggggcatggtgttccacatgggaaattgttaaaacagaaatcagaggagccatcggtgtcaatacccttcctacaaactgcattattaagaagttcagggagtcttgggcacagaccaagccaggagatggataaaatgttaaaaaatcaagcaacttctgctacttctgaaaaggataatgatgatgaccaaagtgacaagggtacttataccattgagttagagaatcccaacagtgaggaagtggaagcaagaaaaatgattgacaaggtgtttggagtagatgacaatcaggattataataggcctgttatcaacgaaaaacataaagatctaataaaagattgggctctcagttctgctgcagcagtaatggaagaaagaaaaccactgactacatctggatttcaccactcagaggaaggcacatcttcatctggaagcaaacgttgggtttcacagtgggctagtttggctgccaatcatacaaggcatgatcaagaagaaaggataatggaattttctgcacctcttcctttagagaatggtattctctttctctctttcattctttatcccttttttcttctctttctccatttctctctctttctcttactcttctctgcttttttgtgaatcatatatcagttgttattataaaaaacaagccaaatctatatagtaagaagtaagttaaacctaaataaacatattcacatattctcat

SEQ ID NO: 306824 - DNA, 521 bp, Homo sapiens
gaagatggattcatggggaatcactcagcgtatattggccaaactgggctgtagaaatttaactggttatgagcattatctcacaaagtgctgttatatcatttaactctagtaattaggtgtaattgaatataataactacaaaaactacttactttccaccagaatttaactgatgctgttatatttgtttgcttatgtgctttgtattcagagctgaggccattgagatacatgtgtgaccaaagagtaatgaggtggatatttgtttgtgtcctatatgcatgttctcattacttcataatgagcctcatatgtggacgtggctgcaaaggccagtgtgggaggccagctgttacaacggacatgaagatgtgtgattattttcagtaggcagacatctaagtaagccctaagtcttgagttaagagtggaggggaagttgatatgaaatttcatctttttatttttgattggtttacatctaccacaccatctcctacaagaccctaaaggaacag

SEQ ID NO: 306825 - DNA, 439 bp, Homo sapiens
gtccctgaagaagctcttaaggtaacagtttttacttaacttcttttgcaaatctactcttcactatggttgattttacttcttgatgtttcacttccatttttaaatgttttatagcatgagaagtttaccattcagcttcagttgtcccaaaaatcttcagaatcagaattatccaaatctgcaagtgccaaaagcatagattcaaaggtagcagacgctgctactgaagtgcagcacaaaactactgaagcactgaaatccgaggaaaaagccatgggtaagctggcctctctcgaaagaccatctttatacttgatcttgaagacactgcatgctttgttctcagaaagttggctatgtccatataaaaataatttataatagtgataatttcagagtgtgttttaatgctaccagtgctttcattaggaaacat

SEQ ID NO: 306826 - DNA, 2905 bp, Homo sapiens
gcggcctcccgctccagcccggctcattccgcacattccggccagccccctccccacgaccccccttccccggccccccttgcggctccctcgggcccggcggagcggcccggccggagcgcccccgcgagctcggaccaggctcagccgcccagtgggctcaggcccagagcccagagcaaccagcacaatagcgtccaacagctggaacgccagcagcagccccggggaggcccgggaggatgggcccgagggcctggacaaggggctggacaacgatgcggagggcgtgtggagcccggacatcgagcagagcttccaggaggccctggccatctacccgccctgcggccggcggaagatcatcctgtcagacgagggcaagatgtacggccgaaatgagttgattgcacgctatattaaactgaggacggggaagactcggacgagaaaacaggtgtccagccacatacaggttctagctcggaagaaggtgcgggagtaccaggttggcatcaaggccatgaacctggaccaggtctccaaggacaaagcccttcagagcatggcgtccatgtcctctgcccagatcgtctctgccagtgtcctgcagaacaagttcagcccaccttcccctctgccccaggccgtcttctccacttcctcgcggttctggagcagcccccctctcctgggacagcagcctggaccctctcaggacatcaagccctttgcacagccagcctaccccatccagccgcccctgccgccgacgctcagcagttatgagcccctggccccgctcccctcagctgctgcctctgtgcctgtgtggcaggaccgtaccattgcctcctcccggctgcggctcctggagtattcagccttcatggaggtgcagcgagaccctgacacgtacagcaaacacctgtttgtgcacatcggccagacgaaccccgccttctcagacccacccctggaggcagtagatgtgcgccagatctatgacaaattccccgagaaaaagggaggattgaaggagctctatgagaaggggccccctaatgccttcttccttgtcaagttctgggccgacctcaacagcaccatccaggagggcccgggagccttctatggggtcagctctcagtacagctctgctgatagcatgaccatcagcgtctccaccaaggtgtgctcctttggcaaacaggtggtagagaaggtggagactgagtatgccaggctggagaacgggcgctttgtgtaccgtatccaccgctcgcccatgtgcgagtacatgatcaacttcatccacaagctgaagcacctgcccgagaagtacatgatgaacagcgtgctggagaacttcaccatcctgcaggtggtcacgagccgggactcccaggagaccctgcttgtcattgcttttgtcttcgaagtctccaccagtgagcacggggcccagcaccatgtctacaagctcgtcaaagactagggtgccctctgcgcctccttaaggatgcagggtgagcatctcctctccacacctgcctggcacccctgggggggtccaggattgaggattcatctacctgccaggcctcaggcccaggacccaggaggcctccccacctaccccagcacacacactccctgccactgttctgcgctttaattgtgggagaagagaggagaggagggctcagcggtggggcagcctgtccggggcgctgacccaccatcaccctgctctgcccagcctcgcgtgacctcagagaggtggggataggggacaccttcagcctccagcatgtgtggccactgtacccccacccacccttgggggagcatgatgggcaggtgagggcaggatggagaccaagggagtcagtgagcagaggccctgggagtgtccggttggggttggactgaggacagaggggcccacacttccttgcccctttgtgtcccaggcctggtgcccagactccttgcatggcttgtgtggtcctcagactccgcacagcgagcgtaggtctctgggtttcagatgaagtgcccaggctccaggaagttgagggacccacaggagaggtgggcagagctggagttctcatccagggctgcttgtccccagagcccaggtttatactacctccctggggcgggggctggccgcagggtaggggagaggctctgcagtgtggagtggagcctcatcgaggggcgctgggttaggggagcacctgtttcagactgggcatgaagaagggagcacagcagctactagaccccattagcacctcattagcccacaagccagccaggggccccaggaagatggggcaccccccagcaccctccagattgagagcaaggtagaggaaggagtcccagcctctgggcagaccagaggcccagagggagagagtagcagaaggcttttgatttttctcttgcctgaggcttgaatctgacaaacccttggtgggcactgctcccttaggttcttccccacctcaatctacctgcctagagtagcagctcccagacccagttctgggactgaaggttaacccttcacctgctgtcccttcttaacacccaggcccccagagccagctgggcctgtccagcagccacctgtgggtatttatgagtttcatatgaagtactgtgccccttcccttcctcatcccgaccctgcccgagcttcctgaaggtcctcactgtttgcatatcgctcaggccacctccaaaccccacctaggttttataatgtatattatatatttttttgtgtatttttaaaatccagctgtgatgggttatatcataaatgcagcttggggttggagcaggggccctcaaaggcccagctcctgctcaaaaaaaaaaaaaa

SEQ ID NO: 306827 - DNA, 1983 bp, Homo sapiens
gcggcctcccgctccagcccggctcattccgcacattccggccagccccctccccacgaccccccttccccggccccccttgcggctccctcgggcccggcggagcggcccggccggagcgcccccgcgagctcggaccaggctcagccgcccagtgggctcaggcccagagcccagagcaaccagcacaatagcgtccaacagctggaacgccagcagcagccccggggaggcccgggaggatgggcccgagggcctggacaaggggctggacaacgatgcggagggcgtgtggagcccggacatcgagcagagcttccaggaggccctggccatctacccgccctgcggccggcggaagatcatcctgtcagacgagggcaagatgtacggccgaaatgagttgattgcacgctatattaaactgaggacggggaagactcggacgagaaaacaggtgtccagccacatacaggttctagctcggaagaaggtgcgggagtaccaggttggcatcaaggccatgaacctggaccaggtctccaaggacaaagcccttcagagcatggcgtccatgtcctctgcccagatcgtctctgccagtgtcctgcagaacaagttcagcccaccttcccctctgccccaggccgtcttctccacttcctcgcggttctggagcagcccccctctcctgggacagcagcctggaccctctcaggacatcaagccctttgcacagccagcctaccccatccagccgcccctgccgccgacgctcagcagttatgagcccctggccccgctcccctcagctgctgcctctgtgcctgtgtggcaggaccgtaccattgcctcctcccggctgcggctcctggagtattcagccttcatggaggtgcagcgagaccctgacacgtacagcaaacacctgtttgtgcacatcggccagacgaaccccgccttctcagacccacccctggaggcagtagatgtgcgccagatctatgacaaattccccgagaaaaagggaggattgaaggagctctatgagaaggggccccctaatgccttcttccttgtcaagttctgggccgacctcaacagcaccatccaggagggcccgggagccttctatggggtcagctctcagtacagctctgctgatagcatgaccatcagcgtctccaccaaggtgtgctcctttggcaaacaggtggtagagaaggtggagactgagtatgccaggctggagaacgggcgctttgtgtaccgtatccaccgctcgcccatgtgcgagtacatgatcaacttcatccacaagctgaagctgtttcagactgggcatgaagaagggagcacagcagctactagaccccattagcacctcattagcccacaagccagccaggggccccaggaagatggggcaccccccagcaccctccagattgagagcaaggtagaggaaggagtcccagcctctgggcagaccagaggcccagagggagagagtagcagaaggcttttgatttttctcttgcctgaggcttgaatctgacaaacccttggtgggcactgctcccttaggttcttccccacctcaatctacctgcctagagtagcagctcccagacccagttctgggactgaaggttaacccttcacctgctgtcccttcttaacacccaggcccccagagccagctgggcctgtccagcagccacctgtgggtatttatgagtttcatatgaagtactgtgccccttcccttcctcatcccgaccctgcccgagcttcctgaaggtcctcactgtttgcatatcgctcaggccacctccaaaccccacctaggttttataatgtatattatatatttttttgtgtatttttaaaatccagctgtgatgggttatatcataaatgcagcttggggttggagcaggggccctcaaaggcccagctcctgctcaaaaaaaaaaaaaa

SEQ ID NO: 306828 - DNA, 850 bp, Homo sapiens
  misc_feature (16)..(17): n is a, c, g, or t
  misc_feature (37)..(37): n is a, c, g, or t
aaatattgtctaggtnngaggctgggtgtttacagcnttcatggaggtgcagcgagacctgacacgtacagcaaacacctgtttgtgcacatcggccagacgaaccccgccttctcagacccacccctggaggcagtagatgtgcgccagatctatgacaaattccccgagaaaaagggaggattgaaggagctctatgagaaggggccccctaatgccttcttccttgtcaagttctgggccgacctcaacagcaccatccaggagggcccgggagccttctatggggtcagctctcagtacagctctgctgatagcatgaccatcagcgtctccaccaaggtgtgctcctttggcaaacaggtggtagagaaggtggagactgagtatgccaggctggagaacgggcgctttgtgtaccgtatccaccgctcgcccatgtgcgagtacatgatcaacttcatccacaagctgaagcacctgcccgagaagtacatgatgaacagcgtgctggagaacttcaccatcctgcaggtggtcacgagccgggactcccaggagaccctgcttgtcattgcttttgtcttcgaagtctccaccagtgagcacggggcccagcaccatgtctacaagctcgtcaaagactagggtgccctctgcgcctccttaaggatgcagggtgagcatctcctctccacacctgcctggcacccctgggggggtccaggattgaggattcatctacctgccaggcctcagccaagactagaggctccaattaccagaaaaatcctgcaagacgggcaaagcgacaaagcgaagagcaaggagcaccgtcggggcgtgacca

SEQ ID NO: 306829 - DNA, 762 bp, Homo sapiens
ggggaggacagggttaggcacagccttgtacaaggacacatagcttgggcagcagaacttgggctggatttcagccctcactggtgccctttgggccagtgaacaacctgtgcagctgtacatggtggccctggaagccactgtggctcttgatcatgataagaccaaaaagagaacagaattggcagtgtcaagaggtgtctgaaccgggcacaatggcacatgcctatagtcatagctactcgggaggctgtggtgggaggatcgcttgagcccaggagtttgagatcagcccaggcaacataaaccctgtttcaaaaagaaaaaaggtccccccatttacatgtagttccctagagatgagaggtctgggatgctccttgcccgcggccaccccatggctgtgcctcctcactgtctgtgttttcctctctggcggggcgcggggcggcccctaggtgtccagccacatacaggttctagctcggaagaaggtgcgggagtaccaggttggcatcaaggccatgaacctggtgcctggcgggggccttcagccctcctgggcccctcacccacggcgctatctctgcatagctcaggcctttccttggccagctctccagccccactgtgcctcttttctggctgaagctctgtttctgcctctccttccgctctttctgttctttttctctttctttctctctctacaggtctctagccacttgcaagttctagccaggcggaaatctcgggagattc

SEQ ID NO: 306830 - DNA, 495 bp, Homo sapiens
tcccttgcagacgctgcagtgggttgacggcagccgctggaactttgcgtactgggctgctcaccagccctggtcccgcggtggtcactgcgtggccctgtgtaccgcgtgggtgtcctgcagaacaagttcagcccaccttcccctctgccccaggccgtcttctccacttcctcgcggttctggagcagcccccctctcctgggacagcagcctggaccctctcaggacatcaagccctttgcacagccagcctaccccatccagccgcccctgccgccgacgctcagcagtaagttccccacacgaggtgctctcccttggcacctgcacctccactcaggagagctggggtccaactgtgtgtgtttgctttgggagggagggggttgcgacatctacaggagattgggacaggccaggaatagcccctttaccttgtacaatgttgcttccagatctctggcacaaaaccatagccaagccaggcgtggt

SEQ ID NO: 306831 - DNA, 2820 bp, Homo sapiens
cagggctattgaggtgggcatggcagttccttgcagagctggctgtcctgcagctgcggatctcagagtctggggttcatgactgaggcccttctgagggcctcacgctggccgtgtgctcttctccctgcccacagcggtgcagcagagggggcctcttacccccaggcccccatgcccagagcctagttccagaacatatggacagacccagagggcaccagcttgttttccctcactctgccctttccagggcttgccccagctggcaggcactccctctgtggggacggggagggtctgctgagcttccttgggctcctcggaagctaaaacccatgggcactgggtggaggtaggcgcaaagacgtccctcagcccacagccctggtgctgcacatgtcctctaatctatcttccttctctccctcacaggccatgaacctggaccaggtctccaaggacaaagcccttcagagcatggcgtccatgtcctctgcccagatcgtctctgccagtgtcctgcagaacaagttcagcccaccttcccctctgccccaggccgtcttctccacttcctcgcggttctggagcagcccccctctcctgggacagcagcctggaccctctcaggacatcaagccctttgcacagccagcctaccccatccagccgcccctgccgccgacgctcagcagttatgagcccctggccccgctcccctcagctgctgcctctgtgcctgtgtggcaggaccgtaccattgcctcctcccggctgcggctcctggagtattcagccttcatggaggtgcagcgagaccctgacacgtacagcaaacacctgtttgtgcacatcggccagacgaaccccgccttctcagacccacccctggaggcagtagatgtgcgccagatctatgacaaattccccgagaaaaagggaggattgaaggagctctatgagaaggggccccctaatgccttcttccttgtcaagttctgggccgacctcaacagcaccatccaggagggcccgggagccttctatggggtcagctctcagtacagctctgctgatagcatgaccatcagcgtctccaccaaggtgtgctcctttggcaaacaggtggtagagaaggtggagactgagtatgccaggctggagaacgggcgctttgtgtaccgtatccaccgctcgcccatgtgcgagtacatgatcaacttcatccacaagctgaagcacctgcccgagaagtacatgatgaacagcgtgctggagaacttcaccatcctgcaggtggtcacgagccgggactcccaggagaccctgcttgtcattgcttttgtcttcgaagtctccaccagtgagcacggggcccagcaccatgtctacaagctcgtcaaagactagggtgccctctgcgcctccttaaggatgcagggtgagcatctcctctccacacctgcctggcacccctgggggggtccaggattgaggattcatctacctgccaggcctcaggcccaggacccaggaggcctccccacctaccccagcacacacactccctgccactgttctgcgctttaattgtgggagaagagaggagaggagggctcagcggtggggcagcctgtccggggcgctgacccaccatcaccctgctctgcccagcctcgcgtgacctcagagaggtggggataggggacaccttcagcctccagcatgtgtggccactgtacccccacccacccttgggggagcatgatgggcaggtgagggcaggatggagaccaagggagtcagtgagcagaggccctgggagtgtccggttggggttggactgaggacagaggggcccacacttccttgcccctttgtgtcccaggcctggtgcccagactccttgcatggcttgtgtggtcctcagactccgcacagcgagcgtaggtctctgggtttcagatgaagtgcccaggctccaggaagttgagggacccacaggagaggtgggcagagctggagttctcatccagggctgcttgtccccagagcccaggtttatactacctccctggggcgggggctggccgcagggtaggggagaggctctgcagtgtggagtggagcctcatcgaggggcgctgggttaggggagcacctgtttcagactgggcatgaagaagggagcacagcagctactagaccccattagcacctcattagcccacaagccagccaggggccccaggaagatggggcaccccccagcaccctccagattgagagcaaggtagaggaaggagtcccagcctctgggcagaccagaggcccagagggagagagtagcagaaggcttttgatttttctcttgcctgaggcttgaatctgacaaacccttggtgggcactgctcccttaggttcttccccacctcaatctacctgcctagagtagcagctcccagacccagttctgggactgaaggttaacccttcacctgctgtcccttcttaacacccaggcccccagagccagctgggcctgtccagcagccacctgtgggtatttatgagtttcatatgaagtactgtgccccttcccttcctcatcccgaccctgcccgagcttcctgaaggtcctcactgtttgcatatcgctcaggccacctccaaaccccacctaggttttataatgtatattatatatttttttgtgtatttttaaaatccagctgtgatgggttatatcataaatgcagcttggggttggagcaggggccctcaaaggcccagctcctgctcaaaaaaaaaaaaaa

SEQ ID NO: 306832 - DNA, 2906 bp, Homo sapiens
ggggaggacagggttaggcacagccttgtacaaggacacatagcttgggcagcagaacttgggctggatttcagccctcactggtgccctttgggccagtgaacaacctgtgcagctgtacatggtggccctggaagccactgtggctcttgatcatgataagaccaaaaagagaacagaattggcagtgtcaagaggtgtctgaaccgggcacaatggcacatgcctatagtcatagctactcgggaggctgtggtgggaggatcgcttgagcccaggagtttgagatcagcccaggcaacataaaccctgtttcaaaaagaaaaaaggtccccccatttacatgtagttccctagagatgagaggtctgggatgctccttgcccgcggccaccccatggctgtgcctcctcactgtctgtgttttcctctctggcggggcgcggggcggcccctaggtgtccagccacatacaggttctagctcggaagaaggtgcgggagtaccaggttggcatcaaggccatgaacctggaccaggtctccaaggacaaagcccttcagagcatggcgtccatgtcctctgcccagatcgtctctgccagtgtcctgcagaacaagttcagcccaccttcccctctgccccaggccgtcttctccacttcctcgcggttctggagcagcccccctctcctgggacagcagcctggaccctctcaggacatcaagccctttgcacagccagcctaccccatccagccgcccctgccgccgacgctcagcagttatgagcccctggccccgctcccctcagctgctgcctctgtgcctgtgtggcaggaccgtaccattgcctcctcccggctgcggctcctggagtattcagccttcatggaggtgcagcgagaccctgacacgtacagcaaacacctgtttgtgcacatcggccagacgaaccccgccttctcagacccacccctggaggcagtagatgtgcgccagatctatgacaaattccccgagaaaaagggaggattgaaggagctctatgagaaggggccccctaatgccttcttccttgtcaagttctgggccgacctcaacagcaccatccaggagggcccgggagccttctatggggtcagctctcagtacagctctgctgatagcatgaccatcagcgtctccaccaaggtgtgctcctttggcaaacaggtggtagagaaggtggagactgagtatgccaggctggagaacgggcgctttgtgtaccgtatccaccgctcgcccatgtgcgagtacatgatcaacttcatccacaagctgaagcacctgcccgagaagtacatgatgaacagcgtgctggagaacttcaccatcctgcaggtggtcacgagccgggactcccaggagaccctgcttgtcattgcttttgtcttcgaagtctccaccagtgagcacggggcccagcaccatgtctacaagctcgtcaaagactagggtgccctctgcgcctccttaaggatgcagggtgagcatctcctctccacacctgcctggcacccctgggggggtccaggattgaggattcatctacctgccaggcctcaggcccaggacccaggaggcctccccacctaccccagcacacacactccctgccactgttctgcgctttaattgtgggagaagagaggagaggagggctcagcggtggggcagcctgtccggggcgctgacccaccatcaccctgctctgcccagcctcgcgtgacctcagagaggtggggataggggacaccttcagcctccagcatgtgtggccactgtacccccacccacccttgggggagcatgatgggcaggtgagggcaggatggagaccaagggagtcagtgagcagaggccctgggagtgtccggttggggttggactgaggacagaggggcccacacttccttgcccctttgtgtcccaggcctggtgcccagactccttgcatggcttgtgtggtcctcagactccgcacagcgagcgtaggtctctgggtttcagatgaagtgcccaggctccaggaagttgagggacccacaggagaggtgggcagagctggagttctcatccagggctgcttgtccccagagcccaggtttatactacctccctggggcgggggctggccgcagggtaggggagaggctctgcagtgtggagtggagcctcatcgaggggcgctgggttaggggagcacctgtttcagactgggcatgaagaagggagcacagcagctactagaccccattagcacctcattagcccacaagccagccaggggccccaggaagatggggcaccccccagcaccctccagattgagagcaaggtagaggaaggagtcccagcctctgggcagaccagaggcccagagggagagagtagcagaaggcttttgatttttctcttgcctgaggcttgaatctgacaaacccttggtgggcactgctcccttaggttcttccccacctcaatctacctgcctagagtagcagctcccagacccagttctgggactgaaggttaacccttcacctgctgtcccttcttaacacccaggcccccagagccagctgggcctgtccagcagccacctgtgggtatttatgagtttcatatgaagtactgtgccccttcccttcctcatcccgaccctgcccgagcttcctgaaggtcctcactgtttgcatatcgctcaggccacctccaaaccccacctaggttttataatgtatattatatatttttttgtgtatttttaaaatccagctgtgatgggttatatcataaatgcagcttggggttggagcaggggccctcaaaggcccagctcctgctcaaaaaaaaaaaaaa

SEQ ID NO: 306833 - DNA, 2576 bp, Homo sapiens
tgctttggactctgctggggtcatgggaggggcgctaaagcaagcctggcctcatccagcgtggccctggcttcatgcagcctcctctccccaggaccaggtctccaaggacaaagcccttcagagcatggcgtccatgtcctctgcccagatcgtctctgccagtgtcctgcagaacaagttcagcccaccttcccctctgccccaggccgtcttctccacttcctcgcgggtacatgggtcccaggaggtgggctggtgtgggggtgtgctgtaaaggatgagctttagtggggttcatggatgctgaggggcccctgggccttgtctcatccctgcagttctggagcagcccccctctcctgggacagcagcctggaccctctcaggacatcaagccctttgcacagccagcctaccccatccagccgcccctgccgccgacgctcagcagttatgagcccctggccccgctcccctcagctgctgcctctgtgcctgtgtggcaggaccgtaccattgcctcctcccggctgcggctcctggagtattcagccttcatggaggtgcagcgagaccctgacacgtacagcaaacacctgtttgtgcacatcggccagacgaaccccgccttctcagacccacccctggaggcagtagatgtgcgccagatctatgacaaattccccgagaaaaagggaggattgaaggagctctatgagaaggggccccctaatgccttcttccttgtcaagttctgggccgacctcaacagcaccatccaggagggcccgggagccttctatggggtcagctctcagtacagctctgctgatagcatgaccatcagcgtctccaccaaggtgtgctcctttggcaaacaggtggtagagaaggtggagactgagtatgccaggctggagaacgggcgctttgtgtaccgtatccaccgctcgcccatgtgcgagtacatgatcaacttcatccacaagctgaagcacctgcccgagaagtacatgatgaacagcgtgctggagaacttcaccatcctgcaggtggtcacgagccgggactcccaggagaccctgcttgtcattgcttttgtcttcgaagtctccaccagtgagcacggggcccagcaccatgtctacaagctcgtcaaagactagggtgccctctgcgcctccttaaggatgcagggtgagcatctcctctccacacctgcctggcacccctgggggggtccaggattgaggattcatctacctgccaggcctcaggcccaggacccaggaggcctccccacctaccccagcacacacactccctgccactgttctgcgctttaattgtgggagaagagaggagaggagggctcagcggtggggcagcctgtccggggcgctgacccaccatcaccctgctctgcccagcctcgcgtgacctcagagaggtggggataggggacaccttcagcctccagcatgtgtggccactgtacccccacccacccttgggggagcatgatgggcaggtgagggcaggatggagaccaagggagtcagtgagcagaggccctgggagtgtccggttggggttggactgaggacagaggggcccacacttccttgcccctttgtgtcccaggcctggtgcccagactccttgcatggcttgtgtggtcctcagactccgcacagcgagcgtaggtctctgggtttcagatgaagtgcccaggctccaggaagttgagggacccacaggagaggtgggcagagctggagttctcatccagggctgcttgtccccagagcccaggtttatactacctccctggggcgggggctggccgcagggtaggggagaggctctgcagtgtggagtggagcctcatcgaggggcgctgggttaggggagcacctgtttcagactgggcatgaagaagggagcacagcagctactagaccccattagcacctcattagcccacaagccagccaggggccccaggaagatggggcaccccccagcaccctccagattgagagcaaggtagaggaaggagtcccagcctctgggcagaccagaggcccagagggagagagtagcagaaggcttttgatttttctcttgcctgaggcttgaatctgacaaacccttggtgggcactgctcccttaggttcttccccacctcaatctacctgcctagagtagcagctcccagacccagttctgggactgaaggttaacccttcacctgctgtcccttcttaacacccaggcccccagagccagctgggcctgtccagcagccacctgtgggtatttatgagtttcatatgaagtactgtgccccttcccttcctcatcccgaccctgcccgagcttcctgaaggtcctcactgtttgcatatcgctcaggccacctccaaaccccacctaggttttataatgtatattatatatttttttgtgtatttttaaaatccagctgtgatgggttatatcataaatgcagcttggggttggagcaggggccctcaaaggcccagctcctgctcaaaaaaaaaaaaaa

SEQ ID NO: 306834 - DNA, 2989 bp, Homo sapiens
  misc_feature (1229)..(1229): n is a, c, g, or t
gcggcctcccgctccagcccggctcattccgcacattccggccagccccctccccacgaccccccttccccggccccccttgcggctccctcgggcccggcggagcggcccggccggagcgcccccgcgagctcggaccaggctcagccgcccagtgggctcaggcccagagcccagagcaaccagcacaatagcgtccaacagctggaacgccagcagcagccccggggaggcccgggaggatgggcccgagggcctggacaaggggctggacaacgatgcggagggcgtgtggagcccggacatcgagcagagcttccaggaggccctggccatctacccgccctgcggccggcggaagatcatcctgtcagacgagggcaagatgtacggccgaaatgagttgattgcacgctatattaaactgaggacggggaagactcggacgagaaaacaggtgtccagccacatacaggttctagctcggaagaaggtgcgggagtaccaggttggcatcaaggccatgaacctggaccaggtctccaaggacaaagcccttcagagcatggcgtccatgtcctctgcccagatcgtctctgccagtgtcctgcagaacaagttcagcccaccttcccctctgccccaggccgtcttctccacttcctcgcggttctggagcagcccccctctcctgggacagcagcctggaccctctcaggacatcaagccctttgcacagccagcctaccccatccagccgcccctgccgccgacgctcagcagttatgagcccctggccccgctcccctcagctgctgcctctgtgcctgtgtggcaggaccgtaccattgcctcctcccggctgcggctcctggagtattcagccttcatggaggtgcagcgagaccctgacacgtacagcaaacacctgtttgtgcacatcggccagacgaaccccgccttctcagacccacccctggaggcagtagatgtgcgccagatctatgacaaattccccgagaaaaagggaggattgaaggagctctatgagaaggggccccctaatgccttcttccttgtcaagttctgggcgaccatctaagagccaccatcctagggcaggagccccggagagcctttcatcattgtgggtcatagcatcttcgatgtaacaaggcatcatgacgtcgaattagcgcactgacctcatccatgcgtcgtcgcgaccnaaggttgtggcatcccgtttggctaaagcagggttggttatgatgataaggctgagagacctgtagtactgcgctaggcgtggtaggaaacgggctgcattggatgttacgcgtgagtcacagcacggcctcgctcctactgtgtcgacgatacagtgagtcataggttcattccatgaaggcacctgcccgagaagtacatgatgaacagcgtgctggagaacttcaccatcctgcaggtggtcacgagccgggactcccaggagaccctgcttgtcattgcttttgtcttcgaagtctccaccagtgagcacggggcccagcaccatgtctacaagctcgtcaaagactagggtgccctctgcgcctccttaaggatgcagggtgagcatctcctctccacacctgcctggcacccctgggggggtccaggattgaggattcatctacctgccaggcctcaggcccaggacccaggaggcctccccacctaccccagcacacacactccctgccactgttctgcgctttaattgtgggagaagagaggagaggagggctcagcggtggggcagcctgtccggggcgctgacccaccatcaccctgctctgcccagcctcgcgtgacctcagagaggtggggataggggacaccttcagcctccagcatgtgtggccactgtacccccacccacccttgggggagcatgatgggcaggtgagggcaggatggagaccaagggagtcagtgagcagaggccctgggagtgtccggttggggttggactgaggacagaggggcccacacttccttgcccctttgtgtcccaggcctggtgcccagactccttgcatggcttgtgtggtcctcagactccgcacagcgagcgtaggtctctgggtttcagatgaagtgcccaggctccaggaagttgagggacccacaggagaggtgggcagagctggagttctcatccagggctgcttgtccccagagcccaggtttatactacctccctggggcgggggctggccgcagggtaggggagaggctctgcagtgtggagtggagcctcatcgaggggcgctgggttaggggagcacctgtttcagactgggcatgaagaagggagcacagcagctactagaccccattagcacctcattagcccacaagccagccaggggccccaggaagatggggcaccccccagcaccctccagattgagagcaaggtagaggaaggagtcccagcctctgggcagaccagaggcccagagggagagagtagcagaaggcttttgatttttctcttgcctgaggcttgaatctgacaaacccttggtgggcactgctcccttaggttcttccccacctcaatctacctgcctagagtagcagctcccagacccagttctgggactgaaggttaacccttcacctgctgtcccttcttaacacccaggcccccagagccagctgggcctgtccagcagccacctgtgggtatttatgagtttcatatgaagtactgtgccccttcccttcctcatcccgaccctgcccgagcttcctgaaggtcctcactgtttgcatatcgctcaggccacctccaaaccccacctaggttttataatgtatattatatatttttttgtgtatttttaaaatccagctgtgatgggttatatcataaatgcagcttggggttggagcaggggccctcaaaggcccagctcctgctcaaaaaaaaaaaaaa

SEQ ID NO: 306835 - DNA, 2055 bp, Homo sapiens
  misc_feature (16)..(17): n is a, c, g, or t
  misc_feature (37)..(37): n is a, c, g, or t
aaatattgtctaggtnngaggctgggtgtttacagcnttcatggaggtgcagcgagacctgacacgtacagcaaacacctgtttgtgcacatcggccagacgaaccccgccttctcagacccacccctggaggcagtagatgtgcgccagatctatgacaaattccccgagaaaaagggaggattgaaggagctctatgagaaggggccccctaatgccttcttccttgtcaagttctgggccgacctcaacagcaccatccaggagggcccgggagccttctatggggtcagctctcagtacagctctgctgatagcatgaccatcagcgtctccaccaaggtgtgctcctttggcaaacaggtggtagagaaggtggagactgagtatgccaggctggagaacgggcgctttgtgtaccgtatccaccgctcgcccatgtgcgagtacatgatcaacttcatccacaagctgaagcacctgcccgagaagtacatgatgaacagcgtgctggagaacttcaccatcctgcaggtggtcacgagccgggactcccaggagaccctgcttgtcattgcttttgtcttcgaagtctccaccagtgagcacggggcccagcaccatgtctacaagctcgtcaaagactagggtgccctctgcgcctccttaaggatgcagggtgagcatctcctctccacacctgcctggcacccctgggggggtccaggattgaggattcatctacctgccaggcctcaggcccaggacccaggaggcctccccacctaccccagcacacacactccctgccactgttctgcgctttaattgtgggagaagagaggagaggagggctcagcggtggggcagcctgtccggggcgctgacccaccatcaccctgctctgcccagcctcgcgtgacctcagagaggtggggataggggacaccttcagcctccagcatgtgtggccactgtacccccacccacccttgggggagcatgatgggcaggtgagggcaggatggagaccaagggagtcagtgagcagaggccctgggagtgtccggttggggttggactgaggacagaggggcccacacttccttgcccctttgtgtcccaggcctggtgcccagactccttgcatggcttgtgtggtcctcagactccgcacagcgagcgtaggtctctgggtttcagatgaagtgcccaggctccaggaagttgagggacccacaggagaggtgggcagagctggagttctcatccagggctgcttgtccccagagcccaggtttatactacctccctggggcgggggctggccgcagggtaggggagaggctctgcagtgtggagtggagcctcatcgaggggcgctgggttaggggagcacctgtttcagactgggcatgaagaagggagcacagcagctactagaccccattagcacctcattagcccacaagccagccaggggccccaggaagatggggcaccccccagcaccctccagattgagagcaaggtagaggaaggagtcccagcctctgggcagaccagaggcccagagggagagagtagcagaaggcttttgatttttctcttgcctgaggcttgaatctgacaaacccttggtgggcactgctcccttaggttcttccccacctcaatctacctgcctagagtagcagctcccagacccagttctgggactgaaggttaacccttcacctgctgtcccttcttaacacccaggcccccagagccagctgggcctgtccagcagccacctgtgggtatttatgagtttcatatgaagtactgtgccccttcccttcctcatcccgaccctgcccgagcttcctgaaggtcctcactgtttgcatatcgctcaggccacctccaaaccccacctaggttttataatgtatattatatatttttttgtgtatttttaaaatccagctgtgatgggttatatcataaatgcagcttggggttggagcaggggccctcaaaggcccagctcctgctcaaaaaaaaaaaaaa

SEQ ID NO: 306836 - DNA, 1165 bp, Homo sapiens
cttttggggtctttgctcttttgctgtctttgctcttttggggtctttgctctttcggggtctatcctccagcatgtgtggccactgtacccccacccacccttgggggagcatgatgggcaggtgagggcaggatggagaccaagggagtcagtgagcagaggccctgggagtgtccggttggggttggactgaggacagaggggcccacacttccttgcccctttgtgtcccaggcctggtgcccagactccttgcatggcttgtgtggtcctcagactccgcacagcgagcgtaggtctctgggtttcagatgaagtgcccaggctccaggaagttgagggacccacaggagaggtgggcagagctggagttctcatccagggctgcttgtccccagagcccaggtttatactacctccctggggcgggggctggccgcagggtaggggagaggctctgcagtgtggagtggagcctcatcgaggggcgctgggttaggggagcacctgtttcagactgggcatgaagaagggagcacagcagctactagaccccattagcacctcattagcccacaagccagccaggggccccaggaagatggggcaccccccagcaccctccagattgagagcaaggtagaggaaggagtcccagcctctgggcagaccagaggcccagagggagagagtagcagaaggcttttgatttttctcttgcctgaggcttgaatctgacaaacccttggtgggcactgctcccttaggttcttccccacctcaatctacctgcctagagtagcagctcccagacccagttctgggactgaaggttaacccttcacctgctgtcccttcttaacacccaggcccccagagccagctgggcctgtccagcagccacctgtgggtatttatgagtttcatatgaagtactgtgccccttcccttcctcatcccgaccctgcccgagcttcctgaaggtcctcactgtttgcatatcgctcaggccacctccaaaccccacctaggttttataatgtatattatatatttttttgtgtatttttaaaatccagctgtgatgggttatatcataaatgcagcttggggttggagcaggggccctcaaaggcccagctcctgctcaaaaaaaaaaaaaa

SEQ ID NO: 306837 - DNA, 1700 bp, Homo sapiens
gcggcctcccgctccagcccggctcattccgcacattccggccagccccctccccacgaccccccttccccggccccccttgcggctccctcgggcccggcggagcggcccggccggagcgcccccgcgagctcggaccaggctcagccgcccagtgggctcaggcccagagcccagagcaaccagcacaatagcgtccaacagctggaacgccagcagcagccccggggaggcccgggaggatgggcccgagggcctggacaaggggctggacaacgatgcggagggcgtgtggagcccggacatcgagcagagcttccaggaggccctggccatctacccgccctgcggccggcggaagatcatcctgtcagacgagggcaagatgtacggccgaaatgagttgattgcacgctatattaaactgaggacggggaagactcggacgagaaaacaggtgtccagccacatacaggttctagctcggaagaaggtgcgggagtaccaggttggcatcaaggccatgaacctggaccaggtctccaaggacaaagcccttcagagcatggcgtccatgtcctctgcccagatcgtctctgccagtgtcctgcagaacaagttcagcccaccttcccctctgccccaggccgtcttctccacttcctcgcggttctggagcagcccccctctcctgggacagcagcctggaccctctcaggacatcaagccctttgcacagccagcctaccccatccagccgcccctgccgccgacgctcagcagttatgagcccctggccccgctcccctcagctgctgcctctgtgcctgtgtggcaggaccgtaccattgcctcctcccggctgcggctcctggagtattcagccttcatggaggtgcagcgagaccctgacacgtacagcaaacacctgtttgtgcacatcggccagacgaaccccgccttctcagacccacccctggaggcagtagatgtgcgccagatctatgacaaattccccgagaaaaagggaggattgaaggagctctatgagaaggggccccctaatgccttcttccttgtcaagttctgggccgacctcaacagcaccatccaggagggcccgggagccttctatggggtcagctctcagtacagctctgctgatagcatgaccatcagcgtctccaccaaggtgtgctcctttggcaaacaggtggtagagaaggtggagactgagtatgccaggctggagaacgggcgctttgtgtaccgtatccaccgctcgcccatgtgcgagtacatgatcaacttcatccacaagctgaagcacctgcccgagaagtacatgatgaacagcgtgctggagaacttcaccatcctgcaggtggtcacgagccgggactcccaggagaccctgcttgtcattgcttttgtcttcgaagtctccaccagtgagcacggggcccagcaccatgtctacaagctcgtcaaagactagggtgccctctgcgcctccttaaggatgcagggtgagcatctcctctccacacctgcctggcacccctgggggggtccaggattgaggattcatctacctgccaggcctcagccaagactagaggctccaattaccagaaaaatcctgcaagacgggcaaagcgacaaagcgaagagcaaggagcaccgtcggggcgtgacca

SEQ ID NO: 306838 - DNA, 1691 bp, Homo sapiens
  misc_feature (1560)..(1560): n is a, c, g, or t
gcggcctcccgctccagcccggctcattccgcacattccggccagccccctccccacgaccccccttccccggccccccttgcggctccctcgggcccggcggagcggcccggccggagcgcccccgcgagctcggaccaggctcagccgcccagtgggctcaggcccagagcccagagcaaccagcacaatagcgtccaacagctggaacgccagcagcagccccggggaggcccgggaggatgggcccgagggcctggacaaggggctggacaacgatgcggagggcgtgtggagcccggacatcgagcagagcttccaggaggccctggccatctacccgccctgcggccggcggaagatcatcctgtcagacgagggcaagatgtacggccgaaatgagttgattgcacgctatattaaactgaggacggggaagactcggacgagaaaacaggtgtccagccacatacaggttctagctcggaagaaggtgcgggagtaccaggttggcatcaaggccatgaacctggaccaggtctccaaggacaaagcccttcagagcatggcgtccatgtcctctgcccagatcgtctctgccagtgtcctgcagaacaagttcagcccaccttcccctctgccccaggccgtcttctccacttcctcgcggttctggagcagcccccctctcctgggacagcagcctggaccctctcaggacatcaagccctttgcacagccagcctaccccatccagccgcccctgccgccgacgctcagcagttatgagcccctggccccgctcccctcagctgctgcctctgtgcctgtgtggcaggaccgtaccattgcctcctcccggctgcggctcctggagtattcagccttcatggaggtgcagcgagaccctgacacgtacagcaaacacctgtttgtgcacatcggccagacgaaccccgccttctcagacccacccctggaggcagtagatgtgcgccagatctatgacaaattccccgagaaaaagggaggattgaaggagctctatgagaaggggccccctaatgccttcttccttgtcaagttctgggccgacctcaacagcaccatccaggagggcccgggagccttctatggggtcagctctcagtacagctctgctgatagcatgaccatcagcgtctccaccaaggtgtgctcctttggcaaacaggtggtagagaaggtggagactgagtatgccaggctggagaacgggcgctttgtgtaccgtatccaccgctcgcccatgtgcgagtacatgatcaacttcatccacaagctgaagcacctgcccgagaagtacatgatgaacagcgtgctggagaacttcaccatcctgcaggtggtcacgagccgggactcccaggagaccctgcttgtcattgcttttgtcttcgaagtctccaccagtgagcacggggcccagcaccatgtctacaagctcgtcaaagaatgagagactcggggagcagggaggggggaagagacgtgtgtgcaggaaacggggacgtggggagnggacctgcaggggcagccccctgaagtgccaagagagctgagaggagcagttgtgactctacccaggaacaaactgtgcctgaacctgaggtgcccaaccccaaataaacccaagatgctgtgtattttca

SEQ ID NO: 306839 - DNA, 1527 bp, Homo sapiens
gcggcctcccgctccagcccggctcattccgcacattccggccagccccctccccacgaccccccttccccggccccccttgcggctccctcgggcccggcggagcggcccggccggagcgcccccgcgagctcggaccaggctcagccgcccagtgggctcaggcccagagcccagagcaaccagcacaatagcgtccaacagctggaacgccagcagcagccccggggaggcccgggaggatgggcccgagggcctggacaaggggctggacaacgatgcggagggcgtgtggagcccggacatcgagcagagcttccaggaggccctggccatctacccgccctgcggccggcggaagatcatcctgtcagacgagggcaagatgtacggccgaaatgagttgattgcacgctatattaaactgaggacggggaagactcggacgagaaaacaggtgtccagccacatacaggttctagctcggaagaaggtgcgggagtaccaggttggcatcaaggccatgaacctggaccaggtctccaaggacaaagcccttcagagcatggcgtccatgtcctctgcccagatcgtctctgccagtgtcctgcagaacaagttcagcccaccttcccctctgccccaggccgtcttctccacttcctcgcggttctggagcagcccccctctcctgggacagcagcctggaccctctcaggacatcaagccctttgcacagccagcctaccccatccagccgcccctgccgccgacgctcagcagttatgagcccctggccccgctcccctcagctgctgcctctgtgcctgtgtggcaggaccgtaccattgcctcctcccggctgcggctcctggagtattcagccttcatggaggtgcagcgagaccctgacacgtacagcaaacacctgtttgtgcacatcggccagacgaaccccgccttctcagacccacccctggaggcagtagatgtgcgccagatctatgacaaattccccgagaaaaagggaggattgaaggagctctatgagaaggggccccctaatgccttcttccttgtcaagttctgggccgacctcaacagcaccatccaggagggcccgggagccttctatggggtcagctctcagtacagctctgctgatagcatgaccatcagcgtctccaccaaggtgtgctcctttggcaaacaggtggtagagaaggtggagactgagtatgccaggctggagaacgggcgctttgtgtaccgtatccaccgctcgcccatgtgcgagtacatgatcaacttcatccacaagctgaagcctgcccgagcttcctgaaggtcctcactgtttgcatatcgctcaggccacctccaaaccccacctaggttttataatgtatattatatatttttttgtgtatttttaaaatccagctgtgatgggttatatcataaatgcagcttggggttggagcaggggccctcaaaggcccagctcctgctcaaaaaaaaaaaaaa

SEQ ID NO: 306840 - DNA, 924 bp, Homo sapiens
cagggctattgaggtgggcatggcagttccttgcagagctggctgtcctgcagctgcggatctcagagtctggggttcatgactgaggcccttctgagggcctcacgctggccgtgtgctcttctccctgcccacagcggtgcagcagagggggcctcttacccccaggcccccatgcccagagcctagttccagaacatatggacagacccagagggcaccagcttgttttccctcactctgccctttccagggcttgccccagctggcaggcactccctctgtggggacggggagggtctgctgagcttccttgggctcctcggaagctaaaacccatgggcactgggtggaggtaggcgcaaagacgtccctcagcccacagccctggtgctgcacatgtcctctaatctatcttccttctctccctcacaggccatgaacctggaccaggtctccaaggacaaagcccttcagagcatggcgtccatgtcctctgcccagatcgtctctgccagtgtcctgcagaacaagttcagcccaccttcccctctgccccaggccgtcttctccacttcctcgcggttctggagcagcccccctctcctgggacagcagcctggaccctctcaggacatcaagccctttgcacagccagcctaccccatccagccgcccctgccgccgacgctcagcagttatgagcccctggccccgctcccctcagctgctgcctctgtgcctgtgtggcaggaccgtaccattgccaggccacctccaaaccccacctaggttttataatgtatattatatatttttttgtgtatttttaaaatccagctgtgatgggttatatcataaatgcagcttggggttggagcaggggccctcaaaggcccagctcctgctcaaaaaaaaaaaaaa

SEQ ID NO: 306841 - DNA, 900 bp, Homo sapiens
cagggctattgaggtgggcatggcagttccttgcagagctggctgtcctgcagctgcggatctcagagtctggggttcatgactgaggcccttctgagggcctcacgctggccgtgtgctcttctccctgcccacagcggtgcagcagagggggcctcttacccccaggcccccatgcccagagcctagttccagaacatatggacagacccagagggcaccagcttgttttccctcactctgccctttccagggcttgccccagctggcaggcactccctctgtggggacggggagggtctgctgagcttccttgggctcctcggaagctaaaacccatgggcactgggtggaggtaggcgcaaagacgtccctcagcccacagccctggtgctgcacatgtcctctaatctatcttccttctctccctcacaggccatgaacctggaccaggtctccaaggacaaagcccttcagagcatggcgtccatgtcctctgcccagatcgtctctgccagtgtcctgcagaacaagttcagcccaccttcccctctgccccaggccgtcttctccacttcctcgcggttctggagcagcccccctctcctgggacagcagcctggaccctctcaggacatcaagccctttgcacagccagcctaccccatccagccgcccctgccgccgacgctcagcagtaagttccccacacgaggtgctctcccttggcacctgcacctccactcaggagagctggggtccaactgtgtgtgtttgctttgggagggagggggttgcgacatctacaggagattgggacaggccaggaatagcccctttaccttgtacaatgttgcttccagatctctggcacaaaaccatagccaagccaggcgtggt

SEQ ID NO: 306842 - DNA, 964 bp, Homo sapiens
gcggcctcccgctccagcccggctcattccgcacattccggccagccccctccccacgaccccccttccccggccccccttgcggctccctcgggcccggcggagcggcccggccggagcgcccccgcgagctcggaccaggctcagccgcccagtgggctcaggcccagagcccagagcaaccagcacaatagcgtccaacagctggaacgccagcagcagccccggggaggcccgggaggatgggcccgagggcctggacaaggggctggacaacgatgcggagggcgtgtggagcccggacatcgagcagagcttccaggaggccctggccatctacccgccctgcggccggcggaagatcatcctgtcagacgagggcaagatgtacggccgaaatgagttgattgcacgctatattaaactgaggacggggaagactcggacgagaaaacaggtgtccagccacatacaggttctagctcggaagaaggtgcgggagtaccaggttggcatcaaggccatgaacctggaccaggtctccaaggacaaagcccttcagagcatggcgtccatgtcctctgcccagatcgtctctgccagtgtcctgcagaacaagttcagcccaccttcccctctgccccaggccgtcttctccacttcctcgcggttctggagcagcccccctctcctgggacagcagcctggaccctctcaggacatcaagccctttgcacagaggatgatgagtacctggataaggtggagaggaacatcaagaaatccctccaggagcacctgcctgacgtggtggtatacaatgcaggcaccgacatcctcgagggggaccgccttgggggtctgtccatcagcccagcgggcatcgtgaagcgggatgagctggtgttccaggatggtccgtgtcaccgggtgcccatccttatggtacactcaggcgggatac

SEQ ID NO: 306843 - DNA, 242 bp, Homo sapiens
ctggtcccagttcctgtctgtctgtcccccaggctcagccgcccagtgggctcaggcccagagcccagagcaaccagcacaatagcgtccaacagctggaacgccagcagcagccccggggaggcccgggaggatgggcccgagggcctggacaaggggctggacaacgatgcggagggcgtgtggagcccggacatcgagcagagcttccaggaggccctggccatctacccgccctgcgg

SEQ ID NO: 306844 - DNA, 3865 bp, Homo sapiens
cgcgcaagatggcggcgggcccgggcaccgccccttccgccccgccgggcgtcgcacgaggccggctcgaaggggaagtgagtcagtgtccgcggacccggccggcccaggcccgcgcccgccgcggccctgagaggccccggcaggtcccggcccggcggcggcagccatggccggggggccgggcccgggggagcccgcagcccccggcgcccagcacttcttgtacgaggtgccgccctgggtcatgtgccgcttctacaaagtgatggacgccctggagcccgccgactggtgccagttcgccgccctgatcgtgcgcgaccagaccgagctgcggctgtgcgagcgctccgggcagcgcacggccagcgtcctgtggccctggatcaaccgcaacgcccgtgtggccgacctcgtgcacatcctcacgcacctgcagctgctccgtgcgcgggacatcatcacagcctggcaccctcccgccccgcttccgtccccaggcaccactgccccgaggcccagcagcatccctgcacccgccgaggccgaggcctggagcccccggaagttgccatcctcagcctccaccttcctctccccagcttttccaggctcccagacccattcagggcctgagctcggcctggttccaagccctgcttccctgtggcctccaccgccatctccagccccttcttctaccaagccaggcccagagagctcagtgtccctcctgcagggagcccgcccctctccgttttgctggcccctctgtgagatttcccggggcacccacaacttctcggaggagctcaagatcggggagggtggctttgggtgcgtgtaccgggcggtgatgaggaacacggtgtatgctgtgaagaggctgaaggagaacgctgacctggagtggactgcagtgaagcagagcttcctgaccgaggtggagcagctgtccaggtttcgtcacccaaacattgtggactttgctggctactgtgctcagaacggcttctactgcctggtgtacggcttcctgcccaacggctccctggaggaccgtctccactgccagacccaggcctgcccacctctctcctggcctcagcgactggacatccttctgggtacagcccgggcaattcagtttctacatcaggacagccccagcctcatccatggagacatcaagagttccaacgtccttctggatgagaggctgacacccaagctgggagactttggcctggcccggttcagccgctttgccgggtccagccccagccagagcagcatggtggcccggacacagacagtgcggggcaccctggcctacctgcccgaggagtacatcaagacgggaaggctggctgtggacacggacaccttcagctttggggtggtagtgctagagaccttggctggtcagagggctgtgaagacgcacggtgccaggaccaagtatctgaaagacctggtggaagaggaggctgaggaggctggagtggctttgagaagcacccagagcacactgcaagcaggtctggctgcagatgcctgggctgctcccatcgccatgcagatctacaagaagcacctggaccccaggcccgggccctgcccacctgagctgggcctgggcctgggccagctggcctgctgctgcctgcaccgccgggccaaaaggaggcctcctatgacccaggtgtacgagaggctagagaagctgcaggcagtggtggcgggggtgcccgggcatttggaggccgccagctgcatccccccttccccgcaggagaactcctacgtgtccagcactggcagagcccacagtggggctgctccatggcagcccctggcagcgccatcaggagccagtgcccaggcagcagagcagctgcagagaggccccaaccagcccgtggagagtgacgagagcctaggcggcctctctgctgccctgcgctcctggcacttgactccaagctgccctctggacccagcacccctcagggaggccggctgtcctcagggggacacggcaggagaatcgagctgggggagtggcccaggatcccggcccacagccgtggaaggactggcccttggcagctctgcatcatcgtcgtcagagccaccgcagattatcatcaaccctgcccgacagaagatggtccagaagctggccctgtacgaggatggggccctggacagcctgcagctgctgtcgtccagctccctcccaggcttgggcctggaacaggacaggcaggggcccgaagaaagtgatgaatttcagagctgatgtgttcacctgggcagatcccccaaatccggaagtcaaagttctcatggtcagaagttctcatggtgcacgagtcctcagcactctgccggcagtgggggtgggggcccatgcccgcgggggagagaaggaggtggccctgctgttctaggctctgtgggcataggcaggcagagtggaaccctgcctccatgccagcatctgggggcaaggaaggctggcatcatccagtgaggaggctggcgcatgttgggaggctgctggctgcacagacccgtgaggggaggagaggggctgctgtgcaggggtgtggagtagggagctggctcccctgagagccatgcagggcgtctgcagcccaggcctctggcagcagctctttgcccatctctttggacagtggccaccctgcacaatggggccgacgaggcctagggccctcctacctgcttacaatttggaaaagtgtggccgggtgcggtggctcacgcctgtaatcccagcactttgggaggccaaggcaggaggatcgctggagcccagtaggtcaagaccagccagggcaacatgatgagaccctgtctctgccaaaaaattttttaaactattagcctggcgtggtagcgcacgcctgtggtcccagctgctggggaggctgaagtaggaggatcatttatgcttgggaggtcgaggctgcagtgagtcatgattgtatgactgcactccagcctgggtgacagagcaagaccctgtttcaaaaagaaaaaccctgggaaaagtgaagtatggctgtaagtctcatggttcagtcctagcaagaagcgagaattctgagatcctccagaaagtcgagcagcacccacctccaacctcgggccagtgtcttcaggctttactggggacctgcgagctggcctaatgtggtggcctgcaagccaggccatccctgggcgccacagacgagctccgagccaggtcaggcttcggaggccacaagctcagcctcaggcccaggcactgattgtggcagaggggccactacccaaggtctagctaggcccaagacctagttacccagacagtgagaagcccctggaaggcagaaaagttgggagcatggcagacagggaagggaaacattttcagggaaaagacatgtatcacatgtcttcagaagcaagtcaggtttcatgtaaccgagtgtcctcttgcgtgtccaaaagtagcccagggctgtagcacaggcttcacagtgattttgtgttcagccgtgagtcacactacatgcccccgtgaagctgggcattggtgacgtccaggttgtccttgagtaataaaaacgtatgttgcaaaaaaaaaaaaaaaaaaaaaaaaaaacaaaaacgcgtcgaggacgactatagctgcggcgggcgcgcaaaaaccgagcgcaggaacaggcaccgtgggccacacaggcgtgtcgccggaccccgatttccttgtccaccaggggcaaaaacggcgagccccccaataggggcgcgacaaaaagcgaaaagcgggggtaacgcggag

SEQ ID NO: 306845 - DNA, 3906 bp, Homo sapiens
  misc_feature (3661)..(3661): n is a, c, g, or t
  misc_feature (3667)..(3667): n is a, c, g, or t
cgcgcaagatggcggcgggcccgggcaccgccccttccgccccgccgggcgtcgcacgaggccggctcgaaggggaagtgagtcagtgtccgcggacccggccggcccaggcccgcgcccgccgcggccctgagaggccccggcaggtcccggcccggcggcggcagccatggccggggggccgggcccgggggagcccgcagcccccggcgcccagcacttcttgtacgaggtgccgccctgggtcatgtgccgcttctacaaagtgatggacgccctggagcccgccgactggtgccagttcgccgccctgatcgtgcgcgaccagaccgagctgcggctgtgcgagcgctccgggcagcgcacggccagcgtcctgtggccctggatcaaccgcaacgcccgtgtggccgacctcgtgcacatcctcacgcacctgcagctgctccgtgcgcgggacatcatcacagcctggcaccctcccgccccgcttccgtccccaggcaccactgccccgaggcccagcagcatccctgcacccgccgaggccgaggcctggagcccccggaagttgccatcctcagcctccaccttcctctccccagcttttccaggctcccagacccattcagggcctgagctcggcctggttccaagccctgcttccctgtggcctccaccgccatctccagccccttcttctaccaagccaggcccagagagctcagtgtccctcctgcagggagcccgcccctctccgttttgctggcccctctgtgagatttcccggggcacccacaacttctcggaggagctcaagatcggggagggtggctttgggtgcgtgtaccgggcggtgatgaggaacacggtgtatgctgtgaagaggctgaaggagaacgctgacctggagtggactgcagtgaagcagagcttcctgaccgaggtggagcagctgtccaggtttcgtcacccaaacattgtggactttgctggctactgtgctcagaacggcttctactgcctggtgtacggcttcctgcccaacggctccctggaggaccgtctccactgccagacccaggcctgcccacctctctcctggcctcagcgactggacatccttctgggtacagcccgggcaattcagtttctacatcaggacagccccagcctcatccatggagacatcaagagttccaacgtccttctggatgagaggctgacacccaagctgggagactttggcctggcccggttcagccgctttgccgggtccagccccagccagagcagcatggtggcccggacacagacagtgcggggcaccctggcctacctgcccgaggagtacatcaagacgggaaggctggctgtggacacggacaccttcagctttggggtggtagtgctagagaccttggctggtcagagggctgtgaagacgcacggtgccaggaccaagtatctgaaagacctggtggaagaggaggctgaggaggctggagtggctttgagaagcacccagagcacactgcaagcaggtctggctgcagatgcctgggctgctcccatcgccatgcagatctacaagaagcacctggaccccaggcccgggccctgcccacctgagctgggcctgggcctgggccagctggcctgctgctgcctgcaccgccgggccaaaaggaggcctcctatgacccaggtgtacgagaggctagagaagctgcaggcagtggtggcgggggtgcccgggcatttggaggccgccagctgcatccccccttccccgcaggagaactcctacgtgtccagcactggcagagcccacagtggggctgctccatggcagcccctggcagcgccatcaggagccagtgcccaggcagcagagcagctgcagagaggccccaaccagcccgtggagagtgacgagagcctaggcggcctctctgctgccctgcgctcctggcacttgactccaagctgccctctggacccagcacccctcagggaggccggctgtcctcagggggacacggcaggagaatcgagctgggggagtggcccaggatcccggcccacagccgtggaaggactggcccttggcagctctgcatcatcgtcgtcagagccaccgcagattatcatcaaccctgcccgacagaagatggtccagaagctggccctgtacgaggatggggccctggacagcctgcagctgctgtcgtccagctccctcccaggcttgggcctggaacaggacaggcaggggcccgaagaaagtgatgaatttcagagctgatgtgttcacctgggcagatcccccaaatccggaagtcaaagttctcatggtcagaagttctcatggtgcacgagtcctcagcactctgccggcagtgggggtgggggcccatgcccgcgggggagagaaggaggtggccctgctgttctaggctctgtgggcataggcaggcagagtggaaccctgcctccatgccagcatctgggggcaaggaaggctggcatcatccagtgaggaggctggcgcatgttgggaggctgctggctgcacagacccgtgaggggaggagaggggctgctgtgcaggggtgtggagtagggagctggctcccctgagagccatgcagggcgtctgcagcccaggcctctggcagcagctctttgcccatctctttggacagtggccaccctgcacaatggggccgacgaggcctagggccctcctacctgcttacaatttggaaaagtgtggccgggtgcggtggctcacgcctgtaatcccagcactttgggaggccaaggcaggaggatcgctggagcccagtaggtcaagaccagccagggcaacatgatgagaccctgtctctgccaaaaaattttttaaactattagcctggcgtggtagcgcacgcctgtggtcccagctgctggggaggctgaagtaggaggatcatttatgcttgggaggtcgaggctgcagtgagtcatgattgtatgactgcactccagcctgggtgacagagcaagaccctgtttcaaaaagaaaaaccctgggaaaagtgaagtatggctgtaagtctcatggttcagtcctagcaagaagcgagaattctgagatcctccagaaagtcgagcagcacccacctccaacctcgggccagtgtcttcaggctttactggggacctgcgagctggcctaatgtggtggcctgcaagccaggccatccctgggcgccacagacgagctccgagccaggtcaggcttcggaggccacaagctcagcctcaggcccaggcactgattgtggcagaggggccactacccaaggtctagctaggcccaagacctagttacccagacagtgagaagcccctggaaggcagaaaagttgggagcatggcagacagggaagggaaacattttcagggaaaagacatgtatcacatgtcttcagaagcaagtcaggtttcatgtaaccgagtgtcctcttgcgtgtccaaaagtagcccagggctgtagcacaggcttcacagtgattttgtgttcagccgtgagtcacactacatgcccccgtgaagctgggcattggtgacgtccaggttgtccttgagtaataaaaacgtatgttgcaanaaacanaacaaacccacgcaaccagaatatacccgcccacaactaaacacaccacacacagcgccaacacacacacacacacacggcgcgccaacacaaaacccagcgacacacacaccaacgaccccacaagacccacagcactacaacacccaccacacaaacaccaacaacacagccgccccacacacaacaaacgcacccaacacaacaaccacaacaccaccaccacaccaccacaccac

SEQ ID NO: 306846 - DNA, 3816 bp, Homo sapiens
cgcgcaagatggcggcgggcccgggcaccgccccttccgccccgccgggcgtcgcacgaggccggctcgaaggggaagtgagtcagtgtccgcggacccggccggcccaggcccgcgcccgccgcggccctgagaggccccggcaggtcccggcccggcggcgcccagcacttcttgtacgaggtgccgccctgggtcatgtgccgcttctacaaagtgatggacgccctggagcccgccgactggtgccagttcgccgccctgatcgtgcgcgaccagaccgagctgcggctgtgcgagcgctccgggcagcgcacggccagcgtcctgtggccctggatcaaccgcaacgcccgtgtggccgacctcgtgcacatcctcacgcacctgcagctgctccgtgcgcgggacatcatcacagcctggcaccctcccgccccgcttccgtccccaggcaccactgccccgaggcccagcagcatccctgcacccgccgaggccgaggcctggagcccccggaagttgccatcctcagcctccaccttcctctccccagcttttccaggctcccagacccattcagggcctgagctcggcctggttccaagccctgcttccctgtggcctccaccgccatctccagccccttcttctaccaagccaggcccagagagctcagtgtccctcctgcagggagcccgcccctctccgttttgctggcccctctgtgagatttcccggggcacccacaacttctcggaggagctcaagatcggggagggtggctttgggtgcgtgtaccgggcggtgatgaggaacacggtgtatgctgtgaagaggctgaaggagaacgctgacctggagtggactgcagtgaagcagagcttcctgaccgaggtggagcagctgtccaggtttcgtcacccaaacattgtggactttgctggctactgtgctcagaacggcttctactgcctggtgtacggcttcctgcccaacggctccctggaggaccgtctccactgccagacccaggcctgcccacctctctcctggcctcagcgactggacatccttctgggtacagcccgggcaattcagtttctacatcaggacagccccagcctcatccatggagacatcaagagttccaacgtccttctggatgagaggctgacacccaagctgggagactttggcctggcccggttcagccgctttgccgggtccagccccagccagagcagcatggtggcccggacacagacagtgcggggcaccctggcctacctgcccgaggagtacatcaagacgggaaggctggctgtggacacggacaccttcagctttggggtggtagtgctagagaccttggctggtcagagggctgtgaagacgcacggtgccaggaccaagtatctgaaagacctggtggaagaggaggctgaggaggctggagtggctttgagaagcacccagagcacactgcaagcaggtctggctgcagatgcctgggctgctcccatcgccatgcagatctacaagaagcacctggaccccaggcccgggccctgcccacctgagctgggcctgggcctgggccagctggcctgctgctgcctgcaccgccgggccaaaaggaggcctcctatgacccaggtgtacgagaggctagagaagctgcaggcagtggtggcgggggtgcccgggcatttggaggccgccagctgcatccccccttccccgcaggagaactcctacgtgtccagcactggcagagcccacagtggggctgctccatggcagcccctggcagcgccatcaggagccagtgcccaggcagcagagcagctgcagagaggccccaaccagcccgtggagagtgacgagagcctaggcggcctctctgctgccctgcgctcctggcacttgactccaagctgccctctggacccagcacccctcagggaggccggctgtcctcagggggacacggcaggagaatcgagctgggggagtggcccaggatcccggcccacagccgtggaaggactggcccttggcagctctgcatcatcgtcgtcagagccaccgcagattatcatcaaccctgcccgacagaagatggtccagaagctggccctgtacgaggatggggccctggacagcctgcagctgctgtcgtccagctccctcccaggcttgggcctggaacaggacaggcaggggcccgaagaaagtgatgaatttcagagctgatgtgttcacctgggcagatcccccaaatccggaagtcaaagttctcatggtcagaagttctcatggtgcacgagtcctcagcactctgccggcagtgggggtgggggcccatgcccgcgggggagagaaggaggtggccctgctgttctaggctctgtgggcataggcaggcagagtggaaccctgcctccatgccagcatctgggggcaaggaaggctggcatcatccagtgaggaggctggcgcatgttgggaggctgctggctgcacagacccgtgaggggaggagaggggctgctgtgcaggggtgtggagtagggagctggctcccctgagagccatgcagggcgtctgcagcccaggcctctggcagcagctctttgcccatctctttggacagtggccaccctgcacaatggggccgacgaggcctagggccctcctacctgcttacaatttggaaaagtgtggccgggtgcggtggctcacgcctgtaatcccagcactttgggaggccaaggcaggaggatcgctggagcccagtaggtcaagaccagccagggcaacatgatgagaccctgtctctgccaaaaaattttttaaactattagcctggcgtggtagcgcacgcctgtggtcccagctgctggggaggctgaagtaggaggatcatttatgcttgggaggtcgaggctgcagtgagtcatgattgtatgactgcactccagcctgggtgacagagcaagaccctgtttcaaaaagaaaaaccctgggaaaagtgaagtatggctgtaagtctcatggttcagtcctagcaagaagcgagaattctgagatcctccagaaagtcgagcagcacccacctccaacctcgggccagtgtcttcaggctttactggggacctgcgagctggcctaatgtggtggcctgcaagccaggccatccctgggcgccacagacgagctccgagccaggtcaggcttcggaggccacaagctcagcctcaggcccaggcactgattgtggcagaggggccactacccaaggtctagctaggcccaagacctagttacccagacagtgagaagcccctggaaggcagaaaagttgggagcatggcagacagggaagggaaacattttcagggaaaagacatgtatcacatgtcttcagaagcaagtcaggtttcatgtaaccgagtgtcctcttgcgtgtccaaaagtagcccagggctgtagcacaggcttcacagtgattttgtgttcagccgtgagtcacactacatgcccccgtgaagctgggcattggtgacgtccaggttgtccttgagtaataaaaacgtatgttgcaaaaaaaaaaaaaaaaaaaaaaaaaaacaaaaacgcgtcgaggacgactatagctgcggcgggcgcgcaaaaaccgagcgcaggaacaggcaccgtgggccacacaggcgtgtcgccggaccccgatttccttgtccaccaggggcaaaaacggcgagccccccaataggggcgcgacaaaaagcgaaaagcgggggtaacgcggag

SEQ ID NO: 306847 - DNA, 3322 bp, Homo sapiens
gggaagattcgagacaaggaggaaggaattcagcctttgatgtagcgcagagccccagtcagccaagctgggtcagctgggaggcagctgtggtggggagagcctggagccttgggcagaagggaagagacagggaccccacctgatccaggctctcttcccacagccaggcccagagagctcagtgtccctcctgcagggagcccgcccctctccgttttgctggcccctctgtgagatttcccggggcacccacaacttctcggaggagctcaagatcggggagggtggctttgggtgcgtgtaccgggcggtgatgaggaacacggtgtatgctgtgaagaggctgaaggagaacgctgacctggagtggactgcagtgaagcagagcttcctgaccgaggtggagcagctgtccaggtttcgtcacccaaacattgtggactttgctggctactgtgctcagaacggcttctactgcctggtgtacggcttcctgcccaacggctccctggaggaccgtctccactgccagacccaggcctgcccacctctctcctggcctcagcgactggacatccttctgggtacagcccgggcaattcagtttctacatcaggacagccccagcctcatccatggagacatcaagagttccaacgtccttctggatgagaggctgacacccaagctgggagactttggcctggcccggttcagccgctttgccgggtccagccccagccagagcagcatggtggcccggacacagacagtgcggggcaccctggcctacctgcccgaggagtacatcaagacgggaaggctggctgtggacacggacaccttcagctttggggtggtagtgctagagaccttggctggtcagagggctgtgaagacgcacggtgccaggaccaagtatctgaaagacctggtggaagaggaggctgaggaggctggagtggctttgagaagcacccagagcacactgcaagcaggtctggctgcagatgcctgggctgctcccatcgccatgcagatctacaagaagcacctggaccccaggcccgggccctgcccacctgagctgggcctgggcctgggccagctggcctgctgctgcctgcaccgccgggccaaaaggaggcctcctatgacccaggtgtacgagaggctagagaagctgcaggcagtggtggcgggggtgcccgggcatttggaggccgccagctgcatccccccttccccgcaggagaactcctacgtgtccagcactggcagagcccacagtggggctgctccatggcagcccctggcagcgccatcaggagccagtgcccaggcagcagagcagctgcagagaggccccaaccagcccgtggagagtgacgagagcctaggcggcctctctgctgccctgcgctcctggcacttgactccaagctgccctctggacccagcacccctcagggaggccggctgtcctcagggggacacggcaggagaatcgagctgggggagtggcccaggatcccggcccacagccgtggaaggactggcccttggcagctctgcatcatcgtcgtcagagccaccgcagattatcatcaaccctgcccgacagaagatggtccagaagctggccctgtacgaggatggggccctggacagcctgcagctgctgtcgtccagctccctcccaggcttgggcctggaacaggacaggcaggggcccgaagaaagtgatgaatttcagagctgatgtgttcacctgggcagatcccccaaatccggaagtcaaagttctcatggtcagaagttctcatggtgcacgagtcctcagcactctgccggcagtgggggtgggggcccatgcccgcgggggagagaaggaggtggccctgctgttctaggctctgtgggcataggcaggcagagtggaaccctgcctccatgccagcatctgggggcaaggaaggctggcatcatccagtgaggaggctggcgcatgttgggaggctgctggctgcacagacccgtgaggggaggagaggggctgctgtgcaggggtgtggagtagggagctggctcccctgagagccatgcagggcgtctgcagcccaggcctctggcagcagctctttgcccatctctttggacagtggccaccctgcacaatggggccgacgaggcctagggccctcctacctgcttacaatttggaaaagtgtggccgggtgcggtggctcacgcctgtaatcccagcactttgggaggccaaggcaggaggatcgctggagcccagtaggtcaagaccagccagggcaacatgatgagaccctgtctctgccaaaaaattttttaaactattagcctggcgtggtagcgcacgcctgtggtcccagctgctggggaggctgaagtaggaggatcatttatgcttgggaggtcgaggctgcagtgagtcatgattgtatgactgcactccagcctgggtgacagagcaagaccctgtttcaaaaagaaaaaccctgggaaaagtgaagtatggctgtaagtctcatggttcagtcctagcaagaagcgagaattctgagatcctccagaaagtcgagcagcacccacctccaacctcgggccagtgtcttcaggctttactggggacctgcgagctggcctaatgtggtggcctgcaagccaggccatccctgggcgccacagacgagctccgagccaggtcaggcttcggaggccacaagctcagcctcaggcccaggcactgattgtggcagaggggccactacccaaggtctagctaggcccaagacctagttacccagacagtgagaagcccctggaaggcagaaaagttgggagcatggcagacagggaagggaaacattttcagggaaaagacatgtatcacatgtcttcagaagcaagtcaggtttcatgtaaccgagtgtcctcttgcgtgtccaaaagtagcccagggctgtagcacaggcttcacagtgattttgtgttcagccgtgagtcacactacatgcccccgtgaagctgggcattggtgacgtccaggttgtccttgagtaataaaaacgtatgttgcaaaaaaaaaaaaaaaaaaaaaaaaaaacaaaaacgcgtcgaggacgactatagctgcggcgggcgcgcaaaaaccgagcgcaggaacaggcaccgtgggccacacaggcgtgtcgccggaccccgatttccttgtccaccaggggcaaaaacggcgagccccccaataggggcgcgacaaaaagcgaaaagcgggggtaacgcggag

SEQ ID NO: 306848 - DNA, 3775 bp, Homo sapiens
cgcgcaagatggcggcgggcccgggcaccgccccttccgccccgccgggcgtcgcacgaggccggctcgaaggggaagtgagtcagtgtccgcggacccggccggcccaggcccgcgcccgccgcggccctgagaggccccggcaggtcccggcccggcggcggcagccatggccggggggccgggcccgggggagcccgcagcccccggcgcccagcacttcttgtacgaggtgccgccctgggtcatgtgccgcttctacaaagtgatggacgccctggagcccgccgactggtgccagttcgccgccctgatcgtgcgcgaccagaccgagctgcggctgtgcgagcgctccgggcagcgcacggccagcgtcctgtggccctggatcaaccgcaacgcccgtgtggccgacctcgtgcacatcctcacgcacctgcagctgctccgtgcgcgggacatcatcacagcctggcaccctcccgccccgcttccgtccccaggcaccactgccccgaggcccagcagcatccctgcacccgccgaggccgaggcctggagcccccggaagttgccatcctcagcctccaccttcctctccccagcttttccaggctcccagacccattcagggcctgagctcggcctggttccaagccctgcttccctgtggcctccaccgccatctccagccccttcttctaccaagccaggcccagagagctcagtgtccctcctgcagggagcccgcccctctccgttttgctggcccctctgtgagatttcccggggcacccacaacttctcggaggagctcaagatcggggagggtggctttgggtgcgtgtaccgggcggtgatgaggaacacggtgtatgctgtgaagaggctgaaggagaacgctgacctggagtggactgcagtgaagcagagcttcctgaccgaggtggagcagctgtccaggtttcgtcacccaaacattgtggactttgctggctactgtgctcagaacggcttctactgcctggtgtacggcttcctgcccaacggctccctggaggaccgtctccactgccagacccaggcctgcccacctctctcctggcctcagcgactggacatccttctgggtacagcccgggcaattcagtttctacatcaggacagccccagcctcatccatggagacatcaagagttccaacgtccttctggatgagaggctgacacccaagctgggagactttggcctggcccggttcagccgctttgccgggtccagccccagccagagcagcatggtggcccggacacagacagtgcggggcaccctggcctacctgcccgaggagtacatcaagacgggaaggctggctgtggacacggacaccttcagctttggggtggtagtgctagagaccttggctggtcagagggctgtgaagacgcacggtgccaggaccaagtatctgaaagacctggtggaagaggaggctgaggaggctggagtggctttgagaagcacccagagcacactgcaagcaggtctggctgcagatgcctgggctgctcccatcgccatgcagatctacaagaagcacctggaccccaggcccgggccctgcccacctgagctgggcctgggcctgggccagctggcctgctgctgcctgcaccgccgggccaaaaggaggcctcctatgacccaggagaactcctacgtgtccagcactggcagagcccacagtggggctgctccatggcagcccctggcagcgccatcaggagccagtgcccaggcagcagagcagctgcagagaggccccaaccagcccgtggagagtgacgagagcctaggcggcctctctgctgccctgcgctcctggcacttgactccaagctgccctctggacccagcacccctcagggaggccggctgtcctcagggggacacggcaggagaatcgagctgggggagtggcccaggatcccggcccacagccgtggaaggactggcccttggcagctctgcatcatcgtcgtcagagccaccgcagattatcatcaaccctgcccgacagaagatggtccagaagctggccctgtacgaggatggggccctggacagcctgcagctgctgtcgtccagctccctcccaggcttgggcctggaacaggacaggcaggggcccgaagaaagtgatgaatttcagagctgatgtgttcacctgggcagatcccccaaatccggaagtcaaagttctcatggtcagaagttctcatggtgcacgagtcctcagcactctgccggcagtgggggtgggggcccatgcccgcgggggagagaaggaggtggccctgctgttctaggctctgtgggcataggcaggcagagtggaaccctgcctccatgccagcatctgggggcaaggaaggctggcatcatccagtgaggaggctggcgcatgttgggaggctgctggctgcacagacccgtgaggggaggagaggggctgctgtgcaggggtgtggagtagggagctggctcccctgagagccatgcagggcgtctgcagcccaggcctctggcagcagctctttgcccatctctttggacagtggccaccctgcacaatggggccgacgaggcctagggccctcctacctgcttacaatttggaaaagtgtggccgggtgcggtggctcacgcctgtaatcccagcactttgggaggccaaggcaggaggatcgctggagcccagtaggtcaagaccagccagggcaacatgatgagaccctgtctctgccaaaaaattttttaaactattagcctggcgtggtagcgcacgcctgtggtcccagctgctggggaggctgaagtaggaggatcatttatgcttgggaggtcgaggctgcagtgagtcatgattgtatgactgcactccagcctgggtgacagagcaagaccctgtttcaaaaagaaaaaccctgggaaaagtgaagtatggctgtaagtctcatggttcagtcctagcaagaagcgagaattctgagatcctccagaaagtcgagcagcacccacctccaacctcgggccagtgtcttcaggctttactggggacctgcgagctggcctaatgtggtggcctgcaagccaggccatccctgggcgccacagacgagctccgagccaggtcaggcttcggaggccacaagctcagcctcaggcccaggcactgattgtggcagaggggccactacccaaggtctagctaggcccaagacctagttacccagacagtgagaagcccctggaaggcagaaaagttgggagcatggcagacagggaagggaaacattttcagggaaaagacatgtatcacatgtcttcagaagcaagtcaggtttcatgtaaccgagtgtcctcttgcgtgtccaaaagtagcccagggctgtagcacaggcttcacagtgattttgtgttcagccgtgagtcacactacatgcccccgtgaagctgggcattggtgacgtccaggttgtccttgagtaataaaaacgtatgttgcaaaaaaaaaaaaaaaaaaaaaaaaaaacaaaaacgcgtcgaggacgactatagctgcggcgggcgcgcaaaaaccgagcgcaggaacaggcaccgtgggccacacaggcgtgtcgccggaccccgatttccttgtccaccaggggcaaaaacggcgagccccccaataggggcgcgacaaaaagcgaaaagcgggggtaacgcggag

SEQ ID NO: 306849 - DNA, 3826 bp, Homo sapiens
cgcgcaagatggcggcgggcccgggcaccgccccttccgccccgccgggcgtcgcacgaggccggctcgaaggggaagtgagtcagtgtccgcggacccggccggcccaggcccgcgcccgccgcggccctgagaggccccggcaggtcccggcccggcggcggcagccatggccggggggccgggcccgggggagcccgcagcccccggcgcccagcacttcttgtacgaggtgccgccctgggtcatgtgccgcttctacaaagtgatggacgccctggagcccgccgactggtgccagttcgccgccctgatcgtgcgcgaccagaccgagctgcggctgtgcgagcgctccgggcagcgcacggccagcgtcctgtggccctggatcaaccgcaacgcccgtgtggccgacctcgtgcacatcctcacgcacctgcagctgctccgtgcgcgggacatcatcacagcctggcaccctcccgccccgcttccgtccccaggcaccactgccccgaggcccagcagcatccctgcacccgccgaggccgaggcctggagcccccggaagttgccatcctcagcctccaccttcctctccccagcttttccaggctcccagacccattcagggcctgagctcggcctggttccaagccctgcttccctgtggcctccaccgccatctccagccccttcttctaccaagccaggcccagagagctcagtgtccctcctgcagggagcccgcccctctccgttttgctggcccctctgtgagatttcccggggcacccacaacttctcggaggagctcaagatcggggagggtggctttgggtgcgtgtaccgggcggtgatgaggaacacggtgtatgctgtgaagaggctgaaggagaacgctgacctggagtggactgcagtgaagcagagcttcctgaccgaggtggagcagctgtccaggtttcgtcacccaaacattgtggactttgctggctactgtgctcagaacggcttctactgcctggtgtacggcttcctgcccaacggctccctggaggaccgtctccactgccagacccaggcctgcccacctctctcctggcctcagcgactggacatccttctgggtacagcccgggcaattcagtttctacatcaggacagccccagcctcatccatggagacatcaagagttccaacgtccttctggatgagaggctgacacccaagctgggagactttggcctggcccggttcagccgctttgccgggtccagccccagccagagcagcatggtggcccggacacagacagtgcggggcaccctggcctacctgcccgaggagtacatcaagacgggaaggctggctgtggacacggacaccttcagctttggggtggtagtgctagagaccttggctggtcagagggctgtgaagacgcacggtgccaggaccaagtatctgaaagacctggtggaagaggaggctgaggaggctggagtggctttgagaagcacccagagcacactgcaagcaggtctggctgcagatgcctgggctgctcccatcgccatgcagatctacaagaagcacctgggcctgggccagctggcctgctgctgcctgcaccgccgggccaaaaggaggcctcctatgacccaggtgtacgagaggctagagaagctgcaggcagtggtggcgggggtgcccgggcatttggaggccgccagctgcatccccccttccccgcaggagaactcctacgtgtccagcactggcagagcccacagtggggctgctccatggcagcccctggcagcgccatcaggagccagtgcccaggcagcagagcagctgcagagaggccccaaccagcccgtggagagtgacgagagcctaggcggcctctctgctgccctgcgctcctggcacttgactccaagctgccctctggacccagcacccctcagggaggccggctgtcctcagggggacacggcaggagaatcgagctgggggagtggcccaggatcccggcccacagccgtggaaggactggcccttggcagctctgcatcatcgtcgtcagagccaccgcagattatcatcaaccctgcccgacagaagatggtccagaagctggccctgtacgaggatggggccctggacagcctgcagctgctgtcgtccagctccctcccaggcttgggcctggaacaggacaggcaggggcccgaagaaagtgatgaatttcagagctgatgtgttcacctgggcagatcccccaaatccggaagtcaaagttctcatggtcagaagttctcatggtgcacgagtcctcagcactctgccggcagtgggggtgggggcccatgcccgcgggggagagaaggaggtggccctgctgttctaggctctgtgggcataggcaggcagagtggaaccctgcctccatgccagcatctgggggcaaggaaggctggcatcatccagtgaggaggctggcgcatgttgggaggctgctggctgcacagacccgtgaggggaggagaggggctgctgtgcaggggtgtggagtagggagctggctcccctgagagccatgcagggcgtctgcagcccaggcctctggcagcagctctttgcccatctctttggacagtggccaccctgcacaatggggccgacgaggcctagggccctcctacctgcttacaatttggaaaagtgtggccgggtgcggtggctcacgcctgtaatcccagcactttgggaggccaaggcaggaggatcgctggagcccagtaggtcaagaccagccagggcaacatgatgagaccctgtctctgccaaaaaattttttaaactattagcctggcgtggtagcgcacgcctgtggtcccagctgctggggaggctgaagtaggaggatcatttatgcttgggaggtcgaggctgcagtgagtcatgattgtatgactgcactccagcctgggtgacagagcaagaccctgtttcaaaaagaaaaaccctgggaaaagtgaagtatggctgtaagtctcatggttcagtcctagcaagaagcgagaattctgagatcctccagaaagtcgagcagcacccacctccaacctcgggccagtgtcttcaggctttactggggacctgcgagctggcctaatgtggtggcctgcaagccaggccatccctgggcgccacagacgagctccgagccaggtcaggcttcggaggccacaagctcagcctcaggcccaggcactgattgtggcagaggggccactacccaaggtctagctaggcccaagacctagttacccagacagtgagaagcccctggaaggcagaaaagttgggagcatggcagacagggaagggaaacattttcagggaaaagacatgtatcacatgtcttcagaagcaagtcaggtttcatgtaaccgagtgtcctcttgcgtgtccaaaagtagcccagggctgtagcacaggcttcacagtgattttgtgttcagccgtgagtcacactacatgcccccgtgaagctgggcattggtgacgtccaggttgtccttgagtaataaaaacgtatgttgcaaaaaaaaaaaaaaaaaaaaaaaaaaacaaaaacgcgtcgaggacgactatagctgcggcgggcgcgcaaaaaccgagcgcaggaacaggcaccgtgggccacacaggcgtgtcgccggaccccgatttccttgtccaccaggggcaaaaacggcgagccccccaataggggcgcgacaaaaagcgaaaagcgggggtaacgcggag

SEQ ID NO: 306850 - DNA, 3628 bp, Homo sapiens
cgcgcaagatggcggcgggcccgggcaccgccccttccgccccgccgggcgtcgcacgaggccggctcgaaggggaagtgagtcagtgtccgcggacccggccggcccaggcccgcgcccgccgcggccctgagaggccccggcaggtcccggcccggcggcggcagccatggccggggggccgggcccgggggagcccgcagcccccggcgcccagcacttcttgtacgaggtgccgccctgggtcatgtgccgcttctacaaagtgatggacgccctggagcccgccgactggtgccagttcgccgccctgatcgtgcgcgaccagaccgagctgcggctgtgcgagcgctccgggcagcgcacggccagcgtcctgtggccctggatcaaccgcaacgcccgtgtggccgacctcgtgcacatcctcacgcacctgcagctgctccgtgcgcgggacatcatcacagcctggcaccctcccgccccgcttccgtccccaggcaccactgccccgaggcccagcagcatccctgcacccgccgaggccgaggcctggagcccccggaagttgccatcctcagcctccaccttcctctccccagcttttccaggctcccagacccattcagggcctgagctcggcctggttccaagccctgcttccctgtggcctccaccgccatctccagccccttcttctaccaagccaggcccagagagctcagtgtccctcctgcagggagcccgcccctctccgttttgctggcccctctgtgagatttcccggggcacccacaacttctcggaggagctcaagatcggggagggtggctttgggtgcgtgtaccgggcggtgatgaggaacacggtgtatgctgtgaagaggctgaaggagaacgctgacctggagtggactgcagtgaagcagagcttcctgaccgaggtggagcagctgtccaggtttcgtcacccaaacattgtggactttgctggctactgtgctcagaacggcttctactgcctggtgtacggcttcctgcccaacggctccctggaggaccgtctccactgccagacccaggcctgcccacctctctcctggcctcagcgactggacatccttctgggtacagcccgggcaattcagtttctacatcaggacagccccagcctcatccatggagacatcaagagttccaacgtccttctggatgagaggctgacacccaagctgggagactttggcctggcccggttcagccgctttgccgggtccagccccagccagagcagcatggtggcccggacacagacagtgcggggcaccctggcctacctgcccgaggagtacatcaagacgggaaggctggctgtggacacggacaccttcagctttggggtggtagtgctagagaccttggctggtcagagggctgtgaagacgcacggtgccaggaccaagtatctggtgtacgagaggctagagaagctgcaggcagtggtggcgggggtgcccgggcatttggaggccgccagctgcatccccccttccccgcaggagaactcctacgtgtccagcactggcagagcccacagtggggctgctccatggcagcccctggcagcgccatcaggagccagtgcccaggcagcagagcagctgcagagaggccccaaccagcccgtggagagtgacgagagcctaggcggcctctctgctgccctgcgctcctggcacttgactccaagctgccctctggacccagcacccctcagggaggccggctgtcctcagggggacacggcaggagaatcgagctgggggagtggcccaggatcccggcccacagccgtggaaggactggcccttggcagctctgcatcatcgtcgtcagagccaccgcagattatcatcaaccctgcccgacagaagatggtccagaagctggccctgtacgaggatggggccctggacagcctgcagctgctgtcgtccagctccctcccaggcttgggcctggaacaggacaggcaggggcccgaagaaagtgatgaatttcagagctgatgtgttcacctgggcagatcccccaaatccggaagtcaaagttctcatggtcagaagttctcatggtgcacgagtcctcagcactctgccggcagtgggggtgggggcccatgcccgcgggggagagaaggaggtggccctgctgttctaggctctgtgggcataggcaggcagagtggaaccctgcctccatgccagcatctgggggcaaggaaggctggcatcatccagtgaggaggctggcgcatgttgggaggctgctggctgcacagacccgtgaggggaggagaggggctgctgtgcaggggtgtggagtagggagctggctcccctgagagccatgcagggcgtctgcagcccaggcctctggcagcagctctttgcccatctctttggacagtggccaccctgcacaatggggccgacgaggcctagggccctcctacctgcttacaatttggaaaagtgtggccgggtgcggtggctcacgcctgtaatcccagcactttgggaggccaaggcaggaggatcgctggagcccagtaggtcaagaccagccagggcaacatgatgagaccctgtctctgccaaaaaattttttaaactattagcctggcgtggtagcgcacgcctgtggtcccagctgctggggaggctgaagtaggaggatcatttatgcttgggaggtcgaggctgcagtgagtcatgattgtatgactgcactccagcctgggtgacagagcaagaccctgtttcaaaaagaaaaaccctgggaaaagtgaagtatggctgtaagtctcatggttcagtcctagcaagaagcgagaattctgagatcctccagaaagtcgagcagcacccacctccaacctcgggccagtgtcttcaggctttactggggacctgcgagctggcctaatgtggtggcctgcaagccaggccatccctgggcgccacagacgagctccgagccaggtcaggcttcggaggccacaagctcagcctcaggcccaggcactgattgtggcagaggggccactacccaaggtctagctaggcccaagacctagttacccagacagtgagaagcccctggaaggcagaaaagttgggagcatggcagacagggaagggaaacattttcagggaaaagacatgtatcacatgtcttcagaagcaagtcaggtttcatgtaaccgagtgtcctcttgcgtgtccaaaagtagcccagggctgtagcacaggcttcacagtgattttgtgttcagccgtgagtcacactacatgcccccgtgaagctgggcattggtgacgtccaggttgtccttgagtaataaaaacgtatgttgcaaaaaaaaaaaaaaaaaaaaaaaaaaacaaaaacgcgtcgaggacgactatagctgcggcgggcgcgcaaaaaccgagcgcaggaacaggcaccgtgggccacacaggcgtgtcgccggaccccgatttccttgtccaccaggggcaaaaacggcgagccccccaataggggcgcgacaaaaagcgaaaagcgggggtaacgcggag

SEQ ID NO: 306851 - DNA, 3826 bp, Homo sapiens
cgcgcaagatggcggcgggcccgggcaccgccccttccgccccgccgggcgtcgcacgaggccggctcgaaggggaagtgagtcagtgtccgcggacccggccggcccaggcccgcgcccgccgcggccctgagaggccccggcaggtcccggcccggcggcggcagccatggccggggggccgggcccgggggagcccgcagcccccggcgcccagcacttcttgtacgaggtgccgccctgggtcatgtgccgcttctacaaagtgatggacgccctggagcccgccgactggtgccagttcgccgccctgatcgtgcgcgaccagaccgagctgcggctgtgcgagcgctccgggcagcgcacggccagcgtcctgtggccctggatcaaccgcaacgcccgtgtggccgacctcgtgcacatcctcacgcacctgcagctgctccgtgcgcgggacatcatcacagcctggcaccctcccgccccgcttccgtccccaggcaccactgccccgaggcccagcagcatccctgcacccgccgaggccgaggcctggagcccccggaagttgccatcctcagcctccaccttcctctccccagcttttccaggctcccagacccattcagggcctgagctcggcctggttccaagccctgcttccctgtggcctccaccgccatctccagccccttcttctaccaagccaggcccagagagctcagtgtccctcctgcagggagcccgcccctctccgttttgctggcccctctgtgagatttcccggggcacccacaacttctcggaggagctcaagatcggggagggtggctttgggtgcgtgtaccgggcggtgatgaggaacacggtgtatgctgtgaagaggctgaaggagaacgctgacctggagtggactgcagtgaagcagagcttcctgaccgaggtggagcagctgtccaggtttcgtcacccaaacattgtggactttgctggctactgtgctcagaacggcttctactgcctggtgtacggcttcacccaggcctgcccacctctctcctggcctcagcgactggacatccttctgggtacagcccgggcaattcagtttctacatcaggacagccccagcctcatccatggagacatcaagagttccaacgtccttctggatgagaggctgacacccaagctgggagactttggcctggcccggttcagccgctttgccgggtccagccccagccagagcagcatggtggcccggacacagacagtgcggggcaccctggcctacctgcccgaggagtacatcaagacgggaaggctggctgtggacacggacaccttcagctttggggtggtagtgctagagaccttggctggtcagagggctgtgaagacgcacggtgccaggaccaagtatctgaaagacctggtggaagaggaggctgaggaggctggagtggctttgagaagcacccagagcacactgcaagcaggtctggctgcagatgcctgggctgctcccatcgccatgcagatctacaagaagcacctggaccccaggcccgggccctgcccacctgagctgggcctgggcctgggccagctggcctgctgctgcctgcaccgccgggccaaaaggaggcctcctatgacccaggtgtacgagaggctagagaagctgcaggcagtggtggcgggggtgcccgggcatttggaggccgccagctgcatccccccttccccgcaggagaactcctacgtgtccagcactggcagagcccacagtggggctgctccatggcagcccctggcagcgccatcaggagccagtgcccaggcagcagagcagctgcagagaggccccaaccagcccgtggagagtgacgagagcctaggcggcctctctgctgccctgcgctcctggcacttgactccaagctgccctctggacccagcacccctcagggaggccggctgtcctcagggggacacggcaggagaatcgagctgggggagtggcccaggatcccggcccacagccgtggaaggactggcccttggcagctctgcatcatcgtcgtcagagccaccgcagattatcatcaaccctgcccgacagaagatggtccagaagctggccctgtacgaggatggggccctggacagcctgcagctgctgtcgtccagctccctcccaggcttgggcctggaacaggacaggcaggggcccgaagaaagtgatgaatttcagagctgatgtgttcacctgggcagatcccccaaatccggaagtcaaagttctcatggtcagaagttctcatggtgcacgagtcctcagcactctgccggcagtgggggtgggggcccatgcccgcgggggagagaaggaggtggccctgctgttctaggctctgtgggcataggcaggcagagtggaaccctgcctccatgccagcatctgggggcaaggaaggctggcatcatccagtgaggaggctggcgcatgttgggaggctgctggctgcacagacccgtgaggggaggagaggggctgctgtgcaggggtgtggagtagggagctggctcccctgagagccatgcagggcgtctgcagcccaggcctctggcagcagctctttgcccatctctttggacagtggccaccctgcacaatggggccgacgaggcctagggccctcctacctgcttacaatttggaaaagtgtggccgggtgcggtggctcacgcctgtaatcccagcactttgggaggccaaggcaggaggatcgctggagcccagtaggtcaagaccagccagggcaacatgatgagaccctgtctctgccaaaaaattttttaaactattagcctggcgtggtagcgcacgcctgtggtcccagctgctggggaggctgaagtaggaggatcatttatgcttgggaggtcgaggctgcagtgagtcatgattgtatgactgcactccagcctgggtgacagagcaagaccctgtttcaaaaagaaaaaccctgggaaaagtgaagtatggctgtaagtctcatggttcagtcctagcaagaagcgagaattctgagatcctccagaaagtcgagcagcacccacctccaacctcgggccagtgtcttcaggctttactggggacctgcgagctggcctaatgtggtggcctgcaagccaggccatccctgggcgccacagacgagctccgagccaggtcaggcttcggaggccacaagctcagcctcaggcccaggcactgattgtggcagaggggccactacccaaggtctagctaggcccaagacctagttacccagacagtgagaagcccctggaaggcagaaaagttgggagcatggcagacagggaagggaaacattttcagggaaaagacatgtatcacatgtcttcagaagcaagtcaggtttcatgtaaccgagtgtcctcttgcgtgtccaaaagtagcccagggctgtagcacaggcttcacagtgattttgtgttcagccgtgagtcacactacatgcccccgtgaagctgggcattggtgacgtccaggttgtccttgagtaataaaaacgtatgttgcaaaaaaaaaaaaaaaaaaaaaaaaaaacaaaaacgcgtcgaggacgactatagctgcggcgggcgcgcaaaaaccgagcgcaggaacaggcaccgtgggccacacaggcgtgtcgccggaccccgatttccttgtccaccaggggcaaaaacggcgagccccccaataggggcgcgacaaaaagcgaaaagcgggggtaacgcggag

SEQ ID NO: 306852 - DNA, 4204 bp, Homo sapiens
cgcgcaagatggcggcgggcccgggcaccgccccttccgccccgccgggcgtcgcacgaggccggctcgaaggggaagtgagtcagtgtccgcggacccggccggcccaggcccgcgcccgccgcggccctgagaggccccggcaggtcccggcccggcggcggcagccatggccggggggccgggcccgggggagcccgcagcccccggcgcccagcacttcttgtacgaggtgccgccctgggtcatgtgccgcttctacaaagtgatggacgccctggagcccgccgactggtgccagttcgccgccctgatcgtgcgcgaccagaccgagctgcggctgtgcgagcgctccgggcagcgcacggccagcgtcctgtggccctggatcaaccgcaacgcccgtgtggccgacctcgtgcacatcctcacgcacctgcagctgctccgtgcgcgggacatcatcacagcctggcaccctcccgccccgcttccgtccccaggcaccactgccccgaggcccagcagcatccctgcacccgccgaggccgaggcctggagcccccggaagttgccatcctcagcctccaccttcctctccccagcttttccaggctcccagacccattcagggcctgagctcggcctggttccaagccctgcttccctgtggcctccaccgccatctccagccccttcttctaccaagccaggcccagagagctcagtgtccctcctgcagggagcccgcccctctccgttttgctggcccctctgtgagatttcccggggcacccacaacttctcggaggagctcaagatcggggagggtggctttgggtgcgtgtaccgggcggtgatgaggaacacggtgtatgctgtgaagaggctgaaggagaacgctgacctggagtggactgcagtgaagcagagcttcctgaccgaggtggagcagctgtccaggtttcgtcacccaaacattgtggactttgctggctactgtgctcagaacggcttctactgcctggtgtacggcttcctgcccaacggctccctggaggaccgtctccactgccagacccaggcctgcccacctctctcctggcctcagcgactggacatccttctgggtacagcccgggcaattcagtttctacatcaggacagccccagcctcatccatggagacatcaagagttccaacgtccttctggatgagaggctgacacccaagctgggagactttggcctggcccggttcagccgctttgccgggtccagccccagccagagcagcatggtggcccggacacagacagtgcggggcaccctggcctacctgcccgaggagtacatcaagacgggaaggctggctgtggacacggacaccttcagctttggggtggtgagccactgacccctctgctggctcagaggaggagaagccacaggcaggcagaggtgggggctgcagagtgcactgcgggccaggggccatctgccaagaccccaggaggctgcagctccagggtccccctccctccgaggccctcctcctcaccctgcacctaactgtgtgtttgtaatttgtcttcaagtgggctctccgagttgcccgagcttcagtcccataacatctggctctgcctttgtccacacccttgtcaggcccaatccatgtccacaccagaggcctcttccctgccaaggccactgccatgctctccctcttccctctctccaggtagtgctagagaccttggctggtcagagggctgtgaagacgcacggtgccaggaccaagtatctgaaagacctggtggaagaggaggctgaggaggctggagtggctttgagaagcacccagagcacactgcaagcaggtctggctgcagatgcctgggctgctcccatcgccatgcagatctacaagaagcacctggaccccaggcccgggccctgcccacctgagctgggcctgggcctgggccagctggcctgctgctgcctgcaccgccgggccaaaaggaggcctcctatgacccaggtgtacgagaggctagagaagctgcaggcagtggtggcgggggtgcccgggcatttggaggccgccagctgcatccccccttccccgcaggagaactcctacgtgtccagcactggcagagcccacagtggggctgctccatggcagcccctggcagcgccatcaggagccagtgcccaggcagcagagcagctgcagagaggccccaaccagcccgtggagagtgacgagagcctaggcggcctctctgctgccctgcgctcctggcacttgactccaagctgccctctggacccagcacccctcagggaggccggctgtcctcagggggacacggcaggagaatcgagctgggggagtggcccaggatcccggcccacagccgtggaaggactggcccttggcagctctgcatcatcgtcgtcagagccaccgcagattatcatcaaccctgcccgacagaagatggtccagaagctggccctgtacgaggatggggccctggacagcctgcagctgctgtcgtccagctccctcccaggcttgggcctggaacaggacaggcaggggcccgaagaaagtgatgaatttcagagctgatgtgttcacctgggcagatcccccaaatccggaagtcaaagttctcatggtcagaagttctcatggtgcacgagtcctcagcactctgccggcagtgggggtgggggcccatgcccgcgggggagagaaggaggtggccctgctgttctaggctctgtgggcataggcaggcagagtggaaccctgcctccatgccagcatctgggggcaaggaaggctggcatcatccagtgaggaggctggcgcatgttgggaggctgctggctgcacagacccgtgaggggaggagaggggctgctgtgcaggggtgtggagtagggagctggctcccctgagagccatgcagggcgtctgcagcccaggcctctggcagcagctctttgcccatctctttggacagtggccaccctgcacaatggggccgacgaggcctagggccctcctacctgcttacaatttggaaaagtgtggccgggtgcggtggctcacgcctgtaatcccagcactttgggaggccaaggcaggaggatcgctggagcccagtaggtcaagaccagccagggcaacatgatgagaccctgtctctgccaaaaaattttttaaactattagcctggcgtggtagcgcacgcctgtggtcccagctgctggggaggctgaagtaggaggatcatttatgcttgggaggtcgaggctgcagtgagtcatgattgtatgactgcactccagcctgggtgacagagcaagaccctgtttcaaaaagaaaaaccctgggaaaagtgaagtatggctgtaagtctcatggttcagtcctagcaagaagcgagaattctgagatcctccagaaagtcgagcagcacccacctccaacctcgggccagtgtcttcaggctttactggggacctgcgagctggcctaatgtggtggcctgcaagccaggccatccctgggcgccacagacgagctccgagccaggtcaggcttcggaggccacaagctcagcctcaggcccaggcactgattgtggcagaggggccactacccaaggtctagctaggcccaagacctagttacccagacagtgagaagcccctggaaggcagaaaagttgggagcatggcagacagggaagggaaacattttcagggaaaagacatgtatcacatgtcttcagaagcaagtcaggtttcatgtaaccgagtgtcctcttgcgtgtccaaaagtagcccagggctgtagcacaggcttcacagtgattttgtgttcagccgtgagtcacactacatgcccccgtgaagctgggcattggtgacgtccaggttgtccttgagtaataaaaacgtatgttgcaaaaaaaaaaaaaaaaaaaaaaaaaaacaaaaacgcgtcgaggacgactatagctgcggcgggcgcgcaaaaaccgagcgcaggaacaggcaccgtgggccacacaggcgtgtcgccggaccccgatttccttgtccaccaggggcaaaaacggcgagccccccaataggggcgcgacaaaaagcgaaaagcgggggtaacgcggag

SEQ ID NO: 306853 - DNA, 2493 bp, Homo sapiens
ttttttatcaaaacccatacgattgagtgacaaggacctgaggactgcagctgcaggtgtggccacctggtagccatactgacagtatttatcccacagaaagacctggtggaagaggaggctgaggaggctggagtggctttgagaagcacccagagcacactgcaagcaggtctggctgcagatgcctgggctgctcccatcgccatgcagatctacaagaagcacctggaccccaggcccgggccctgcccacctgagctgggcctgggcctgggccagctggcctgctgctgcctgcaccgccgggccaaaaggaggcctcctatgacccaggtgtacgagaggctagagaagctgcaggcagtggtggcgggggtgcccgggcatttggaggccgccagctgcatccccccttccccgcaggagaactcctacgtgtccagcactggcagagcccacagtggggctgctccatggcagcccctggcagcgccatcaggagccagtgcccaggcagcagagcagctgcagagaggccccaaccagcccgtggagagtgacgagagcctaggcggcctctctgctgccctgcgctcctggcacttgactccaagctgccctctggacccagcacccctcagggaggccggctgtcctcagggggacacggcaggagaatcgagctgggggagtggcccaggatcccggcccacagccgtggaaggactggcccttggcagctctgcatcatcgtcgtcagagccaccgcagattatcatcaaccctgcccgacagaagatggtccagaagctggccctgtacgaggatggggccctggacagcctgcagctgctgtcgtccagctccctcccaggcttgggcctggaacaggacaggcaggggcccgaagaaagtgatgaatttcagagctgatgtgttcacctgggcagatcccccaaatccggaagtcaaagttctcatggtcagaagttctcatggtgcacgagtcctcagcactctgccggcagtgggggtgggggcccatgcccgcgggggagagaaggaggtggccctgctgttctaggctctgtgggcataggcaggcagagtggaaccctgcctccatgccagcatctgggggcaaggaaggctggcatcatccagtgaggaggctggcgcatgttgggaggctgctggctgcacagacccgtgaggggaggagaggggctgctgtgcaggggtgtggagtagggagctggctcccctgagagccatgcagggcgtctgcagcccaggcctctggcagcagctctttgcccatctctttggacagtggccaccctgcacaatggggccgacgaggcctagggccctcctacctgcttacaatttggaaaagtgtggccgggtgcggtggctcacgcctgtaatcccagcactttgggaggccaaggcaggaggatcgctggagcccagtaggtcaagaccagccagggcaacatgatgagaccctgtctctgccaaaaaattttttaaactattagcctggcgtggtagcgcacgcctgtggtcccagctgctggggaggctgaagtaggaggatcatttatgcttgggaggtcgaggctgcagtgagtcatgattgtatgactgcactccagcctgggtgacagagcaagaccctgtttcaaaaagaaaaaccctgggaaaagtgaagtatggctgtaagtctcatggttcagtcctagcaagaagcgagaattctgagatcctccagaaagtcgagcagcacccacctccaacctcgggccagtgtcttcaggctttactggggacctgcgagctggcctaatgtggtggcctgcaagccaggccatccctgggcgccacagacgagctccgagccaggtcaggcttcggaggccacaagctcagcctcaggcccaggcactgattgtggcagaggggccactacccaaggtctagctaggcccaagacctagttacccagacagtgagaagcccctggaaggcagaaaagttgggagcatggcagacagggaagggaaacattttcagggaaaagacatgtatcacatgtcttcagaagcaagtcaggtttcatgtaaccgagtgtcctcttgcgtgtccaaaagtagcccagggctgtagcacaggcttcacagtgattttgtgttcagccgtgagtcacactacatgcccccgtgaagctgggcattggtgacgtccaggttgtccttgagtaataaaaacgtatgttgcaaaaaaaaaaaaaaaaaaaaaaaaaaacaaaaacgcgtcgaggacgactatagctgcggcgggcgcgcaaaaaccgagcgcaggaacaggcaccgtgggccacacaggcgtgtcgccggaccccgatttccttgtccaccaggggcaaaaacggcgagccccccaataggggcgcgacaaaaagcgaaaagcgggggtaacgcggag

SEQ ID NO: 306854 - DNA, 3715 bp, Homo sapiens
cgcgcaagatggcggcgggcccgggcaccgccccttccgccccgccgggcgtcgcacgaggccggctcgaaggggaagtgagtcagtgtccgcggacccggccggcccaggcccgcgcccgccgcggccctgagaggccccggcaggtcccggcccggcggcggcagccatggccggggggccgggcccgggggagcccgcagcccccggcgcccagcacttcttgtacgaggtgccgccctgggtcatgtgccgcttctacaaagtgatggacgccctggagcccgccgactggtgccagttcgccgccctgatcgtgcgcgaccagaccgagctgcggctgtgcgagcgctccgggcagcgcacggccagcgtcctgtggccctggatcaaccgcaacgcccgtgtggccgacctcgtgcacatcctcacgcacctgcagctgctccgtgcgcgggacatcatcacagcctggcaccctcccgccccgcttccgtccccaggcaccactgccccgaggcccagcagcatccctgcacccgccgaggccgaggcctggagcccccggaagttgccatcctcagcctccaccttcctctccccagcttttccaggctcccagacccattcagggcctgagctcggcctggttccaagccctgcttccctgtggcctccaccgccatctccagccccttcttctaccaagccaggcccagagagctcagtgtccctcctgcagggagcccgcccctctccgttttgctggcccctctgtgagatttcccggggcacccacaacttctcggaggagctcaagatcggggagggtggctttgggtgcgtgtaccgggcggtgatgaggaacacggtgtatgctgtgaagaggctgaaggagaacgctgacctggagtggactgcagtgaagcagagcttcctgaccgaggtggagcagctgtccaggtttcgtcacccaaacattgtggactttgctggctactgtgctcagaacggcttctactgcctggtgtacggcttcctgcccaacggctccctggaggaccgtctccactgccagacccaggcctgcccacctctctcctggcctcagcgactggacatccttctgggtacagcccgggcaattcagtttctacatcaggacagccccagcctcatccatggagacatcaagagttccaacgtccttctggatgagaggctgacacccaagctgggagactttggcctggcccggttcagccgctttgccgggtccagccccagccagagcagcatggtggcccggacacagacagtgcggggcaccctggcctacctgcccgaggagtacatcaagacgggaaggctggctgtggacacggacaccttcagctttggggtggtagtgctagagaccttggctggtcagagggctgtgaagacgcacggtgccaggaccaagtatctgaaagacctggtggaagaggaggctgaggaggctggagtggctttgagaagcacccagagcacactgcaagcaggtctggctgcagatgcctgggctgctcccatcgccatgcagatctacaagaagcacctggaccccaggcccgggccctgcccacctgagctgggcctgggcctgggccagctggcctgctgctgcctgcaccgccgggccaaaaggaggcctcctatgacccaggtgtacgagaggctagagaagctgcaggcagtggtggcgggggtgcccgggcatttggaggccgccagctgcatccccccttccccgcaggagaactcctacgtgtccagcactggcagagcccacagtggggctgctccatggcagcccctggcagcgccatcaggagccagtgcccaggcagcagagcagctgcagagaggccccaaccagcccgtggagagtgacgagagcctaggcggcctctctgctgccctgcgctcctggcacttgactccaagctgccctctggacccagcacccctcagggaggccggctgtcctcagggggacacggcaggagaatcgagctgggggagtggcccaggatcccggcccacagccgtggaaggcttgggcctggaacaggacaggcaggggcccgaagaaagtgatgaatttcagagctgatgtgttcacctgggcagatcccccaaatccggaagtcaaagttctcatggtcagaagttctcatggtgcacgagtcctcagcactctgccggcagtgggggtgggggcccatgcccgcgggggagagaaggaggtggccctgctgttctaggctctgtgggcataggcaggcagagtggaaccctgcctccatgccagcatctgggggcaaggaaggctggcatcatccagtgaggaggctggcgcatgttgggaggctgctggctgcacagacccgtgaggggaggagaggggctgctgtgcaggggtgtggagtagggagctggctcccctgagagccatgcagggcgtctgcagcccaggcctctggcagcagctctttgcccatctctttggacagtggccaccctgcacaatggggccgacgaggcctagggccctcctacctgcttacaatttggaaaagtgtggccgggtgcggtggctcacgcctgtaatcccagcactttgggaggccaaggcaggaggatcgctggagcccagtaggtcaagaccagccagggcaacatgatgagaccctgtctctgccaaaaaattttttaaactattagcctggcgtggtagcgcacgcctgtggtcccagctgctggggaggctgaagtaggaggatcatttatgcttgggaggtcgaggctgcagtgagtcatgattgtatgactgcactccagcctgggtgacagagcaagaccctgtttcaaaaagaaaaaccctgggaaaagtgaagtatggctgtaagtctcatggttcagtcctagcaagaagcgagaattctgagatcctccagaaagtcgagcagcacccacctccaacctcgggccagtgtcttcaggctttactggggacctgcgagctggcctaatgtggtggcctgcaagccaggccatccctgggcgccacagacgagctccgagccaggtcaggcttcggaggccacaagctcagcctcaggcccaggcactgattgtggcagaggggccactacccaaggtctagctaggcccaagacctagttacccagacagtgagaagcccctggaaggcagaaaagttgggagcatggcagacagggaagggaaacattttcagggaaaagacatgtatcacatgtcttcagaagcaagtcaggtttcatgtaaccgagtgtcctcttgcgtgtccaaaagtagcccagggctgtagcacaggcttcacagtgattttgtgttcagccgtgagtcacactacatgcccccgtgaagctgggcattggtgacgtccaggttgtccttgagtaataaaaacgtatgttgcaaaaaaaaaaaaaaaaaaaaaaaaaaacaaaaacgcgtcgaggacgactatagctgcggcgggcgcgcaaaaaccgagcgcaggaacaggcaccgtgggccacacaggcgtgtcgccggaccccgatttccttgtccaccaggggcaaaaacggcgagccccccaataggggcgcgacaaaaagcgaaaagcgggggtaacgcggag

SEQ ID NO: 306855 - DNA, 2458 bp, Homo sapiens
  misc_feature (76)..(76): n is a, c, g, or t
  misc_feature (78)..(78): n is a, c, g, or t
  misc_feature (84)..(84): n is a, c, g, or t
  misc_feature (86)..(87): n is a, c, g, or t
ggcacgaggagagagagagagagagagagagagagagagagagagagagagagagagagagagagcgagcgccttnanctttgngnnggtagtgctagagaccttggctggtcagagggctgtgaagacgcacggtgccaggaccaagtatctgaaagacctggtggaagaggaggctgaggaggctggagtggctttgagaagcacccagagcacactgcaagcaggtctggctgcagatgcctgggctgctcccatcgccatgcagatctacaagaagcacctggaccccaggcccgggccctgcccacctgagctgggcctgggcctgggccagctggcctgctgctgcctgcaccgccgggccaaaaggaggcctcctatgacccaggagaactcctacgtgtccagcactggcagagcccacagtggggctgctccatggcagcccctggcagcgccatcaggagccagtgcccaggcagcagagcagctgcagagaggccccaaccagcccgtggagagtgacgagagcctaggcggcctctctgctgccctgcgctcctggcacttgactccaagctgccctctggacccagcacccctcagggaggccggctgtcctcagggggacacggcaggagaatcgagctgggggagtggcccaggatcccggcccacagccgtggaaggactggcccttggcagctctgcatcatcgtcgtcagagccaccgcagattatcatcaaccctgcccgacagaagatggtccagaagctggccctgtacgaggatggggccctggacagcctgcagctgctgtcgtccagctccctcccaggcttgggcctggaacaggacaggcaggggcccgaagaaagtgatgaatttcagagctgatgtgttcacctgggcagatcccccaaatccggaagtcaaagttctcatggtcagaagttctcatggtgcacgagtcctcagcactctgccggcagtgggggtgggggcccatgcccgcgggggagagaaggaggtggccctgctgttctaggctctgtgggcataggcaggcagagtggaaccctgcctccatgccagcatctgggggcaaggaaggctggcatcatccagtgaggaggctggcgcatgttgggaggctgctggctgcacagacccgtgaggggaggagaggggctgctgtgcaggggtgtggagtagggagctggctcccctgagagccatgcagggcgtctgcagcccaggcctctggcagcagctctttgcccatctctttggacagtggccaccctgcacaatggggccgacgaggcctagggccctcctacctgcttacaatttggaaaagtgtggccgggtgcggtggctcacgcctgtaatcccagcactttgggaggccaaggcaggaggatcgctggagcccagtaggtcaagaccagccagggcaacatgatgagaccctgtctctgccaaaaaattttttaaactattagcctggcgtggtagcgcacgcctgtggtcccagctgctggggaggctgaagtaggaggatcatttatgcttgggaggtcgaggctgcagtgagtcatgattgtatgactgcactccagcctgggtgacagagcaagaccctgtttcaaaaagaaaaaccctgggaaaagtgaagtatggctgtaagtctcatggttcagtcctagcaagaagcgagaattctgagatcctccagaaagtcgagcagcacccacctccaacctcgggccagtgtcttcaggctttactggggacctgcgagctggcctaatgtggtggcctgcaagccaggccatccctgggcgccacagacgagctccgagccaggtcaggcttcggaggccacaagctcagcctcaggcccaggcactgattgtggcagaggggccactacccaaggtctagctaggcccaagacctagttacccagacagtgagaagcccctggaaggcagaaaagttgggagcatggcagacagggaagggaaacattttcagggaaaagacatgtatcacatgtcttcagaagcaagtcaggtttcatgtaaccgagtgtcctcttgcgtgtccaaaagtagcccagggctgtagcacaggcttcacagtgattttgtgttcagccgtgagtcacactacatgcccccgtgaagctgggcattggtgacgtccaggttgtccttgagtaataaaaacgtatgttgcaaaaaaaaaaaaaaaaaaaaaaaaaaacaaaaacgcgtcgaggacgactatagctgcggcgggcgcgcaaaaaccgagcgcaggaacaggcaccgtgggccacacaggcgtgtcgccggaccccgatttccttgtccaccaggggcaaaaacggcgagccccccaataggggcgcgacaaaaagcgaaaagcgggggtaacgcggag

SEQ ID NO: 306856 - DNA, 2215 bp, Homo sapiens
  misc_feature (14)..(14): n is a, c, g, or t
  misc_feature (23)..(23): n is a, c, g, or t
atgcatggtgtacncccggattntggatatgtcgaccacgcctcgctcctatgaccaggtgtacgagaggctagagaagctgcaggcagtggtggcgggggtgcccgggcatttggaggccgccagctgcatccccccttccccgcaggagaactcctacgtgtccagcactggcagagcccacagtggggctgctccatggcagcccctggcagcgccatcaggagccagtgcccaggcagcagagcagctgcagagaggccccaaccagcccgtggagagtgacgagagcctaggcggcctctctgctgccctgcgctcctggcacttgactccaagctgccctctggacccagcacccctcagggaggccggctgtcctcagggggacacggcaggagaatcgagctgggggagtggcccaggatcccggcccacagccgtggaaggactggcccttggcagctctgcatcatcgtcgtcagagccaccgcagattatcatcaaccctgcccgacagaagatggtccagaagctggccctgtacgaggatggggccctggacagcctgcagctgctgtcgtccagctccctcccaggcttgggcctggaacaggacaggcaggggcccgaagaaagtgatgaatttcagagctgatgtgttcacctgggcagatcccccaaatccggaagtcaaagttctcatggtcagaagttctcatggtgcacgagtcctcagcactctgccggcagtgggggtgggggcccatgcccgcgggggagagaaggaggtggccctgctgttctaggctctgtgggcataggcaggcagagtggaaccctgcctccatgccagcatctgggggcaaggaaggctggcatcatccagtgaggaggctggcgcatgttgggaggctgctggctgcacagacccgtgaggggaggagaggggctgctgtgcaggggtgtggagtagggagctggctcccctgagagccatgcagggcgtctgcagcccaggcctctggcagcagctctttgcccatctctttggacagtggccaccctgcacaatggggccgacgaggcctagggccctcctacctgcttacaatttggaaaagtgtggccgggtgcggtggctcacgcctgtaatcccagcactttgggaggccaaggcaggaggatcgctggagcccagtaggtcaagaccagccagggcaacatgatgagaccctgtctctgccaaaaaattttttaaactattagcctggcgtggtagcgcacgcctgtggtcccagctgctggggaggctgaagtaggaggatcatttatgcttgggaggtcgaggctgcagtgagtcatgattgtatgactgcactccagcctgggtgacagagcaagaccctgtttcaaaaagaaaaaccctgggaaaagtgaagtatggctgtaagtctcatggttcagtcctagcaagaagcgagaattctgagatcctccagaaagtcgagcagcacccacctccaacctcgggccagtgtcttcaggctttactggggacctgcgagctggcctaatgtggtggcctgcaagccaggccatccctgggcgccacagacgagctccgagccaggtcaggcttcggaggccacaagctcagcctcaggcccaggcactgattgtggcagaggggccactacccaaggtctagctaggcccaagacctagttacccagacagtgagaagcccctggaaggcagaaaagttgggagcatggcagacagggaagggaaacattttcagggaaaagacatgtatcacatgtcttcagaagcaagtcaggtttcatgtaaccgagtgtcctcttgcgtgtccaaaagtagcccagggctgtagcacaggcttcacagtgattttgtgttcagccgtgagtcacactacatgcccccgtgaagctgggcattggtgacgtccaggttgtccttgagtaataaaaacgtatgttgcaaaaaaaaaaaaaaaaaaaaaaaaaaacaaaaacgcgtcgaggacgactatagctgcggcgggcgcgcaaaaaccgagcgcaggaacaggcaccgtgggccacacaggcgtgtcgccggaccccgatttccttgtccaccaggggcaaaaacggcgagccccccaataggggcgcgacaaaaagcgaaaagcgggggtaacgcggag

SEQ ID NO: 306857 - DNA, 3820 bp, Homo sapiens
cgcgcaagatggcggcgggcccgggcaccgccccttccgccccgccgggcgtcgcacgaggccggctcgaaggggaagtgagtcagtgtccgcggacccggccggcccaggcccgcgcccgccgcggccctgagaggccccggcaggtcccggcccggcggcggcagccatggccggggggccgggcccgggggagcccgcagcccccggcgcccagcacttcttgtacgaggtgccgccctgggtcatgtgccgcttctacaaagtgatggacgccctggagcccgccgactggtgccagttcgccgccctgatcgtgcgcgaccagaccgagctgcggctgtgcgagcgctccgggcagcgcacggccagcgtcctgtggccctggatcaaccgcaacgcccgtgtggccgacctcgtgcacatcctcacgcacctgcagctgctccgtgcgcgggacatcatcacagcctggcaccctcccgccccgcttccgtccccaggcaccactgccccgaggcccagcagcatccctgcacccgccgaggccgaggcctggagcccccggaagttgccatcctcagcctccaccttcctctccccagcttttccaggctcccagacccattcagggcctgagctcggcctggttccaagccctgcttccctgtggcctccaccgccatctccagccccttcttctaccaagccaggcccagagagctcagtgtccctcctgcagggagcccgcccctctccgttttgctggcccctctgtgagatttcccggggcacccacaacttctcggaggagctcaagatcggggagggtggctttgggtgcgtgtaccgggcggtgatgaggaacacggtgtatgctgtgaagaggctgaaggagaacgctgacctggagtggactgcagtgaagcagagcttcctgaccgaggtggagcagctgtccaggtttcgtcacccaaacattgtggactttgctggctactgtgctcagaacggcttctactgcctggtgtacggcttcctgcccaacggctccctggaggaccgtctccactgccagacccaggcctgcccacctctctcctggcctcagcgactggacatccttctgggtacagcccgggcaattcagtttctacatcaggacagccccagcctcatccatggagacatcaagagttccaacgtccttctggatgagaggctgacacccaagctgggagactttggcctggcccggttcagccgctttgccgggtccagccccagccagagcagcatggtggcccggacacagacagtgcggggcaccctggcctacctgcccgaggagtacatcaagacgggaaggctggctgtggacacggacaccttcagctttggggtggtagtgctagagaccttggctggtcagagggctgtgaagacgcacggtgccaggaccaagtatctgaaagacctggtggaagaggaggctgaggaggctggagtggctttgagaagcacccagagcacactgcaagcaggtctggctgcagatgcctgggctgctcccatcgccatgcagatctacaagaagcacctggaccccaggcccgggccctgcccacctgagctgggcctgggcctgggccagctggcctgctgctgcctgcaccgccgggccaaaaggaggcctcctatgacccaggtgtacgagaggctagagaagctgcaggcagtggtggcgggggtgcccgggcatttggaggccgccagctgcatccccccttccccgcaggagaactcctacgtgtccagcactggcagagcccacagtggggctgctccatggcagcccctggcagcgccatcaggagccagtgcccaggcagcagagcagctgcagagaggccccaaccagcccgtggagagtgacgagagcctaggcggcctctctgctgccctgcgctcctggcacttgactccaagctgccctctggacccagcacccctcagggaggccggctgtcctcagggggacacggcaggagaatcgagctgggggagtggcccaggatcccggcccacagccgtggaaggactggcccttggcagctctgcatcatcgtcgtcagagccaccgcagattatcatcaaccctgcccgacagaagatggtccagaagctggccctgtacgaggatggggccctggacagcctgcagctgctgtcgtccagctccctcccaggcttgggcctggaacaggacaggcaggggcccgaagaaagtgatgaatttcagagctgatgtgttcacctgggcagatcccccaaatccggaagtcaaagttctcatggtcagaagttctcatggtgcacgagtcctcagcactctgccggcagtgggggtgggggcccatgcccgcgggggagagaaggaggtggccctgctgttctaggctctgtgggcataggcaggcagagtggaaccctgcctccatgccagcatctgggggcaaggaaggctggcatcatccagtgaggaggctggcgcatgttgggaggctgctggctgcacagacccgtgaggggaggagaggggctgctgtgcaggggtgtggagtagggagctggctcccctgagagccatgcagggcgtctgcagcccaggcctctggcagcagctctttgcccatctctttggacagtggccaccctgcacaatggggccgacgaggcctagggccctcctacctgcttacaatttggaaaagtgtggccgggtgcggtggctcacgcctgtaatcccagcactttgggaggccaaggcaggaggatcgctggagcccagtaggtcaagaccagccagggcaacatgatgagaccctgtctctgccaaaaaattttttaaactattagcctggcgtggtagcgcacgcctgtggtcccagctgctggggaggctgaagtaggaggatcatttatgcttgggaggtcgaggctgcagtgagtcatgattgtatgactgcactccagcctgggtgacagagcaagaccctgtttcaaaaagaaaaaccctgggaaaagtgaagtatggctgtaagtctcatggttcagtcctagcaagaagcgagaattctgagatcctccagaaagtcgagcagcacccacctccaacctcgggccagtgtcttcaggctttactggggacctgcgagctggcctaatgtggtggcctgcaagccaggccatccctgggcgccacagacgagctccgagccaggtcaggcttcggaggccacaagctcagcctcaggcccaggcactgattgtggcagaggggccactacccaaggtctagctaggcccaagacctagttacccagacagggaagggaaacattttcagggaaaagacatgtatcacatgtcttcagaagcaagtcaggtttcatgtaaccgagtgtcctcttgcgtgtccaaaagtagcccagggctgtagcacaggcttcacagtgattttgtgttcagccgtgagtcacactacatgcccccgtgaagctgggcattggtgacgtccaggttgtccttgagtaataaaaacgtatgttgcaaaaaaaaaaaaaaaaaaaaaaaaaaacaaaaacgcgtcgaggacgactatagctgcggcgggcgcgcaaaaaccgagcgcaggaacaggcaccgtgggccacacaggcgtgtcgccggaccccgatttccttgtccaccaggggcaaaaacggcgagccccccaataggggcgcgacaaaaagcgaaaagcgggggtaacgcggag

SEQ ID NO: 306858 - DNA, 3159 bp, Homo sapiens
cgcgcaagatggcggcgggcccgggcaccgccccttccgccccgccgggcgtcgcacgaggccggctcgaaggggaagtgagtcagtgtccgcggacccggccggcccaggcccgcgcccgccgcggccctgagaggccccggcaggtcccggcccggcggcggcagccatggccggggggccgggcccgggggagcccgcagcccccggcgcccagcacttcttgtacgaggtgccgccctgggtcatgtgccgcttctacaaagtgatggacgccctggagcccgccgactggtgccagttcgccgccctgatcgtgcgcgaccagaccgagctgcggctgtgcgagcgctccgggcagcgcacggccagcgtcctgtggccctggatcaaccgcaacgcccgtgtggccgacctcgtgcacatcctcacgcacctgcagctgctccgtgcgcgggacatcatcacagcctggcaccctcccgccccgcttccgtccccaggcaccactgccccgaggcccagcagcatccctgcacccgccgaggccgaggcctggagcccccggaagttgccatcctcagcctccaccttcctctccccagcttttccaggctcccagacccattcagggcctgagctcggcctggttccaagccctgcttccctgtggcctccaccgccatctccagccccttcttctaccaagccaggcccagagagctcagtgtccctcctgcagggagcccgcccctctccgttttgctggcccctctgtgagatttcccggggcacccacaacttctcggaggagctcaagatcggggagggtggctttgggtgcgtgtaccgggcggtgatgaggaacacggtgtatgctgtgaagaggctgaaggagaacgctgacctggagtggactgcagtgaagcagagcttcctgaccgaggtggagcagctgtccaggtttcgtcacccaaacattgtggactttgctggctactgtgctcagaacggcttctactgcctggtgtacggcttcctgcccaacggctccctggaggaccgtctccactgccagacccaggcctgcccacctctctcctggcctcagcgactggacatccttctgggtacagcccgggcaattcagtttctacatcaggacagccccagcctcatccatggagacatcaagagttccaacgtccttctggatgagaggctgacacccaagctgggagactttggcctggcccggttcagccgctttgccgggtccagccccagccagagcagcatggtggcccggacacagacagtgcggggcaccctggcctacctgcccgaggagtacatcaagacgggaaggctggctgtggacacggacaccttcagctttggggtggtagtgctagagaccttggctggtcagagggctgtgaagacgcacggtgccaggaccaagtatctgaaagacctggtggaagaggaggctgaggaggctggagtggctttgagaagcacccagagcacactgcaagcaggtctggctgcagatgcctgggctgctcccatcgccatgcagatctacaagaagcacctggaccccaggcccgggccctgcccacctgagctgggcctgggcctgggccagctggcctgctgctgcctgcaccgccgggccaaaaggaggcctcctatgacccaggtgtacgagaggctagagaagctgcaggcagtggtggcgggggtgcccgggcatttggaggccgccagctgcatccccccttccccgcaggagaactcctacgtgtccagcactggcagagcccacagtggggctgctccatggcagcccctggcagcgccatcaggagccagtgcccaggcagcagagcagctgcagagaggccccaaccagcccgtggagagtgacgagagcctaggcggcctctctgctgccctgcgctcctggcacttgactccaagctgccctctggacccagcaccctgcacaatggggccgacgaggcctagggccctcctacctgcttacaatttggaaaagtgtggccgggtgcggtggctcacgcctgtaatcccagcactttgggaggccaaggcaggaggatcgctggagcccagtaggtcaagaccagccagggcaacatgatgagaccctgtctctgccaaaaaattttttaaactattagcctggcgtggtagcgcacgcctgtggtcccagctgctggggaggctgaagtaggaggatcatttatgcttgggaggtcgaggctgcagtgagtcatgattgtatgactgcactccagcctgggtgacagagcaagaccctgtttcaaaaagaaaaaccctgggaaaagtgaagtatggctgtaagtctcatggttcagtcctagcaagaagcgagaattctgagatcctccagaaagtcgagcagcacccacctccaacctcgggccagtgtcttcaggctttactggggacctgcgagctggcctaatgtggtggcctgcaagccaggccatccctgggcgccacagacgagctccgagccaggtcaggcttcggaggccacaagctcagcctcaggcccaggcactgattgtggcagaggggccactacccaaggtctagctaggcccaagacctagttacccagacagtgagaagcccctggaaggcagaaaagttgggagcatggcagacagggaagggaaacattttcagggaaaagacatgtatcacatgtcttcagaagcaagtcaggtttcatgtaaccgagtgtcctcttgcgtgtccaaaagtagcccagggctgtagcacaggcttcacagtgattttgtgttcagccgtgagtcacactacatgcccccgtgaagctgggcattggtgacgtccaggttgtccttgagtaataaaaacgtatgttgcaaaaaaaaaaaaaaaaaaaaaaaaaaacaaaaacgcgtcgaggacgactatagctgcggcgggcgcgcaaaaaccgagcgcaggaacaggcaccgtgggccacacaggcgtgtcgccggaccccgatttccttgtccaccaggggcaaaaacggcgagccccccaataggggcgcgacaaaaagcgaaaagcgggggtaacgcggag

SEQ ID NO: 306859 - DNA, 3405 bp, Homo sapiens
  misc_feature (3280)..(3280): n is a, c, g, or t
  misc_feature (3317)..(3317): n is a, c, g, or t
cgcgcaagatggcggcgggcccgggcaccgccccttccgccccgccgggcgtcgcacgaggccggctcgaaggggaagtgagtcagtgtccgcggacccggccggcccaggcccgcgcccgccgcggccctgagaggccccggcaggtcccggcccggcggcggcagccatggccggggggccgggcccgggggagcccgcagcccccggcgcccagcacttcttgtacgaggtgccgccctgggtcatgtgccgcttctacaaagtgatggacgccctggagcccgccgactggtgccagttcgccgccctgatcgtgcgcgaccagaccgagctgcggctgtgcgagcgctccgggcagcgcacggccagcgtcctgtggccctggatcaaccgcaacgcccgtgtggccgacctcgtgcacatcctcacgcacctgcagctgctccgtgcgcgggacatcatcacagcctggcaccctcccgccccgcttccgtccccaggcaccactgccccgaggcccagcagcatccctgcacccgccgaggccgaggcctggagcccccggaagttgccatcctcagcctccaccttcctctccccagcttttccaggctcccagacccattcagggcctgagctcggcctggttccaagccctgcttccctgtggcctccaccgccatctccagccccttcttctaccaagccaggcccagagagctcagtgtccctcctgcagggagcccgcccctctccgttttgctggcccctctgtgagatttcccggggcacccacaacttctcggaggagctcaagatcggggagggtggctttgggtgcgtgtaccgggcggtgatgaggaacacggtgtatgctgtgaagaggctgaaggagaacgctgacctggagtggactgcagtgaagcagagcttcctgaccgaggtggagcagctgtccaggtttcgtcacccaaacattgtggactttgctggctactgtgctcagaacggcttctactgcctggtgtacggcttcctgcccaacggctccctggaggaccgtctccactgccagacccaggcctgcccacctctctcctggcctcagcgactggacatccttctgggtacagcccgggcaattcagtttctacatcaggacagccccagcctcatccatggagacatcaagagttccaacgtccttctggatgagaggctgacacccaagctgggagactttggcctggcccggttcagccgctttgccgggtccagccccagccagagcagcatggtggcccggacacagacagtgcggggcaccctggcctacctgcccgaggagtacatcaagacgggaaggctggctgtggacacggacaccttcagctttggggtggtagtgctagagaccttggctggtcagagggctgtgaagacgcacggtgccaggaccaagtatctgaaagacctggtggaagaggaggctgaggaggctggagtggctttgagaagcacccagagcacactgcaagcaggtctggctgcagatgcctgggctgctcccatcgccatgcagatctacaagaagcacctggaccccaggcccgggccctgcccacctgagctgggcctgggcctgggccagctggcctgctgctgcctgcaccgccgggccaaaaggaggcctcctatgacccaggtgtacgagaggctagagaagctgcaggcagtggtggcgggggtgcccgggcatttggaggccgccagctgcatccccccttccccgcaggagaactcctacgtgtccagcactggcagagcccacagtggggctgctccatggcagcccctggcagcgccatcaggagccagtgcccaggcagcagagcagctgcagagaggccccaaccagcccgtggagagtgacgagagcctaggcggcctctctgctgccctgcgctcctggcacttgactccaagctgccctctggacccagcacccctcagggaggccggctgtcctcagggggacacggcaggagaatcgagctgggggagtggcccaggatcccggcccacagccgtggaaggactggcccttggcagctctgcatcatcgtcgtcagagccaccgcagattatcatcaaccctgcccgacagaagatggtccagaagctggccctgtacgaggatggggccctggacagcctgcagctgctgtcgtccagctccctcccaggcttgggcctggaacaggacaggcaggggcccgaagaaagtgatgaatttcagagctgatgtgttcacctgggcagatcccccaaatccggaagtcaaagttctcatggtcagaagttctcatggtgcacgagtcctcagcactctgccggcagtgggggtgggggcccatgcccgcgggggagagaaggaggtggccctgctgttctaggctctgtgggcataggcaggcagagtggaaccctgcctccatgccagcatctgggggcaaggaaggctggcatcatccagtgaggaggctggcgcatgttgggaggctgctggctgcacagacccgtgaggggaggagaggggctgctgtgcaggggtgtggagtagggagctggctcccctgagagccatgcagggcgtctgcagcccaggcctctggcagcagctctttgcccatctctttggacagtggccaccctgcacaatggggccgacgaggcctagggccctcctacctgcttacaatttggaaaagtgtggccgggtgcggtggctcacgcctgtaatcccagcactttgggaggccaaggcaggaggatcgctggagcccagtaggtcaagaccagccagggcaacatgatgagaccctgtctctgccaaaaaattttttaaactattagcctggcgtggtagcgcacgcctgtggtcccagctgctggggaggctgaagtaggaggatcatttatgcttgggaggtcgaggctgcagtgagtcatgattgtatgactgcactccagcctgggtgacagagcaagaccctgtttcaaaaagaaaaaccctgggaaaagtgaagtatggctgtaagtctcatggttcagtcctagcaagaagcgagaattctgagatcctccagaaagtcgagcagcacccacctccaacctcgggccagtgtcttcaggctttactggggacctgcgagctggcctaatgtggtggcctgcaagccaggccatccctgggcgccggagagctcggccgtcngttcgagccagtccgctcggccgctgtggggggggcnccccggttttggcccctttccccggagccgcggatgggtgcgccgcaggcctgcggtttctttccccggtcgctctctctccgggcgg

SEQ ID NO: 306860 - DNA, 3675 bp, Homo sapiens
cgcgcaagatggcggcgggcccgggcaccgccccttccgccccgccgggcgtcgcacgaggccggctcgaaggggaagtgagtcagtgtccgcggacccggccggcccaggcccgcgcccgccgcggccctgagaggccccggcaggtcccggcccggcggcggcagccatggccggggggccgggcccgggggagcccgcagcccccggcgcccagcacttcttgtacgaggtgccgccctgggtcatgtgccgcttctacaaagtgatggacgccctggagcccgccgactggtgccagttcgccgccctgatcgtgcgcgaccagaccgagctgcggctgtgcgagcgctccgggcagcgcacggccagcgtcctgtggccctggatcaaccgcaacgcccgtgtggccgacctcgtgcacatcctcacgcacctgcagctgctccgtgcgcgggacatcatcacagcctggcaccctcccgccccgcttccgtccccaggcaccactgccccgaggcccagcagcatccctgcacccgccgaggccgaggcctggagcccccggaagttgccatcctcagcctccaccttcctctccccagcttttccaggctcccagacccattcagggcctgagctcggcctggttccaagccctgcttccctgtggcctccaccgccatctccagccccttcttctaccaagccaggcccagagagctcagtgtccctcctgcagggagcccgcccctctccgttttgctggcccctctgtgagatttcccggggcacccacaacttctcggaggagctcaagatcggggagggtggctttgggtgcgtgtaccgggcggtgatgaggaacacggtgtatgctgtgaagaggctgaaggagaacgctgacctggagtggactgcagtgaagcagagcttcctgaccgaggtggagcagctgtccaggtttcgtcacccaaacattgtggactttgctggctactgtgctcagaacggcttctactgcctggtgtacggcttcctgcccaacggctccctggaggaccgtctccactgccagacccaggcctgcccacctctctcctggcctcagcgactggacatccttctgggtacagcccgggcaattcagtttctacatcaggacagccccagcctcatccatggagacatcaagagttccaacgtccttctggatgagaggctgacacccaagctgggagactttggcctggcccggttcagccgctttgccgggtccagccccagccagagcagcatggtggcccggacacagacagtgcggggcaccctggcctacctgcccgaggagtacatcaagacgggaaggctggctgtggacacggacaccttcagctttggggtggtagtgctagagaccttggctggtcagagggctgtgaagacgcacggtgccaggaccaagtatctgaaagacctggtggaagaggaggctgaggaggctggagtggctttgagaagcacccagagcacactgcaagcaggtctggctgcagatgcctgggctgctcccatcgccatgcagatctacaagaagcacctggaccccaggcccgggccctgcccacctgagctgggcctgggcctgggccagctggcctgctgctgcctgcaccgccgggccaaaaggaggcctcctatgacccaggtgtacgagaggctagagaagctgcaggcagtggtggcgggggtgcccgggcatttggaggccgccagctgcatccccccttccccgcaggagaactcctacgtgtccagcactggcagagcccacagtggggctgctccatggcagcccctggcagcgccatcaggagccagtgcccaggcagcagagcagctgcagagaggccccaaccagcccgtggagagtgacgagagcctaggcggcctctctgctgccctgcgctcctggcacttgactccaagctgccctctggacccagcacccctcagggaggccggctgtcctcagggggacacggcaggagaatcgagctgggggagtggcccaggatcccggcccacagccgtggaaggactggcccttggcagctctgcatcatcgtcgtcagagccaccgcagattatcatcaaccctgcccgacagaagatggtccagaagctggccctgtacgaggatggggccctggacagcctgcagctgctgtcgtccagctccctcccaggcttgggcctggaacaggacaggcaggggcccgaagaaagtgatgaatttcagagctgatgtgttcacctgggcagatcccccaaatccggaagtcaaagttctcatggtcagaagttctcatggtgcacgagtcctcagcactctgccggcagtgggggtgggggcccatgcccgcgggggagagaaggaggtggccctgctgttctaggctctgtgggcataggcaggcagagtggaaccctgcctccatgccagcatctgggggcaaggaaggctggcatcatccagtgaggaggctggcgcatgttgggaggctgctggctgcacagacccgtgaggggaggagaggggctgctgtgcaggggtgtggagtagggagctggctcccctgagagccatgcagggcgtctgcagcccaggcctctggcagcagctctttgcccatctctttggacagtggccaccctgcacaatggggccgacgaggcctagggccctcctacctgcttacaatttggaaaagtgtggccgggtgcggtggctcacgcctgtaatcccagcactttgggaggccaaggcaggaggatcgctggagcccagtaggtcaagaccagccagggcaacatgatgagaccctgtctctgccaaaaaattttttaaactattagcctggcgtggtagcgcacgcctgtggtcccagctgctggggaggctgaagtaggaggatcatttatgcttgggaggtcgaggctgcagtgagtcatgattgtatgactgcactccagcctgggtgacagagcaagaccctgtttcaaaaagaaaaaccctgggaaaagtgaagtatggctgtaagtctcatggttcagtcctagcaagaagcgagaattctgagatcctccagaaagtcgagcagcacctagctaggcccaagacctagttacccagacagtgagaagcccctggaaggcagaaaagttgggagcatggcagacagggaagggaaacattttcagggaaaagacatgtatcacatgtcttcagaagcaagtcaggtttcatgtaaccgagtgtcctcttgcgtgtccaaaagtagcccagggctgtagcacaggcttcacagtgattttgtgttcagccgtgagtcacactacatgcccccgtgaagctgggcattggtgacgtccaggttgtccttgagtaataaaaacgtatgttgcaaaaaaaaaaaaaaaaaaaaaaaaaaacaaaaacgcgtcgaggacgactatagctgcggcgggcgcgcaaaaaccgagcgcaggaacaggcaccgtgggccacacaggcgtgtcgccggaccccgatttccttgtccaccaggggcaaaaacggcgagccccccaataggggcgcgacaaaaagcgaaaagcgggggtaacgcggag

SEQ ID NO: 306861 - DNA, 1568 bp, Homo sapiens
agaaggggacaacttacggctagtacgagcctgctgttaaatcggccgagggttctcatggtcagaagttctcatggtgcacgagtcctcagcactctgccggcagtgggggtgggggcccatgcccgcgggggagagaaggaggtggccctgctgttctaggctctgtgggcataggcaggcagagtggaaccctgcctccatgccagcatctgggggcaaggaaggctggcatcatccagtgaggaggctggcgcatgttgggaggctgctggctgcacagacccgtgaggggaggagaggggctgctgtgcaggggtgtggagtagggagctggctcccctgagagccatgcagggcgtctgcagcccaggcctctggcagcagctctttgcccatctctttggacagtggccaccctgcacaatggggccgacgaggcctagggccctcctacctgcttacaatttggaaaagtgtggccgggtgcggtggctcacgcctgtaatcccagcactttgggaggccaaggcaggaggatcgctggagcccagtaggtcaagaccagccagggcaacatgatgagaccctgtctctgccaaaaaattttttaaactattagcctggcgtggtagcgcacgcctgtggtcccagctgctggggaggctgaagtaggaggatcatttatgcttgggaggtcgaggctgcagtgagtcatgattgtatgactgcactccagcctgggtgacagagcaagaccctgtttcaaaaagaaaaaccctgggaaaagtgaagtatggctgtaagtctcatggttcagtcctagcaagaagcgagaattctgagatcctccagaaagtcgagcagcacccacctccaacctcgggccagtgtcttcaggctttactggggacctgcgagctggcctaatgtggtggcctgcaagccaggccatccctgggcgccacagacgagctccgagccaggtcaggcttcggaggccacaagctcagcctcaggcccaggcactgattgtggcagaggggccactacccaaggtctagctaggcccaagacctagttacccagacagtgagaagcccctggaaggcagaaaagttgggagcatggcagacagggaagggaaacattttcagggaaaagacatgtatcacatgtcttcagaagcaagtcaggtttcatgtaaccgagtgtcctcttgcgtgtccaaaagtagcccagggctgtagcacaggcttcacagtgattttgtgttcagccgtgagtcacactacatgcccccgtgaagctgggcattggtgacgtccaggttgtccttgagtaataaaaacgtatgttgcaaaaaaaaaaaaaaaaaaaaaaaaaaacaaaaacgcgtcgaggacgactatagctgcggcgggcgcgcaaaaaccgagcgcaggaacaggcaccgtgggccacacaggcgtgtcgccggaccccgatttccttgtccaccaggggcaaaaacggcgagccccccaataggggcgcgacaaaaagcgaaaagcgggggtaacgcggag

SEQ ID NO: 306862 - DNA, 1313 bp, Homo sapiens
caggctcatccctttgtcccggtggtcgcgagtccttgaagcatttcttccgctctccccaacgcagcatgcaggagaggcaaggggcccctccctcagctgtaggtggtccagctggtagccccagaccccctcgcctccggggcttgctgatgagaccctccagctacgctgcttgcaaaggggagaggcctgggaaagagctctatagaaaacattgggtgtggccgggtgcggtggctcacgcctgtaatcccagcactttgggaggccaaggcaggaggatcgctggagcccagtaggtcaagaccagccagggcaacatgatgagaccctgtctctgccaaaaaattttttaaactattagcctggcgtggtagcgcacgcctgtggtcccagctgctggggaggctgaagtaggaggatcatttatgcttgggaggtcgaggctgcagtgagtcatgattgtatgactgcactccagcctgggtgacagagcaagaccctgtttcaaaaagaaaaaccctgggaaaagtgaagtatggctgtaagtctcatggttcagtcctagcaagaagcgagaattctgagatcctccagaaagtcgagcagcacccacctccaacctcgggccagtgtcttcaggctttactggggacctgcgagctggcctaatgtggtggcctgcaagccaggccatccctgggcgccacagacgagctccgagccaggtcaggcttcggaggccacaagctcagcctcaggcccaggcactgattgtggcagaggggccactacccaaggtctagctaggcccaagacctagttacccagacagtgagaagcccctggaaggcagaaaagttgggagcatggcagacagggaagggaaacattttcagggaaaagacatgtatcacatgtcttcagaagcaagtcaggtttcatgtaaccgagtgtcctcttgcgtgtccaaaagtagcccagggctgtagcacaggcttcacagtgattttgtgttcagccgtgagtcacactacatgcccccgtgaagctgggcattggtgacgtccaggttgtccttgagtaataaaaacgtatgttgcaaaaaaaaaaaaaaaaaaaaaaaaaaacaaaaacgcgtcgaggacgactatagctgcggcgggcgcgcaaaaaccgagcgcaggaacaggcaccgtgggccacacaggcgtgtcgccggaccccgatttccttgtccaccaggggcaaaaacggcgagccccccaataggggcgcgacaaaaagcgaaaagcgggggtaacgcggag

SEQ ID NO: 306863 - DNA, 1032 bp, Homo sapiens
tttttttttgagacggagtctcactctgttgcccaggctggagtacagtcgcgtcatctcggctcgctgcaacctcagcctcccgggttcacgccattctcctgcctcagcctcccagctgctggggaggctgaagtaggaggatcatttatgcttgggaggtcgaggctgcagtgagtcatgattgtatgactgcactccagcctgggtgacagagcaagaccctgtttcaaaaagaaaaaccctgggaaaagtgaagtatggctgtaagtctcatggttcagtcctagcaagaagcgagaattctgagatcctccagaaagtcgagcagcacccacctccaacctcgggccagtgtcttcaggctttactggggacctgcgagctggcctaatgtggtggcctgcaagccaggccatccctgggcgccacagacgagctccgagccaggtcaggcttcggaggccacaagctcagcctcaggcccaggcactgattgtggcagaggggccactacccaaggtctagctaggcccaagacctagttacccagacagtgagaagcccctggaaggcagaaaagttgggagcatggcagacagggaagggaaacattttcagggaaaagacatgtatcacatgtcttcagaagcaagtcaggtttcatgtaaccgagtgtcctcttgcgtgtccaaaagtagcccagggctgtagcacaggcttcacagtgattttgtgttcagccgtgagtcacactacatgcccccgtgaagctgggcattggtgacgtccaggttgtccttgagtaataaaaacgtatgttgcaaaaaaaaaaaaaaaaaaaaaaaaaaacaaaaacgcgtcgaggacgactatagctgcggcgggcgcgcaaaaaccgagcgcaggaacaggcaccgtgggccacacaggcgtgtcgccggaccccgatttccttgtccaccaggggcaaaaacggcgagccccccaataggggcgcgacaaaaagcgaaaagcgggggtaacgcggag

SEQ ID NO: 306864 - DNA, 1538 bp, Homo sapiens
cgcgcaagatggcggcgggcccgggcaccgccccttccgccccgccgggcgtcgcacgaggccggctcgaaggggaagtgagtcagtgtccgcggacccggccggcccaggcccgcgcccgccgcggccctgagaggccccggcaggtcccggcccggcggcggcagccatggccggggggccgggcccgggggagcccgcagcccccggcgcccagcacttcttgtacgaggtgccgccctgggtcatgtgccgcttctacaaagtgatggacgccctggagcccgccgactggtgccagttcgccgccctgatcgtgcgcgaccagaccgagctgcggctgtgcgagcgctccgggcagcgcacggccagcgtcctgtggccctggatcaaccgcaacgcccgtgtggccgacctcgtgcacatcctcacgcacctgcagctgctccgtgcgcgggacatcatcacagcctggcaccctcccgccccgcttccgtccccaggcaccactgccccgaggcccagcagcatccctgcacccgccgaggccgaggcctggagcccccggaagttgccatcctcagcctccaccttcctctccccagcttttccaggctcccagacccattcagggcctgagctcggcctggttccaagccctgcttccctgtggcctccaccgccatctccagccccttcttctaccaagcctgggtgacagagcaagaccctgtttcaaaaagaaaaaccctgggaaaagtgaagtatggctgtaagtctcatggttcagtcctagcaagaagcgagaattctgagatcctccagaaagtcgagcagcacccacctccaacctcgggccagtgtcttcaggctttactggggacctgcgagctggcctaatgtggtggcctgcaagccaggccatccctgggcgccacagacgagctccgagccaggtcaggcttcggaggccacaagctcagcctcaggcccaggcactgattgtggcagaggggccactacccaaggtctagctaggcccaagacctagttacccagacagtgagaagcccctggaaggcagaaaagttgggagcatggcagacagggaagggaaacattttcagggaaaagacatgtatcacatgtcttcagaagcaagtcaggtttcatgtaaccgagtgtcctcttgcgtgtccaaaagtagcccagggctgtagcacaggcttcacagtgattttgtgttcagccgtgagtcacactacatgcccccgtgaagctgggcattggtgacgtccaggttgtccttgagtaataaaaacgtatgttgcaaaaaaaaaaaaaaaaaaaaaaaaaaacaaaaacgcgtcgaggacgactatagctgcggcgggcgcgcaaaaaccgagcgcaggaacaggcaccgtgggccacacaggcgtgtcgccggaccccgatttccttgtccaccaggggcaaaaacggcgagccccccaataggggcgcgacaaaaagcgaaaagcgggggtaacgcggag

SEQ ID NO: 306865 - DNA, 2798 bp, Homo sapiens
cgcgcaagatggcggcgggcccgggcaccgccccttccgccccgccgggcgtcgcacgaggccggctcgaaggggaagtgagtcagtgtccgcggacccggccggcccaggcccgcgcccgccgcggccctgagaggccccggcaggtcccggcccggcggcggcagccatggccggggggccgggcccgggggagcccgcagcccccggcgcccagcacttcttgtacgaggtgccgccctgggtcatgtgccgcttctacaaagtgatggacgccctggagcccgccgactggtgccagttcgccgccctgatcgtgcgcgaccagaccgagctgcggctgtgcgagcgctccgggcagcgcacggccagcgtcctgtggccctggatcaaccgcaacgcccgtgtggccgacctcgtgcacatcctcacgcacctgcagctgctccgtgcgcgggacatcatcacagcctggcaccctcccgccccgcttccgtccccaggcaccactgccccgaggcccagcagcatccctgcacccgccgaggccgaggcctggagcccccggaagttgccatcctcagcctccaccttcctctccccagcttttccaggctcccagacccattcagggcctgagctcggcctggttccaagccctgcttccctgtggcctccaccgccatctccagccccttcttctaccaagccaggcccagagagctcagtgtccctcctgcagggagcccgcccctctccgttttgctggcccctctgtgagatttcccggggcacccacaacttctcggaggagctcaagatcggggagggtggctttgggtgcgtgtaccgggcggtgatgaggaacacggtgtatgctgtgaagaggctgaaggagaacgctgacctggagtggactgcagtgaagcagagcttcctgaccgaggtggagcagctgtccaggtttcgtcacccaaacattgtggactttgctggctactgtgctcagaacggcttctactgcctggtgtacggcttcctgcccaacggctccctggaggaccgtctccactgccagacccaggcctgcccacctctctcctggcctcagcgactggacatccttctgggtacagcccgggcaattcagtttctacatcaggacagccccagcctcatccatggagacatcaagagttccaacgtccttctggatgagaggctgacacccaagctgggagactttggcctggcccggttcagccgctttgccgggtccagccccagccagagcagcatggtggcccggacacagacagtgcggggcaccctggcctacctgcccgaggagtacatcaagacgggaaggctggctgtggacacggacaccttcagctttggggtggtagtgctagagaccttggctggtcagagggctgtgaagacgcacggtgccaggaccaagtatctgaaagacctggtggaagaggaggctgaggaggctggagtggctttgagaagcacccagagcacactgcaagcaggtctggctgcagatgcctgggctgctcccatcgccatgcagatctacaagaagcacctggaccccaggcccgggccctgcccacctgagctgggcctgggcctgggccagctggcctgctgctgcctgcaccgccgggccaaaaggaggcctcctatgacccaggtgtacgagaggctagagaagctgcaggcagtggtggcgggggtgcccgggcatttggaggccgccagctgcatccccccttccccgcaggagaactcctacgtgtccagcactggcagagcccacagtggggctgctccatggcagcccctggcagcgccatcaggagccagtgcccaggcagcagagcagctgcagagaggccccaaccagcccgtggagagtgacgagagcctaggcggcctctctgctgccctgcgctcctggcacttgactccaagctgccctctggacccagcacccctcagggaggccggctgtcctcagggggacacggcaggagaatcgagctgggggagtggcccaggatcccggcccacagccgtggaaggactggcccttggcagctctgcatcatcgtcgtcagagccaccgcagattatcatcaaccctgcccgacagaagatggtccagaagctggccctgtacgaggatggggccctggacagcctgcagctgctgtcgtccagctccctcccaggcttgggcctggaacaggacaggcaggggcccgaagaaagtgatgaatttcagagctgatgtgttcacctgggcagatcccccaaatccggaagtcaaagttctcatggtcagaagttctcatggtgcacgagtcctcagcactctgccggcagtgggggtgggggcccatgcccgcgggggagagaaggaggtggccctgctgttctaggctctgtgggcataggcagggcacaggcttcacagtgattttgtgttcagccgtgagtcacactacatgcccccgtgaagctgggcattggtgacgtccaggttgtccttgagtaataaaaacgtatgttgcaaaaaaaaaaaaaaaaaaaaaaaaaaacaaaaacgcgtcgaggacgactatagctgcggcgggcgcgcaaaaaccgagcgcaggaacaggcaccgtgggccacacaggcgtgtcgccggaccccgatttccttgtccaccaggggcaaaaacggcgagccccccaataggggcgcgacaaaaagcgaaaagcgggggtaacgcggag

SEQ ID NO: 306866 - DNA, 1979 bp, Homo sapiens
cgcgcaagatggcggcgggcccgggcaccgccccttccgccccgccgggcgtcgcacgaggccggctcgaaggggaagtgagtcagtgtccgcggacccggccggcccaggcccgcgcccgccgcggccctgagaggccccggcaggtcccggcccggcggcggcagccatggccggggggccgggcccgggggagcccgcagcccccggcgcccagcacttcttgtacgaggtgccgccctgggtcatgtgccgcttctacaaagtgatggacgccctggagcccgccgactggtgccagttcgccgccctgatcgtgcgcgaccagaccgagctgcggctgtgcgagcgctccgggcagcgcacggccagcgtcctgtggccctggatcaaccgcaacgcccgtgtggccgacctcgtgcacatcctcacgcacctgcagctgctccgtgcgcgggacatcatcacagcctggcaccctcccgccccgcttccgtccccaggcaccactgccccgaggcccagcagcatccctgcacccgccgaggccgaggcctggagcccccggaagttgccatcctcagcctccaccttcctctccccagcttttccaggctcccagacccattcagggcctgagctcggcctggttccaagccctgcttccctgtggcctccaccgccatctccagccccttcttctaccaagccaggcccagagagctcagtgtccctcctgcagggagcccgcccctctccgttttgctggcccctctgtgagatttcccggggcacccacaacttctcggaggagctcaagatcggggagggtggctttgggtgcgtgtaccgggcggtgatgaggaacacggtgtatgctgtgaagaggctgaaggagaacgctgacctggagtggactgcagtgaagcagagcttcctgaccgaggtggagcagctgtccaggtttcgtcacccaaacattgtggactttgctggctactgtgctcagaacggcttctactgcctggtgtacggcttcctgcccaacggctccctggaggaccgtctccactgccagacccaggcctgcccacctctctcctggcctcagcgactggacatccttctgggtacagcccgggcaattcagtttctacatcaggacagccccagcctcatccatggagacatcaagagttccaacgtccttctggatgagaggctgacacccaagctgggagactttggcctggcccggttcagccgctttgccgggtccagccccagccagagcagcatggtggcccggacacagacagtgcggggcaccctggcctacctgcccgaggagtacatcaagacgggaaggctggctgtggacacggacaccttcagctttggggtggtagtgctagagaccttggctggtcagagggctgtgaagacgcacggtgccaggaccaagtatctgctagctaggcccaagacctagttacccagacagtgagaagcccctggaaggcagaaaagttgggagcatggcagacagggaagggaaacattttcagggaaaagacatgtatcacatgtcttcagaagcaagtcaggtttcatgtaaccgagtgtcctcttgcgtgtccaaaagtagcccagggctgtagcacaggcttcacagtgattttgtgttcagccgtgagtcacactacatgcccccgtgaagctgggcattggtgacgtccaggttgtccttgagtaataaaaacgtatgttgcaaaaaaaaaaaaaaaaaaaaaaaaaaacaaaaacgcgtcgaggacgactatagctgcggcgggcgcgcaaaaaccgagcgcaggaacaggcaccgtgggccacacaggcgtgtcgccggaccccgatttccttgtccaccaggggcaaaaacggcgagccccccaataggggcgcgacaaaaagcgaaaagcgggggtaacgcggag

SEQ ID NO: 306867 - DNA, 2121 bp, Homo sapiens
cgcgcaagatggcggcgggcccgggcaccgccccttccgccccgccgggcgtcgcacgaggccggctcgaaggggaagtgagtcagtgtccgcggacccggccggcccaggcccgcgcccgccgcggccctgagaggccccggcaggtcccggcccggcggcggcagccatggccggggggccgggcccgggggagcccgcagcccccggcgcccagcacttcttgtacgaggtgccgccctgggtcatgtgccgcttctacaaagtgatggacgccctggagcccgccgactggtgccagttcgccgccctgatcgtgcgcgaccagaccgagctgcggctgtgcgagcgctccgggcagcgcacggccagcgtcctgtggccctggatcaaccgcaacgcccgtgtggccgacctcgtgcacatcctcacgcacctgcagctgctccgtgcgcgggacatcatcacagcctggcaccctcccgccccgcttccgtccccaggcaccactgccccgaggcccagcagcatccctgcacccgccgaggccgaggcctggagcccccggaagttgccatcctcagcctccaccttcctctccccagcttttccaggctcccagacccattcagggcctgagctcggcctggttccaagccctgcttccctgtggcctccaccgccatctccagccccttcttctaccaagccaggcccagagagctcagtgtccctcctgcagggagcccgcccctctccgttttgctggcccctctgtgagatttcccggggcacccacaacttctcggaggagctcaagatcggggagggtggctttgggtgcgtgtaccgggcggtgatgaggaacacggtgtatgctgtgaagaggctgaaggagaacgctgacctggagtggactgcagtgaagcagagcttcctgaccgaggtggagcagctgtccaggtttcgtcacccaaacattgtggactttgctggctactgtgctcagaacggcttctactgcctggtgtacggcttcctgcccaacggctccctggaggaccgtctccactgccagacccaggcctgcccacctctctcctggcctcagcgactggacatccttctgggtacagcccgggcaattcagtttctacatcaggacagccccagcctcatccatggagacatcaagagttccaacgtccttctggatgagaggctgacacccaagctgggagactttggcctggcccggttcagccgctttgccgggtccagccccagccagagcagcatggtggcccggacacagacagtgcggggcaccctggcctacctgcccgaggagtacatcaagacgggaaggctggctgtggacacggacaccttcagctttggggtggtgagccactgacccctctgctggctcagaggaggagaagccacaggcaggcagaggtgggggctgcagagtgcactgcgggccaggggccatctgccaagaccccaggaggctgcagctccagggtccccctccctccgaggccctcctcctcaccctgcacctaactgtgtgtttgtaatttgtcttcaagtgggctctccgagttgcccgagcttcagtcccataacatctggctctgcctttgtccacacccttgtcaggcccaatccatgtccacaccagaggcctcttccctgccaaggccactgccatgctctccctcttccctctctccaggtagtgctagagaccttggctggtcagagggctgtgaagacgcacggtgccaggaccaagtatctgggtgagccccttgaggcagggccaggagggacacacagctgctggcagccagcaggcacagccccagtggcggggataactggggcgcagtgcccatggatgcctctgctgccacagtggcctcatttttgaaagtaggcagggctccaaacaacttcgtttaccttgccgaggacaaacctgtctgtcctgcagacactatgggccttgtacagaccccacctgggctgggggcagggggaagggcggtcccagggcactgagacccaagctgcagtggaactcagaggactctggccggagaaaggcgg

SEQ ID NO: 306868 - DNA, 578 bp, Homo sapiens
gagcgacaatgctacgaagacccaagacacaagagaaacaaaaaaaccacaacccaaaagactaacaaagctagctaggcccaagacctagttacccagacagtgagaagcccctggaaggcagaaaagttgggagcatggcagacagggaagggaaacattttcagggaaaagacatgtatcacatgtcttcagaagcaagtcaggtttcatgtaaccgagtgtcctcttgcgtgtccaaaagtagcccagggctgtagcacaggcttcacagtgattttgtgttcagccgtgagtcacactacatgcccccgtgaagctgggcattggtgacgtccaggttgtccttgagtaataaaaacgtatgttgcaaaaaaaaaaaaaaaaaaaaaaaaaaacaaaaacgcgtcgaggacgactatagctgcggcgggcgcgcaaaaaccgagcgcaggaacaggcaccgtgggccacacaggcgtgtcgccggaccccgatttccttgtccaccaggggcaaaaacggcgagccccccaataggggcgcgacaaaaagcgaaaagcgggggtaacgcggag

SEQ ID NO: 306869 - DNA, 585 bp, Homo sapiens
cttgaggtcaggagttccagaccagcctggccaacatggtgaaactccgtctctactaaaaatacaaaaattagccgggtgtggtggggtgcgcttgtaatcccagacagtgagaagcccctggaaggcagaaaagttgggagcatggcagacagggaagggaaacattttcagggaaaagacatgtatcacatgtcttcagaagcaagtcaggtttcatgtaaccgagtgtcctcttgcgtgtccaaaagtagcccagggctgtagcacaggcttcacagtgattttgtgttcagccgtgagtcacactacatgcccccgtgaagctgggcattggtgacgtccaggttgtccttgagtaataaaaacgtatgttgcaaaaaaaaaaaaaaaaaaaaaaaaaaacaaaaacgcgtcgaggacgactatagctgcggcgggcgcgcaaaaaccgagcgcaggaacaggcaccgtgggccacacaggcgtgtcgccggaccccgatttccttgtccaccaggggcaaaaacggcgagccccccaataggggcgcgacaaaaagcgaaaagcgggggtaacgcggag

SEQ ID NO: 306870 - DNA, 1511 bp, Homo sapiens
cgcgcaagatggcggcgggcccgggcaccgccccttccgccccgccgggcgtcgcacgaggccggctcgaaggggaagtgagtcagtgtccgcggacccggccggcccaggcccgcgcccgccgcggccctgagaggccccggcaggtcccggcccggcggcggcagccatggccggggggccgggcccgggggagcccgcagcccccggcgcccagcacttcttgtacgaggtgccgccctgggtcatgtgccgcttctacaaagtgatggacgccctggagcccgccgactggtgccagttcgccgccctgatcgtgcgcgaccagaccgagctgcggctgtgcgagcgctccgggcagcgcacggccagcgtcctgtggccctggatcaaccgcaacgcccgtgtggccgacctcgtgcacatcctcacgcacctgcagctgctccgtgcgcgggacatcatcacagcctggcaccctcccgccccgcttccgtccccaggcaccactgccccgaggcccagcagcatccctgcacccgccgaggccgaggcctggagcccccggaagttgccatcctcagcctccaccttcctctccccagcttttccaggctcccagacccattcagggcctgagctcggcctggttccaagccctgcttccctgtggcctccaccgccatctccagccccttcttctaccaagccaggcccagagagctcagtgtccctcctgcagggagcccgcccctctccgttttgctggcccctctgtgagatttcccggggcacccacaacttctcggaggagctcaagatcggggagggtggctttgggtgcgtgtaccgggcggtgatgaggaacacggtgtatgctgtgaagaggctgaaggagaacgctgacctggagtggactgcagtgaagcagagcttcctgaccgaggtggagcagctgtccaggtttcgtcacccaaacattgtggactttgctggctactgtgctcagaacggcttctactgcctggtgtacggcttcctgcccaacggctccctggaggaccgtctccactgccagacccaggcctgcccacctctctcctggcctcagcgactggacatccttctgggtaagtcaggtttcatgtaaccgagtgtcctcttgcgtgtccaaaagtagcccagggctgtagcacaggcttcacagtgattttgtgttcagccgtgagtcacactacatgcccccgtgaagctgggcattggtgacgtccaggttgtccttgagtaataaaaacgtatgttgcaaaaaaaaaaaaaaaaaaaaaaaaaaacaaaaacgcgtcgaggacgactatagctgcggcgggcgcgcaaaaaccgagcgcaggaacaggcaccgtgggccacacaggcgtgtcgccggaccccgatttccttgtccaccaggggcaaaaacggcgagccccccaataggggcgcgacaaaaagcgaaaagcgggggtaacgcggag

SEQ ID NO: 306871 - DNA, 1452 bp, Homo sapiens
cgcgcaagatggcggcgggcccgggcaccgccccttccgccccgccgggcgtcgcacgaggccggctcgaaggggaagtgagtcagtgtccgcggacccggccggcccaggcccgcgcccgccgcggccctgagaggccccggcaggtcccggcccggcggcggcagccatggccggggggccgggcccgggggagcccgcagcccccggcgcccagcacttcttgtacgaggtgccgccctgggtcatgtgccgcttctacaaagtgatggacgccctggagcccgccgactggtgccagttcgccgccctgatcgtgcgcgaccagaccgagctgcggctgtgcgagcgctccgggcagcgcacggccagcgtcctgtggccctggatcaaccgcaacgcccgtgtggccgacctcgtgcacatcctcacgcacctgcagctgctccgtgcgcgggacatcatcacagcctggcaccctcccgccccgcttccgtccccaggcaccactgccccgaggcccagcagcatccctgcacccgccgaggccgaggcctggagcccccggaagttgccatcctcagcctccaccttcctctccccagcttttccaggctcccagacccattcagggcctgagctcggcctggttccaagccctgcttccctgtggcctccaccgccatctccagccccttcttctaccaagccaggcccagagagctcagtgtccctcctgcagggagcccgcccctctccgttttgctggcccctctgtgagatttcccggggcacccacaacttctcggaggagctcaagatcggggagggtggctttgggtgcgtgtaccgggcggtgatgaggaacacggtgtatgctgtgaagaggctgaaggagaacgctgacctggagtggactgcagtgaagcagagcttcctgaccgaggtggagcagctgtccaggtttcgtcacccaaacattgtggactttgctggctactgtgctcagaacggcttctactgcctggtgtacggcttcctgcccaacggctccctggaggaccgtctccactgccagacccaggcctgcccacctctctcctggcctcagcgactggacatccttctgggtagcacaggcttcacagtgattttgtgttcagccgtgagtcacactacatgcccccgtgaagctgggcattggtgacgtccaggttgtccttgagtaataaaaacgtatgttgcaaaaaaaaaaaaaaaaaaaaaaaaaaacaaaaacgcgtcgaggacgactatagctgcggcgggcgcgcaaaaaccgagcgcaggaacaggcaccgtgggccacacaggcgtgtcgccggaccccgatttccttgtccaccaggggcaaaaacggcgagccccccaataggggcgcgacaaaaagcgaaaagcgggggtaacgcggag

SEQ ID NO: 306872 - DNA, 1272 bp, Homo sapiens
cgcgcaagatggcggcgggcccgggcaccgccccttccgccccgccgggcgtcgcacgaggccggctcgaaggggaagtgagtcagtgtccgcggacccggccggcccaggcccgcgcccgccgcggccctgagaggccccggcaggtcccggcccggcggcggcagccatggccggggggccgggcccgggggagcccgcagcccccggcgcccagcacttcttgtacgaggtgccgccctgggtcatgtgccgcttctacaaagtgatggacgccctggagcccgccgactggtgccagttcgccgccctgatcgtgcgcgaccagaccgagctgcggctgtgcgagcgctccgggcagcgcacggccagcgtcctgtggccctggatcaaccgcaacgcccgtgtggccgacctcgtgcacatcctcacgcacctgcagctgctccgtgcgcgggacatcatcacagcctgtgagcgcgggactccgggcaccccacggctgggaggccggcgggccccacggggctcccccacccgggcctcaaccttcctttccttccttggcgtcccgactggcccttggcagctctgcatcatcgtcgtcagagccaccgcagattatcatcaaccctgcccgacagaagatggtccagaagctggccctgtacgaggatggggccctggacagcctgcagctgctgtcgtccagctccctcccaggcttgggcctggaacaggacaggcaggggcccgaagaaagtgatgaatttcagagctgatgtgttcacctgggcagatcccccaaatccggaagtcaaagttctcatggtcagaagttctcatggtgcacgagtcctcagcactctgccggcagtgggggtgggggcccatgcccgcgggggagagaaggaggtggccctgctgttctaggctctgtgggcataggcagggcacaggcttcacagtgattttgtgttcagccgtgagtcacactacatgcccccgtgaagctgggcattggtgacgtccaggttgtccttgagtaataaaaacgtatgttgcaaaaaaaaaaaaaaaaaaaaaaaaaaacaaaaacgcgtcgaggacgactatagctgcggcgggcgcgcaaaaaccgagcgcaggaacaggcaccgtgggccacacaggcgtgtcgccggaccccgatttccttgtccaccaggggcaaaaacggcgagccccccaataggggcgcgacaaaaagcgaaaagcgggggtaacgcggag

SEQ ID NO: 306873 - DNA, 98 bp, Homo sapiens
tctgaggaattcaggcctgaggccagggaggcagggtgctaggctgcgggctggggagccacagcatgaggctaagggagtgccatctccaccccagg

SEQ ID NO: 306874 - DNA, 412 bp, Homo sapiens
tagaaggatggttgggatcaaggaacggccatccagcaacctcccctgtccccctttgccaccccagacccaggcctgcccacctctctcctggcctcagcgactggacatccttctgggtacagcccgggcaattcagtttctacatcaggacagccccagcctcatccatggagacatcaagaggtgaggaggggcccttgagaactgccggggcagggcctgcagcaaggggggccccgcgtcctatcaatgtggggatcaggcatggcctgggacctcaacaccccggcatcgcacaggtgtgggaacgggccaaggatgggccctactgatgagcagaggcccccaggcagctggagcgctcagggcagtgccagcgctttctgtgggcaaggcaccgggctggcag

SEQ ID NO: 306875 - DNA, 383 bp, Homo sapiens
gtggaggctacagtgagctgtgatcaagccactgcactccagcctgggagacagttagaccctgtctcaaaaacaaatgaacaaacaaacaaaaaccctcaattcccacgaacgccccaggagataagggagcatggcccaggccttgagccagggcttctggcagtaggggagcctcccccatttgctaagcggactttcctcttccttctgtaggcttgggcctggaacaggacaggcaggggcccgaagaaagtgatgaatttcagagctgatgtgttcacctgggcagatcccccaaatccggaagtcaaagttctcatggtcagaagttctcatggtgcacgagtcctcagcactctgccggcagtgggggtgggggc

SEQ ID NO: 306876 - DNA, 501 bp, Homo sapiens
gtcccagctactccggaggctgaggcaggaaaatcacttgaacccaggaggcggaggttgaagtgagccgagatcacaccactgcactccagcctgggcaacagagcaagactctgtctccaaaaataacaaaaaataaatacatgccttcctttctactgctgcacaacctcactgtgtcaggcaggcatctctggatccagctggtttttgttttgctgaggctcagcttcttcctggaactttttgaaacaacactcaagggtctcaagtgggtattttttcatgttgtatacccaaaaacctgaaaacccagggccctgggttacagtatttccacgtcgtatacccaaaaacctgaaaacctggggaccctgggttccagtatttcctggcgatcttacccactaccaccatctagtcaatttgaaccacctcctcaaccacctatgagggcctaaacactctttcactccctttcctgccagcacccctcaagct

SEQ ID NO: 306877 - DNA, 1042 bp, Homo sapiens
gtcccagctactccggaggctgaggcaggaaaatcacttgaacccaggaggcggaggttgaagtgagccgagatcacaccactgcactccagcctgggcaacagagcaagactctgtctccaaaaataacaaaaaataaatacatgccttcctttctactgctgcacaacctcactgtgtcaggcaggcatctctggatccagctggtttttgttttgctgaggctcagcttcttcctggaactttttgaaacaacactcaagggtctcaaatggctgacatgatggtctgtgacctgaaagttgttgaatagttggagtgttctgcattcatgtggaagaggctaaaggatgtttgatgaagcactatgggctgccctggaagaggactgaagaagcagctgcagggaatgaatgcttcaagaccacagtgctctcctgccttggaaacaccttcgccttcctccgcttctctttggctaccatggtcaccctccacactgctttcctcaactctcgggcaggctggtctcgaactcctgacctcatgtggtcctcctgcctcggcctcccaaggtgctgggattataggcatgagccactgcatctggcccgattctttatatttgtaaaaagcgtactgtacttcaatatattcaaaattagactattatttagaagtatatcaatttgcagccagggcagtggctcacgcctgtcctttacacatataagatggtaatacacggccgggcacagtggcttgtgcctgtaatcccagaactttggaaggccgaggtgggtggatcacctgaggtcaggagttcgaggaccagactggccaacatggagaaaccccgtctctgctagaaatgcaaaaattagccaggtgtggtggtgggctcctgtaatcccagctacttgggaggctgaggcaggagaatcccttgaacctgcgaggtagaggttgtagtgagccgaaattgcaccattgcactctagcctgggcaacaagagcgaaactttgtatcattaaataaata

SEQ ID NO: 306878 - DNA, 997 bp, Homo sapiens
agtgattcttctgcctcagactcccaagtagctgggattacaggcatgtgctaccactcccggattattttctatttttagtacagaccaggtttctccatgttggtcagactggtctcaaactccctacctcaagtgatctgcccacctcggcctcccaaagtgctgggattaaaggcgtgagtcaccacccctggccttatagtttatcttctagtggtcttctatcctcatttgaaaatgtgaaaagtgggtacctgagataattcaccgactcattgtttcttggaaccacaattgatctcagaagtgtaaccctgtactactgagaagcttaatcaaggacaaatacaatcccctcactccacagatggctgacatgatggtctgtgacctgaaagttgttgaatagttggagtgttctgcattcatgtggaagaggctaaaggatgtttgatgaagcactatgggctgccctggaagaggactgaagaagcagctgcaggaaagaaacgtccactctgctccagtcaaccccactgctggtgtcctctgcactgccttgcactccctgaagagagcctgggcaacagagcgagactccatctcaaaaaaaaaaaaaaaaaaaattggggactatgtatatagatttactacactgaagccctccagcagtctaagaactgatgcctctaacgaaggaaaggactgcatgtttctgatgaagctaccatgacctaccagatttccaacgcctgccaaaattaatctatttgtctgtggtagaagaggccataccattgtggcccttgaaacttactgtatgatgttttatttagtgaacagttcacatacccaaatggttgtaactgatactgctgaatatattgtaagaacagaagtgttaagtatgtataacacttcttttgattgtaaggaatgttcccagtggggaaatgccataattaaaacagtgatcgtgggatgaaaacatgat

SEQ ID NO: 306879 - DNA, 898 bp, Homo sapiens
gtcccagctactccggaggctgaggcaggaaaatcacttgaacccaggaggcggaggttgaagtgagccgagatcacaccactgcactccagcctgggcaacagagcaagactctgtctccaaaaataacaaaaaataaatacatgccttcctttctactgctgcacaacctcactgtgtcaggcaggcatctctggatccagctggtttttgttttgctgaggctcagcttcttcctggaactttttgaaacaacactcaagggtctcaaatggctgacatgatggtctgtgacctgaaagttgttgaatagttggagtgttctgcattcatgtggaagaggctaaaggatgtttgatgaagcactatgggctgccctggaagaggactgaagaagcagctgcaggaaagaaacgtccactctgctccagtcaaccccactgctggtgtcctctgcactgccttgcactccctgaagagagcctgggcaacagagcgagactccatctcaaaaaaaaaaaaaaaaaaaattggggactatgtatatagatttactacactgaagccctccagcagtctaagaactgatgcctctaacgaaggaaaggactgcatgtttctgatgaagctaccatgacctaccagatttccaacgcctgccaaaattaatctatttgtctgtggtagaagaggccataccattgtggcccttgaaacttactgtatgatgttttatttagtgaacagttcacatacccaaatggttgtaactgatactgctgaatatattgtaagaacagaagtgttaagtatgtataacacttcttttgattgtaaggaatgttcccagtggggaaatgccataattaaaacagtgatcgtgggatgaaaacatgat

SEQ ID NO: 306880 - DNA, 501 bp, Homo sapiens
gtcccagctactccggaggctgaggcaggaaaatcacttgaacccaggaggcggaggttgaagtgagccgagatcacaccactgcactccagcctgggcaacagagcaagactctgtaaaaaaaaaaaaaaaattggggactatgtatatagatttactacactgaagccctccagcagtctaagaactgatgcctctaacgaaggaaaggactgcatgtttctgatgaagctaccatgacctaccagatttccaacgcctgccaaaattaatctatttgtctgtggtagaagaggccataccattgtggcccttgaaacttactgtatgatgttttatttagtgaacagttcacatacccaaatggttgtaactgatactgctgaatatattgtaagaacagaagtgttaagtatgtataacacttcttttgattgtaaggaatgttcccagtggggaaatgccataattaaaacagtgatcgtgggatgaaaacatgat

SEQ ID NO: 306881 - DNA, 265 bp, Homo sapiens
gctaccatgacctaccagatttccaacgcctgccaaaattaatctatttgtctgtggtagaagaggccataccattgtggcccttgaaacttactgtatgatgttttatttagtgaacagttcacatacccaaatggttgtaactgatactgctgaatatattgtaagaacagaagtgttaagtatgtataacacttcttttgattgtaaggaatgttcccagtggggaaatgccataattaaaacagtgatcgtgggatgaaaa

SEQ ID NO: 306882 - DNA, 595 bp, Homo sapiens
caagagcaaaactctgtctcaaaagaaaagaagaaaaaaagtttgtagatgctgagcagaaggcaacttaaatctgaaagtaagtccaaaactgtgcttattggtgtggaactgctcctgtcacacccccgatctcttcctctctcttaccctgacctctgttcctttaaggaaagaaacgtccactctgctccagtcaaccccactgctggtgtcctctgcactgccttgcactccctgaagagagcctgggcaacagagcgagactccatctcaaaaaaaaaaaaaaaaaaaattggggactatgtatatagatttactacactgaagccctccagcagtctaagaactgatgcctctaacgaaggaaaggactgcatgtttctgatgaagctaccatgacctaccagatttccaacgcctgccaaaattaatctatttgtctgtggtagaagaggccataccattgtggcccttgaaacttactgtatgatgttttatttagtgaacagttcacatacccaaatggttgtaactgatactgctgaatatattgtaagaacagaagtgttaagtatgtataacacttcttttg

SEQ ID NO: 306883 - DNA, 1328 bp, Homo sapiens
cagacttgccacaggaaatgagccctctccagggtcaccctagaatcagatctgctccccagcatcttctgtttcctggtgagtgattcctgctactttggatggccatgacgggctggagctgccttgtgacaggagcaggagggtttctgggacagaggatcatccgcctcttggtgaaggagaaggagctgaaggagatcagggtcttggacaaggccttcggaccagaattgagagaggaattttctaaactccagaacaagaccaagctgacagtgctggaaggagacattctggatgagccattcctgaagagagcctgccaggacgtctcggtcatcatccacaccgcctgtatcattgatgtcttcggtgtcactcacagagagtctatcatgaatgtcaatgtgaaaggtatggtaggctggggaggagatgcagcaaggtggggaattaaggatcacaaagaagggcaggaagggaagagaagtccctccactgaacacctgctgtgctctgggccaagtgcctttgctgatcactacgaataggagagttcaagactgctaactttagttttttagatgataaaactaggactgagagagggcaagtaacttgtccaaggtcccccaggtaagtaagcaggtaggagagttagactttaaactcatccctgtgtgactccaaaggctctttctactgtgactccaaaagctctttctactgtggttccaatcaaaagtcaactaatttctgacttcagactcttgatacccagacaccccttgcctcccaggccagaagcagaccttgcaggtgccactgtagtcaccattttgaaccttgtgtgtaggctgatgaaaacattcagagccctcctgcccacctcaaacaaaaagtcctctcgagagaactagcaaagctggttcacaaggtctgtcaggacagaattatccagcacatgccttcccacaatatttttttaacagtgagatttttccagtatcaagaatacagtctcttcagctcaccacagggcctactattccagagccgttttcagccaggtgcccaaagtgcaccctcatttaatcttcatcccttaaatgcttggcgtttcctttcaaagtatggctttccaactaccttaaattcagacacatttccttaaggaatcttctcagaaatctcaccctctgatctccagagtccagtctcttcagcaccatagcaccccaaaccccggcctggccctccgcatttagtctactctgactctttttccaaagcaaccaattgcttttgagtctccagcaccataa

SEQ ID NO: 306884 - DNA, 555 bp, Homo sapiens
acctgacagctcactgctcagattacttttctaaaatgagatgggagagaaacagatgtttgctctttccaagaaattgatacacatgctgatttctgtgccttttttacttgttctttccgtagaatgtacaccctccactctaacaccctactctaaccatccttgaacacctatgtaacatcacctttatcagaaaacttctcagccagatacagaaatcattccaatgacctgacctgtgttcacacagaactccagaacaagaccaagctgacagtgctggaaggagacattctggatgagccattcctgaagagagcctgccaggacgtctcggtcatcatccacaccgcctgtatcattgatgtcttcggtgtcactcacagagagtctatcatgaatgtcaatgtgaaaggtatggtaggctggggaggagatgcagcaaggaggaggaggaattcgcccaggaggaggaggaattcgcccaggaggaggaggaattcgcccaggaggaggaggaattcgcccaaggaggaggaggaaattcgccca

SEQ ID NO: 306885 - DNA, 428 bp, Homo sapiens
cctatgtaacatcacctttatcagaaaacttctcagctagatacagaaatcattccaatgacctaacctctgctcacacagaactccagaacaagatcaagctgacagtgctggaaggagacattctggatgagccattcctgaagagagcctgccaggacgtgtcggtcgtcatccacaccgcctgtatcattgatgtcttcggagtcactcacagacagtctatcatgaatgtcaatgtgaaagctcctgttggaggcctgtgtccaagctactgtgccagtcttcatctacaccagtaccctccagttagccgggcccaactcctacaaggaaatcattgagaatgcccatgaagaagactttctggaaaacacatggtctgctccatatccatacagcaaaaagcttgctgagaaggctgtgct

SEQ ID NO: 306886 - DNA, 1705 bp, Homo sapiens
cagacttgccacaggaaatgaggtgagaagtacgtccactcttctgtccagcttttaacaatctaactaatgccctctccagggtcaccctagaatcagatctgctccccagcatcttctgtttcctggtgagtgattcctgctactttggatggccatgacgggctggagctgccttgtgacaggagcaggagggtttctgggacagaggatcatccgcctcttggtgaaggagaaggagctgaaggagatcagggtcttggacaaggccttcggaccagaattgagagaggaattttctaaactccagaacaagaccaagctgacagtgctggaaggagacattctggatgagccattcctgaagagagcctgccaggacgtctcggtcatcatccacaccgcctgtatcattgatgtcttcggtgtcactcacagagagtctatcatgaatgtcaatgtgaaaggtacccagctcctgttagaggcctgtgtccaagctagtgtgccagtcttcatctacaccagtagcatagaggtagccgggcccaactcctacaaggaaatcatccagaatggccatgaagaagagcctctggaaaacacatggcccgctccatacccacacagcaaaaagcttgctgagaaggctgtactggcggctaacgggtggaatctgaaaaacggcggcaccctgtacacttgtgccttacgacccatgtatatctatggggaaggaagccgattcctttctgctagtataaacgaggccctgaacaacaatgggatcctgtcaagtgttggaaagttctccactgttaacccagtctatgttggcaatgtggcctgggcccacattctggccttgagggccctgcaggaccccaagaaggccccaagcatccgaggacagttctactatatctcagatgacacgcctcaccaaagctatgataaccttaattacaccctgagcaaagagttcggcctccgccttgattccagatggagctttcctttatccctgatgtattggattggcttcctgctggaaatagtgagcttcctactcaggccaatttacacctatcgaccgcccttcaaccgccacatagtcacattgtcaaatagcgtattcaccttctcttataagaaggctcagcgagatttggcgtataagccactctacagctgggaggaagccaagcagaaaacggtggagtgggttggttcccttgtggaccggcacaaggagaacctgaagtccaagactcagtgatttaaggatgacagagatgtgcatgtgggtattgttaggagatgtcatcaagctccaccctcctggcctcatacagaaagtgacaagggcacaagctcaggtcctgctgcctccctttcatacaatggccaacttattgtattcctcatgtcatcaaaacctgcgcagtcattggcccaacaagaaggtttctgtcctaatcatataccagaggaaagaccatgtggtttgctgttaccaaatctcagtagctgattctgaacaatttagggactcttttaacttgagggtcgttttgactactagagctccatttctactcttaaatgagaaaggatttcctttctttttaatcttccattccttcacatagtttgataaaaagatcaataaatgtttgaatgtttaatgtggagggaggtgtga

SEQ ID NO: 306887 - DNA, 2158 bp, Homo sapiens
cagacttgccacaggaaatgaggtgagaagtacgtccactcttctgtccagcttttaacaatctaactaatgccctctccagggtcaccctagaatcagatctgctccccagcatcttctgtttcctggtgagtgattcctgctactttggatggccatgacgggctggagctgccttgtgacaggagcaggagggtttctgggacagaggatcatccgcctcttggtgaaggagaaggagctgaaggagatcagggtcttggacaaggccttcggaccagaattgagagaggaattttctaaactccagaacaagaccaagctgacagtgctggaaggagacattctggatgagccattcctgaagagagcctgccaggacgtctcggtcatcatccacaccgcctgtatcattgatgtcttcggtgtcactcacagagagtctatcatgaatgtcaatgtgaaaggtacccagctcctgttagaggcctgtgtccaagctagtgtgccagtcttcatctacaccagtagcatagaggtagccgggcccaactcctacaaggaaatcatccagaatggccatgaagaagagcctctggaaaacacatggcccgctccatacccacacagcaaaaagcttgctgagaaggctgtactggcggctaacgggtggaatctgaaaaacggcggcaccctgtacacttgtgccttacgacccatgtatatctatggggaaggaagccgattcctttctgctagtataaacgaggccctgaacaacaatgggatcctgtcaagtgttggaaagttctccactgttaacccagtctatgttggcaatgtggcctgggcccacattctggccttgagggccctgcaggaccccaagaaggccccaagcatccgaggacagttctactatatctcagatgacacgcctcaccaaagctatgataaccttaattacaccctgagcaaagagttcggcctccgccttgattccagatggagctttcctttatccctgatgtattggattggcttcctgctggaaatagtgagcttcctactcaggccaatttacacctatcgaccgcccttcaaccgccacatagtcacattgtcaaatagcgtattcaccttctcttataagaaggctcagcgagatttggcgtataagccactctacagctgggaggaagccaagcagaaaacggtggagtgggttggttcccttgtggaccggcacaaggagaacctgaagtccaagactcagtgatttaaggatgacagagatgtgcatgtgggtattgttaggagatgtcatcaagctccaccctcctggcctcatacagaaagtgacaagggcacaagctcaggtcctgctgcctccctttcatacaatggccaacttattgtattcctcatgtcatcaaaacctgcgcagtcattggcccaacaagaaggtttctgtcctaatcatataccagaggaaagaccatgtggtttgctgttaccaaatctcagtagctgattctgaacaatttagggactcttttaacttgagggtcgttttgactactagagctccatttctactcttaaatgagaaaggatttcctttctttttaatcttccattccttcacatagtttgataaaaagatcaataaatgtttgaatgacaaaaaaaaaaaaaaaaaaaaaaaaaaaaaaaaaaaaaaaaaaaaaaaacaaaaaaaaaaacagacaagagagagagagaagagagagaagagaaagaaaaagaaagaagacaaacaagaacaagacaaaaaagagggagcgaggaggcgacaccagaaagacgcagcaacaaagggagagaggggagagcgcgggcgcggggggagaaggacaggagaggaagagaacaaaatagaggctacggaatggagctatcgcggggcgaaggagaaagacaaacggggggcgaggtagaaaaaaaaagaatgggtaacaagatgaaaaaaaacaaatatcccggagacagaagctagtagcgggaaggacgatcaaggagaggtgaactacaaagacatgaggatgataaaaagacaaggggagaggatgacgagaaagggagcaaacgaacacgtcgaaatggagagaaagataag

SEQ ID NO: 306888 - DNA, 1707 bp, Homo sapiens
gtttgcaaaaaaaatggggtggaggaaaatgaggcatctgtgtgagtatataaccatttgacatctctttttagccctctccagggtcaccctagaatcagatctgctccccagcatcttctgtttcctggtgagtgattcctgctactttggatggccatgacgggctggagctgccttgtgacaggagcaggagggtttctgggacagaggatcatccgcctcttggtgaaggagaaggagctgaaggagatcagggtcttggacaaggccttcggaccagaattgagagaggaattttctaaactccagaacaagaccaagctgacagtgctggaaggagacattctggatgagccattcctgaagagagcctgccaggacgtctcggtcatcatccacaccgcctgtatcattgatgtcttcggtgtcactcacagagagtctatcatgaatgtcaatgtgaaaggtacccagctcctgttagaggcctgtgtccaagctagtgtgccagtcttcatctacaccagtagcatagaggtagccgggcccaactcctacaaggaaatcatccagaatggccatgaagaagagcctctggaaaacacatggcccgctccatacccacacagcaaaaagcttgctgagaaggctgtactggcggctaacgggtggaatctgaaaaacggcggcaccctgtacacttgtgccttacgacccatgtatatctatggggaaggaagccgattcctttctgctagtataaacgaggccctgaacaacaatgggatcctgtcaagtgttggaaagttctccactgttaacccagtctatgttggcaatgtggcctgggcccacattctggccttgagggccctgcaggaccccaagaaggccccaagcatccgaggacagttctactatatctcagatgacacgcctcaccaaagctatgataaccttaattacaccctgagcaaagagttcggcctccgccttgattccagatggagctttcctttatccctgatgtattggattggcttcctgctggaaatagtgagcttcctactcaggccaatttacacctatcgaccgcccttcaaccgccacatagtcacattgtcaaatagcgtattcaccttctcttataagaaggctcagcgagatttggcgtataagccactctacagctgggaggaagccaagcagaaaacggtggagtgggttggttcccttgtggaccggcacaaggagaacctgaagtccaagactcagtgatttaaggatgacagagatgtgcatgtgggtattgttaggagatgtcatcaagctccaccctcctggcctcatacagaaagtgacaagggcacaagctcaggtcctgctgcctccctttcatacaatggccaacttattgtattcctcatgtcatcaaaacctgcgcagtcattggcccaacaagaaggtttctgtcctaatcatataccagaggaaagaccatgtggtttgctgttaccaaatctcagtagctgattctgaacaatttagggactcttttaacttgagggtcgttttgactactagagctccatttctactcttaaatgagaaaggatttcctttctttttaatcttccattccttcacatagtttgataaaaagatcaataaatgtttgaatgtttaatgtggagggaggtgtga

SEQ ID NO: 306889 - DNA, 1738 bp, Homo sapiens
tattgaagagtttatattgcctatatacaatggtgtatgtgtgtgtgtgatgtgaattcttcaactgcccattttgcctaaggactggaactgtccatattcacagagtatagcctcctgattttttagattttaaatgatctgactttaatggtactgattacaaatcataatttgtcaatacccttacttggcaaaataaaaagtgataaccctaggtccctttccaaaattaaagtacacacacacacacatccatgaaacccaaaagtctagaaattcttactctccagaacccacatgtcagtttctcttcattttggtatttttcttatggctgtagtacgaccaaatctcagacagaaccacagaagaatgtaccctgagtctgttacaaccaccatatttgggagtggggggtggggcacatagatctgtgttcgtggttggcacctcttagggatatatcctgacagtgacaatatgctcttcatggacaggtacccagctcctgttagaggcctgtgtccaagctagtgtgccagtcttcatctacaccagtagcatagaggtagccgggcccaactcctacaaggaaatcatccagaatggccatgaagaagagcctctggaaaacacatggcccgctccatacccacacagcaaaaagcttgctgagaaggctgtactggcggctaacgggtggaatctgaaaaacggcggcaccctgtacacttgtgccttacgacccatgtatatctatggggaaggaagccgattcctttctgctagtataaacgaggccctgaacaacaatgggatcctgtcaagtgttggaaagttctccactgttaacccagtctatgttggcaatgtggcctgggcccacattctggccttgagggccctgcaggaccccaagaaggccccaagcatccgaggacagttctactatatctcagatgacacgcctcaccaaagctatgataaccttaattacaccctgagcaaagagttcggcctccgccttgattccagatggagctttcctttatccctgatgtattggattggcttcctgctggaaatagtgagcttcctactcaggccaatttacacctatcgaccgcccttcaaccgccacatagtcacattgtcaaatagcgtattcaccttctcttataagaaggctcagcgagatttggcgtataagccactctacagctgggaggaagccaagcagaaaacggtggagtgggttggttcccttgtggaccggcacaaggagaacctgaagtccaagactcagtgatttaaggatgacagagatgtgcatgtgggtattgttaggagatgtcatcaagctccaccctcctggcctcatacagaaagtgacaagggcacaagctcaggtcctgctgcctccctttcatacaatggccaacttattgtattcctcatgtcatcaaaacctgcgcagtcattggcccaacaagaaggtttctgtcctaatcatataccagaggaaagaccatgtggtttgctgttaccaaatctcagtagctgattctgaacaatttagggactcttttaacttgagggtcgttttgactactagagctccatttctactcttaaatgagaaaggatttcctttctttttaatcttccattccttcacatagtttgataaaaagatcaataaatgtttgaatgtttaatgtggagggaggtgtga

SEQ ID NO: 306890 - DNA, 1467 bp, Homo sapiens
acgatctaagacgaagaggggataggtctgtaaggctcggacagaattgagtgaggaatttctaaactccagaacaagaccaagctgacagtgctggaaggagacattctggatgagccattcctgaagagagcctgccaggacgtctcggtcatcatccacaccgcctgtatcattgatgtcttcggtgtcactcacagagagtctatcatgaatgtcaatgtgaaaggtacccagctcctgttagaggcctgtgtccaagctagtgtgccagtcttcatctacaccagtagcatagaggtagccgggcccaactcctacaaggaaatcatccagaatggccatgaagaagagcctctggaaaacacatggcccgctccatacccacacagcaaaaagcttgctgagaaggctgtactggcggctaacgggtggaatctgaaaaacggcggcaccctgtacacttgtgccttacgacccatgtatatctatggggaaggaagccgattcctttctgctagtataaacgaggccctgaacaacaatgggatcctgtcaagtgttggaaagttctccactgttaacccagtctatgttggcaatgtggcctgggcccacattctggccttgagggccctgcaggaccccaagaaggccccaagcatccgaggacagttctactatatctcagatgacacgcctcaccaaagctatgataaccttaattacaccctgagcaaagagttcggcctccgccttgattccagatggagctttcctttatccctgatgtattggattggcttcctgctggaaatagtgagcttcctactcaggccaatttacacctatcgaccgcccttcaaccgccacatagtcacattgtcaaatagcgtattcaccttctcttataagaaggctcagcgagatttggcgtataagccactctacagctgggaggaagccaagcagaaaacggtggagtgggttggttcccttgtggaccggcacaaggagaacctgaagtccaagactcagtgatttaaggatgacagagatgtgcatgtgggtattgttaggagatgtcatcaagctccaccctcctggcctcatacagaaagtgacaagggcacaagctcaggtcctgctgcctccctttcatacaatggccaacttattgtattcctcatgtcatcaaaacctgcgcagtcattggcccaacaagaaggtttctgtcctaatcatataccagaggaaagaccatgtggtttgctgttaccaaatctcagtagctgattctgaacaatttagggactcttttaacttgagggtcgttttgactactagagctccatttctactcttaaatgagaaaggatttcctttctttttaatcttccattccttcacatagtttgataaaaagatcaataaatgtttgaatgtttaatgtggagggaggtgtga

SEQ ID NO: 306891 - DNA, 918 bp, Homo sapiens
cagacttgccacaggaaatgaggtgagaagtacgtccactcttctgtccagcttttaacaatctaactaatgccctctccagggtcaccctagaatcagatctgctccccaagcatccgaggacagttctactatatctcagatgacacgcctcaccaaagctatgataaccttaattacaccctgagcaaagagttcggcctccgccttgattccagatggagctttcctttatccctgatgtattggattggcttcctgctggaaatagtgagcttcctactcaggccaatttacacctatcgaccgcccttcaaccgccacatagtcacattgtcaaatagcgtattcaccttctcttataagaaggctcagcgagatttggcgtataagccactctacagctgggaggaagccaagcagaaaacggtggagtgggttggttcccttgtggaccggcacaaggagaacctgaagtccaagactcagtgatttaaggatgacagagatgtgcatgtgggtattgttaggagatgtcatcaagctccaccctcctggcctcatacagaaagtgacaagggcacaagctcaggtcctgctgcctccctttcatacaatggccaacttattgtattcctcatgtcatcaaaacctgcgcagtcattggcccaacaagaaggtttctgtcctaatcatataccagaggaaagaccatgtggtttgctgttaccaaatctcagtagctgattctgaacaatttagggactcttttaacttgagggtcgttttgactactagagctccatttctactcttaaatgagaaaggatttcctttctttttaatcttccattccttcacatagtttgataaaaagatcaataaatgtttgaatgtttaatgtggagggaggtgtga

SEQ ID NO: 306892 - DNA, 1034 bp, Homo sapiens
  misc_feature (862)..(862): n is a, c, g, or t
  misc_feature (865)..(865): n is a, c, g, or t
  misc_feature (965)..(965): n is a, c, g, or t
  misc_feature (1016)..(1016): n is a, c, g, or t
cagacttgccacaggaaatgaggtgagaagtacgtccactcttctgtccagcttttaacaatctaactaatgccctctccagggtcaccctagaatcagatctgctccccagcatcttctgtttcctggtgagtgattcctgctactttggatggccatgacgggctggagctgccttgtgacaggagcaggagggtttctgggacagaggatcatccgcctcttggtgaaggagaaggagctgaaggagatcagggtcttggacaaggccttcggaccagaattgagagaggaattttctaaactccagaacaagaccaagctgacagtgctggaaggagacattctggatgagccattcctgaagagagcctgccaggacgtctcggtcatcatccacaccgcctgtatcattgatgtcttcggtgtcactcacagagagtctatcatgaatgtcaatgtgaaaggtacccagctcctgttagaggcctgtgtccaagctagtgtgccagtcttcatctacaccagtagcatagaggtagccgggcccaactcctacaaggaaatcatccagaatggccatgaagaagagcctctggaaaacacatggcccgctccatacccacacagcaaaaagcttgctgagaaggctgtactggcggctaacgggtggaatctgaaaaacggcggcaccctgtacacttgtgccttacgacccatgtatatctatggggaaggaagccgattcctttctgctagtataaacgaggccctgaacaacaatgggatcctgtcaagtgttggagtctcactgttatcagtttgtgcatgtgctggcacattgctgaggctgcagaccaanagnccagctcgagaagtctctttctcgatgcacgctcacaagtatgtactatacactggcagagtcgctcgctgatcagtgagcttctttctgtgtttgttgntctgtgtatatggcttcatctgcattcacatcgacgcctcacgcactagtncatgtcatacgtttactt

SEQ ID NO: 306893 - DNA, 767 bp, Homo sapiens
cagacttgccacaggaaatgaggtgagaagtacgtccactcttctgtccagcttttaacaatctaactaatgccctctccagggtcaccctagaatcagatctgctccccagcatcttctgtttcctggtgagtgattcctgctactttggatggccatgacgggctggagctgccttgtgacaggagcaggagggtttctgggacagaggatcatccgcctcttggtgaaggagaaggagctgaaggagatcagggtcttggacaaggccttcggaccagaattgagagaggaattttctagaccggcacaaggagaacctgaagtccaagactcagtgatttaaggatgacagagatgtgcatgtgggtattgttaggagatgtcatcaagctccaccctcctggcctcatacagaaagtgacaagggcacaagctcaggtcctgctgcctccctttcatacaatggccaacttattgtattcctcatgtcatcaaaacctgcgcagtcattggcccaacaagaaggtttctgtcctaatcatataccagaggaaagaccatgtggtttgctgttaccaaatctcagtagctgattctgaacaatttagggactcttttaacttgagggtcgttttgactactagagctccatttctactcttaaatgagaaaggatttcctttctttttaatcttccattccttcacatagtttgataaaaagatcaataaatgtttgaatgtttaatgtggagggaggtgtga

SEQ ID NO: 306894 - DNA, 441 bp, Homo sapiens
tacaatcgagctcggcccagttttacatgagatgtgcatgtgggtattgttaggagatgtcatcaagctccaccctcctggcctcatacagaaagtgacaagggcacaagctcaggtcctgctgcctccctttcatacaatggccaacttattgtattcctcatgtcatcaaaacctgcgcagtcattggcccaacaagaaggtttctgtcctaatcatataccagaggaaagaccatgtggtttgctgttaccaaatctcagtagctgattctgaacaatttagggactcttttaacttgagggtcgttttgactactagagctccatttctactcttaaatgagaaaggatttcctttctttttaatcttccattccttcacatagtttgataaaaagatcaataaatgtttgaatgtttaatgtggagggaggtgtga

SEQ ID NO: 306895 - DNA, 683 bp, Homo sapiens
cagacttgccacaggaaatgaggtgagaagtacgtccactcttctgtccagcttttaacaatctaactaatgccctctccagggtcaccctagaatcagatctgctccccagcatcttctgtttcctggtgagtgattcctgctactttggatggccatgacgggctggagctgccttgtgacaggagcaggagggtttctgggacagaggatcatccgcctcttggtgaaggagaaggagctgaaggagatcagggtcttggacaaggccttcggaccagaattgagagaggaattttctaaactccagaacaagaccaagctgacagtgctggaaggagacattctggatgagccattcctgaagagagcctgccaggacgtctcggtcatcatccacaccgcctgtatcattgatgtcttcggtgtcactcacagagagtctatcatgaatgtcaatgtgaaaggtacccagctcctgttagaggcctgtgtccaagctagtgtgccagtcttcatctacaccagtagcatagaggtagccgggcccaactcctacaaggaaatcatccagaatggccatgaagaagagcctctggaaaacacatggcccgcacatccgtactggcccgccttcaccccaagtgtctgacaccgtatgcccgcacatccgtactggcccg

SEQ ID NO: 306896 - DNA, 1329 bp, Homo sapiens
acctgacagctcactgctcagattacttttctaaaatgagatgggagagaaacagatgtttgctctttccaagaaattgatacacatgctgatttctgtgccttttttacttgttctttccgtagaatgtacaccctccactctaacaccctactctaaccatccttgaacacctatgtaacatcacctttatcagaaaacttctcagccagatacagaaatcattccaatgacctgacctgtgttcacacagaactccagaacaagaccaagctgacagtgctggaaggagacattctggatgagccattcctgaagagagcctgccaggacgtctcggtcatcatccacaccgcctgtatcattgatgtcttcggtgtcactcacagagagtctatcatgaatgtcaatgtgaaaggtatggtaggctggggaggagatgcagcaaggtggggaattaaggatcacaaagaagggcaggaagggaagagaagtccctccactgaacacctgctgtgctctgggccaagtgcctttgctgatcactacgaataggagagttcaagactgctaactttagttttttagatgataaaactaggactgagagagggcaagtaacttgtccaaggtcccccaggtaagtaagcaggtaggagagttagactttaaactcatccctgtgtgactccaaaggctctttctactgtgactccaaaagctctttctactgtggttccaatcaaaagtcaactaatttctgacttcagactcttgatacccagacaccccttgcctcccaggccagaagcagaccttgcaggtgccactgtagtcaccattttgaaccttgtgtgtaggctgatgaaaacattcagagccctcctgcccacctcaaacaaaaagtcctctcgagagaactagcaaagctggttcacaaggtctgtcaggacagaattatccagcacatgccttcccacaatatttttttaacagtgagatttttccagtatcaagaatacagtctcttcagctcaccacagggcctactattccagagccgttttcagccaggtgcccaaagtgcaccctcatttaatcttcatcccttaaatgcttggcgtttcctttcaaagtatggctttccaactaccttaaattcagacacatttccttaaggaatcttctcagaaatctcaccctctgatctccagagtccagtctcttcagcaccatagcaccccaaaccccggcctggccctccgcatttagtctactctgactctttttccaaagcaaccaattgcttttgagtctccagcaccataa

SEQ ID NO: 306897 - DNA, 1051 bp, Homo sapiens
cagacttgccacaggaaatgaggtgagaagtacgtccactcttctgtccagcttttaacaatctaactaatgccctctccagggtcaccctagaatcagatctgctccccagcatcttctgtttcctggtgagtgattcctgctactttggatggccatgacgggctggagctgccttgtgacaggagcaggagggtttctgggacagaggatcatccgcctcttggtgaaggagaaggagctgaaggagatcagggtcttggacaaggccttcggaccagaattgagagaggaattttctagtaagtaaacttgggtcatgggtgtgtggttccatcttaaacactgcatgtatgtggggggagatggaccttgtctagcaagttattgaaatttgtagccaaatctaagccaatctcacatccaaagtcatcaagaaataaatattaaatagtataaaatggcatagtatgaaagatactgggtgggatttccagagactagattctggccctgacccagaacttgagaagcagccacctcagcctccaggcctcttttcttctcatctagaaaatcccacatcagttctttgtcttgtctgcaactcttttatgttctgaagcttttgtcttggcaattgctgtacaacattcataaaggacactattaccctggagacctcaccaatgggtcattgtctctctagaacgtgccaggctgtgttttgttttgcagcttccttagtatcctttgtgagggcaaaataaaaggaagttaaggtaaagatgagtgtataagtgggtgtgtgtgacagagagagaggaaaacaataagggggagagagagtcggggagagagagtcggggagagagactcagagagagagacaatgagaaagacagagaaataatgaaaaatatatagtgagagagagagcatcagtgagagaatgtgtgtgcacagtgcacagcacagagcagagacagagtaagaggcagtataaggccagacatgcctcatttagattttgcatatatggctttttttt

SEQ ID NO: 306898 - DNA, 519 bp, Homo sapiens
  misc_feature (18)..(18): n is a, c, g, or t
  misc_feature (74)..(74): n is a, c, g, or t
  misc_feature (80)..(81): n is a, c, g, or t
  misc_feature (87)..(87): n is a, c, g, or t
  misc_feature (89)..(89): n is a, c, g, or t
  misc_feature (91)..(91): n is a, c, g, or t
  misc_feature (103)..(104): n is a, c, g, or t
  misc_feature (106)..(106): n is a, c, g, or t
  misc_feature (114)..(116): n is a, c, g, or t
  misc_feature (134)..(134): n is a, c, g, or t
  misc_feature (152)..(153): n is a, c, g, or t
  misc_feature (155)..(157): n is a, c, g, or t
  misc_feature (159)..(159): n is a, c, g, or t
  misc_feature (165)..(166): n is a, c, g, or t
  misc_feature (184)..(184): n is a, c, g, or t
  misc_feature (188)..(188): n is a, c, g, or t
  misc_feature (191)..(191): n is a, c, g, or t
  misc_feature (194)..(194): n is a, c, g, or t
  misc_feature (200)..(202): n is a, c, g, or t
  misc_feature (208)..(209): n is a, c, g, or t
  misc_feature (211)..(213): n is a, c, g, or t
  misc_feature (221)..(221): n is a, c, g, or t
  misc_feature (227)..(228): n is a, c, g, or t
  misc_feature (231)..(231): n is a, c, g, or t
  misc_feature (233)..(233): n is a, c, g, or t
  misc_feature (235)..(238): n is a, c, g, or t
  misc_feature (242)..(244): n is a, c, g, or t
cgtaacagcccaccaacnaaacaacaaaaaccgccacgcccggccggaaaggcgccaaaccaaaaaccacaacngcaacnnaaatangnangcagggaaccannanacacagcnnnagcgcccgaggtggatcnacagcgaagtaaaccgtnnannngntgcctnngaagaaacaaacgcaaancccnaanacngaaccnnngcagcnngnnngggaaganaagccnnaangnannnnaggnnncatcaaaacctgcgcagtcattggcccaacaagaaggtttctgtcctaatcatataccagaggaaagaccatgtggtttgctgttaccaaatctcagtagctgattctgaacaatttagggactcttttaacttgagggtcgttttgactactagagctccatttctactcttaaatgagaaaggatttcctttctttttaatcttccattccttcacatagtttgataaaaagatcaataaatgtttgaatgtttaatgtggagggaggtgtga

SEQ ID NO: 306899 - DNA, 1363 bp, Homo sapiens
aggttaatcttaaaagcccaggttacccgcggaaatttatgctgtccggtcaccgtgacaatgcagctgaggaacccagaactacatctgggctgcgcgcttgcgcttcgcttcctggccctcgtttcctgggacatccctggggctagagcactggacaatggattggcaaggacgcctaccatgggctggctgcactgggagcgcttcatgtgcaaccttgactgccaggaagagccagattcctgcatcagtgagaagctcttcatggagatggcagagctcatggtctcagaaggctggaaggatgcaggttatgagtacctctgcattgatgactgttggatggctccccaaagagattcagaaggcagacttcaggcagaccctcagcgctttcctcatgggattcgccagctagctaattatgttcacagcaaaggactgaagctagggatttatgcagatgttggaaataaaacctgcgcaggcttccctgggagttttggatactacgacattgatgcccagacctttgctgactggggagtagatctgctaaaatttgatggttgttactgtgacagtttggaaaatttggcagatggttataagcacatgtccttggccctgaataggactggcagaagcattgtgtactcctgtgagtggcctctttatatgtggccctttcaaaagcccaattatacagaaatccgacagtactgcaatcactggcgaaattttgctgacattgatgattcctggaaaagtataaagagtatcttggactggacatcttttaaccaggagagaattgttgatgttgctggaccagggggttggaatgacccagatatgttagtgattggcaactttggcctcagctggaatcagcaagtaactcagatggccctctgggctatcatggctgctcctttattcatgtctaatgacctccgacacatcagccctcaagccaaagctctccttcaggataaggacgtaattgccatcaatcaggaccccttgggcaagcaagggtaccagcttagacagggagacaactttgaagtgtgggaacgacctctctcaggcttagcctgggctgtagctatgataaaccggcaggagattggtggacctcgctcttataccatcgcagttgcttccctgggtaaaggagtggcctgtaatcctgcctgcttcatcacacagctcctccctgtgaaaaggaagctagggttctatgaatggacttcaaggttaagaagtcacataaatcccacaggcactgttttgcttcagctagaaaatacaatgcagatgtcattaaaagacttactttaaaatgttaaaaaaa

SEQ ID NO: 306900 - DNA, 2237 bp, Homo sapiens
aggttaatcttaaaagcccaggttacccgcggaaatttatgctgtccggtcaccgtgacaatgcagctgaggaacccagaactacatctgggctgcgcgcttgcgcttcgcttcctggccctcgtttcctgggacatccctggggctagagcactggacaatggattggcaaggacgcctaccatgggctggctgcactgggagcgcttcatgtgcaaccttgactgccaggaagagccagattcctgcatcagtgagaagctcttcatggagatggcagagctcatggtctcagaaggctggaaggatgcaggttatgagtacctctgcattgatgactgttggatggctccccaaagagattcagaaggcagacttcaggcagaccctcagcgctttcctcatgggattcgccagctagctaattatgttcacagcaaaggactgaagctagggatttatgcagatgttggaaataaaacctgcgcaggcttccctgggagttttggatactacgacattgatgcccagacctttgctgactggggagtagatctgctaaaatttgatggttgttactgtgacagtttggaaaatttggcagatggtaatgtttcattccagagatttagccacaaaggaaagaactttgaggccatggtagctgagccaaagaaccaatcttcagaattttaaataccctgtcacaatactggaaataattattctccatgtgccagagctcccatctcttctctttcagttcattaattaattaattaattcatgtaaaatccatgcatacctaaccatagctaatattgtgcacttataattcaagagggctctaagagttaattagtaattgtaactctctataacatcatttaggggagtccaggttgtcaatcggtcacagagaaagaagcatcttcattcctgcctttcctcaatatacacaccatctctgcactacttcctcagaacaatcccagcagtctgggaggtactttacacaatttaagcacagagcaactgcctgtccctgctgctagtttaaacatgaaccttccaggtagcctcttcttaaaatatacagccccagctgggcatgatggctcatgcctgtaatcctagcactttgggaggctgaggcgggtggattacttgaggtcaggagttcgagaccaccctggccaacatggtgaaaccccatctctagtaaaaatacaaaaattagctgactttggtggcacatgcctgtaatcccagctacttgggaagctgagacagaagagtcacttgaacctgggaaacagaggttgcagtgagccaagatcgcaccactgcactccaccctggatgacagactgaaccccatctcaaaaaattaaaataaaataaaataaaataactatatatatagccccagctggaaattcatttctttcccttattttacccattgttttctcatacaggttataagcacatgtccttggccctgaataggactggcagaagcattgtgtactcctgtgagtggcctctttatatgtggccctttcaaaagcccaattatacagaaatccgacagtactgcaatcactggcgaaattttgctgacattgatgattcctggaaaagtataaagagtatcttggactggacatcttttaaccaggagagaattgttgatgttgctggaccagggggttggaatgacccagatatgttagtgattggcaactttggcctcagctggaatcagcaagtaactcagatggccctctgggctatcatggctgctcctttattcatgtctaatgacctccgacacatcagccctcaagccaaagctctccttcaggataaggacgtaattgccatcaatcaggaccccttgggcaagcaagggtaccagcttagacagggagacaactttgaagtgtgggaacgacctctctcaggcttagcctgggctgtagctatgataaaccggcaggagattggtggacctcgctcttataccatcgcagttgcttccctgggtaaaggagtggcctgtaatcctgcctgcttcatcacacagctcctccctgtgaaaaggaagctagggttctatgaatggacttcaaggttaagaagtcacataaatcccacaggcactgttttgcttcagctagaaaatacaatgcagatgtcattaaaagacttactttaaaatgttaaaaaaa

SEQ ID NO: 306901 - DNA, 1580 bp, Homo sapiens
aggttaatcttaaaagcccaggttacccgcggaaatttatgctgtccggtcaccgtgacaatgcagctgaggaacccagaactacatctgggctgcgcgcttgcgcttcgcttcctggccctcgtttcctgggacatccctggggctagagcactggacaatggattggcaaggacgcctaccatgggctggctgcactgggagcgcttcatgtgcaaccttgactgccaggaagagccagattcctgcatcagtgagaagctcttcatggagatggcagagctcatggtctcagaaggctggaaggatgcaggttatgagtacctctgcattgatgactgttggatggctccccaaagagattcagaaggcagacttcaggcagaccctcagcgctttcctcatgggattcgccagctagctaattatgttcacagcaaaggactgaagctagggatttatgcagatgttggaaataaaacctgcgcaggcttccctgggagttttggatactacgacattgatgcccagacctttgctgactggggagtagatctgctaaaatttgatggttgttactgtgacagtttggaaaatttggcagatggttataagcacatgtccttggccctgaataggactggcagaagcattgtgtactcctgtgagtggcctctttatatgtggccctttcaaaagcccaattatacagaaatccgacagtactgcaatcactggcgaaattttgctgacattgatgattcctggaaaagtataaagagtatcttggactggacatcttttaaccaggagagaattgttgatgttgctggaccagggggttggaatgacccagatatggtaaaaacttgagccctccttgttcaagaccctgcggtaggcttgtttcctattttgacattcaaggtaaatacaggtaaagttcctgggaggaggctttatgtgagagtacttagagcaggatgctgtggaaagtggtttctccatatgggtcatctaggtaactttaagaatgtttcctcctctcttgtttgaattatttcattctttttctcagttagtgattggcaactttggcctcagctggaatcagcaagtaactcagatggccctctgggctatcatggctgctcctttattcatgtctaatgacctccgacacatcagccctcaagccaaagctctccttcaggataaggacgtaattgccatcaatcaggaccccttgggcaagcaagggtaccagcttagacagggagacaactttgaagtgtgggaacgacctctctcaggcttagcctgggctgtagctatgataaaccggcaggagattggtggacctcgctcttataccatcgcagttgcttccctgggtaaaggagtggcctgtaatcctgcctgcttcatcacacagctcctccctgtgaaaaggaagctagggttctatgaatggacttcaaggttaagaagtcacataaatcccacaggcactgttttgcttcagctagaaaatacaatgcagatgtcattaaaagacttactttaaaatgttaaaaaaa

SEQ ID NO: 306902 - DNA, 1478 bp, Homo sapiens
aggttaatcttaaaagcccaggttacccgcggaaatttatgctgtccggtcaccgtgacaatgcagctgaggaacccagaactacatctgggctgcgcgcttgcgcttcgcttcctggccctcgtttcctgggacatccctggggctagagcactggacaatggattggcaaggacgcctaccatgggctggctgcactgggagcgcttcatgtgcaaccttgactgccaggaagagccagattcctgcatcagtgagaagctcttcatggagatggcagagctcatggtctcagaaggctggaaggatgcaggttatgagtacctctgcattgatgactgttggatggctccccaaagagattcagaaggcagacttcaggcagaccctcagcgctttcctcatgggattcgccagctagctaattatgttcacagcaaaggactgaagctagggatttatgcagatgttggaaataaaacctgcgcaggcttccctgggagttttggatactacgacattgatgcccagacctttgctgactggggagtagatctgctaaaatttgatggttgttactgtgacagtttggaaaatttggcagatggggagtccaggttgtcaatcggtcacagagaaagaagcatcttcattcctgcctttcctcaatatacacaccatctctgcactacttcctcagaacaatcccagcagtctgggaggttataagcacatgtccttggccctgaataggactggcagaagcattgtgtactcctgtgagtggcctctttatatgtggccctttcaaaagcccaattatacagaaatccgacagtactgcaatcactggcgaaattttgctgacattgatgattcctggaaaagtataaagagtatcttggactggacatcttttaaccaggagagaattgttgatgttgctggaccagggggttggaatgacccagatatgttagtgattggcaactttggcctcagctggaatcagcaagtaactcagatggccctctgggctatcatggctgctcctttattcatgtctaatgacctccgacacatcagccctcaagccaaagctctccttcaggataaggacgtaattgccatcaatcaggaccccttgggcaagcaagggtaccagcttagacagggagacaactttgaagtgtgggaacgacctctctcaggcttagcctgggctgtagctatgataaaccggcaggagattggtggacctcgctcttataccatcgcagttgcttccctgggtaaaggagtggcctgtaatcctgcctgcttcatcacacagctcctccctgtgaaaaggaagctagggttctatgaatggacttcaaggttaagaagtcacataaatcccacaggcactgttttgcttcagctagaaaatacaatgcagatgtcattaaaagacttactttaaaatgttaaaaaaa

SEQ ID NO: 306903 - DNA, 2454 bp, Homo sapiens
aggttaatcttaaaagcccaggttacccgcggaaatttatgctgtccggtcaccgtgacaatgcagctgaggaacccagaactacatctgggctgcgcgcttgcgcttcgcttcctggccctcgtttcctgggacatccctggggctagagcactggacaatggattggcaaggacgcctaccatgggctggctgcactgggagcgcttcatgtgcaaccttgactgccaggaagagccagattcctgcatcagtgagaagctcttcatggagatggcagagctcatggtctcagaaggctggaaggatgcaggttatgagtacctctgcattgatgactgttggatggctccccaaagagattcagaaggcagacttcaggcagaccctcagcgctttcctcatgggattcgccagctagctaattatgttcacagcaaaggactgaagctagggatttatgcagatgttggaaataaaacctgcgcaggcttccctgggagttttggatactacgacattgatgcccagacctttgctgactggggagtagatctgctaaaatttgatggttgttactgtgacagtttggaaaatttggcagatggtaatgtttcattccagagatttagccacaaaggaaagaactttgaggccatggtagctgagccaaagaaccaatcttcagaattttaaataccctgtcacaatactggaaataattattctccatgtgccagagctcccatctcttctctttcagttcattaattaattaattaattcatgtaaaatccatgcatacctaaccatagctaatattgtgcacttataattcaagagggctctaagagttaattagtaattgtaactctctataacatcatttaggggagtccaggttgtcaatcggtcacagagaaagaagcatcttcattcctgcctttcctcaatatacacaccatctctgcactacttcctcagaacaatcccagcagtctgggaggtactttacacaatttaagcacagagcaactgcctgtccctgctgctagtttaaacatgaaccttccaggtagcctcttcttaaaatatacagccccagctgggcatgatggctcatgcctgtaatcctagcactttgggaggctgaggcgggtggattacttgaggtcaggagttcgagaccaccctggccaacatggtgaaaccccatctctagtaaaaatacaaaaattagctgactttggtggcacatgcctgtaatcccagctacttgggaagctgagacagaagagtcacttgaacctgggaaacagaggttgcagtgagccaagatcgcaccactgcactccaccctggatgacagactgaaccccatctcaaaaaattaaaataaaataaaataaaataactatatatatagccccagctggaaattcatttctttcccttattttacccattgttttctcatacaggttataagcacatgtccttggccctgaataggactggcagaagcattgtgtactcctgtgagtggcctctttatatgtggccctttcaaaagcccaattatacagaaatccgacagtactgcaatcactggcgaaattttgctgacattgatgattcctggaaaagtataaagagtatcttggactggacatcttttaaccaggagagaattgttgatgttgctggaccagggggttggaatgacccagatatggtaaaaacttgagccctccttgttcaagaccctgcggtaggcttgtttcctattttgacattcaaggtaaatacaggtaaagttcctgggaggaggctttatgtgagagtacttagagcaggatgctgtggaaagtggtttctccatatgggtcatctaggtaactttaagaatgtttcctcctctcttgtttgaattatttcattctttttctcagttagtgattggcaactttggcctcagctggaatcagcaagtaactcagatggccctctgggctatcatggctgctcctttattcatgtctaatgacctccgacacatcagccctcaagccaaagctctccttcaggataaggacgtaattgccatcaatcaggaccccttgggcaagcaagggtaccagcttagacagggagacaactttgaagtgtgggaacgacctctctcaggcttagcctgggctgtagctatgataaaccggcaggagattggtggacctcgctcttataccatcgcagttgcttccctgggtaaaggagtggcctgtaatcctgcctgcttcatcacacagctcctccctgtgaaaaggaagctagggttctatgaatggacttcaaggttaagaagtcacataaatcccacaggcactgttttgcttcagctagaaaatacaatgcagatgtcattaaaagacttactttaaaatgttaaaaaaa

SEQ ID NO: 306904 - DNA, 1358 bp, Homo sapiens
aggttaatcttaaaagcccaggttacccgcggaaatttatgctgtccggtcaccgtgacaatgcagctgaggaacccagaactacatctgggctgcgcgcttgcgcttcgcttcctggccctcgtttcctgggacatccctggggctagagcactggacaatggattggcaaggacgcctaccatgggctggctgcactgggagcgcttcatgtgcaaccttgactgccaggaagagccagattcctgcatcagtgagaagctcttcatggagatggcagagctcatggtctcagaaggctggaaggatgcaggttatgagtacctctgcattgatgactgttggatggctccccaaagagattcagaaggcagacttcaggcagaccctcagcgctttcctcatgggattcgccagctagctaattatgttcacagcaaaggactgaagctagggatttatgcagatgttggaaataaaacctgcgcaggcttccctgggagttttggatactacgacattgatgcccagacctttgctgactggttataagcacatgtccttggccctgaataggactggcagaagcattgtgtactcctgtgagtggcctctttatatgtggccctttcaaaagagctccacactatttggaagtatttgttgacttgttaccatgtctccccactagagtcccaattatacagaaatccgacagtactgcaatcactggcgaaattttgctgacattgatgattcctggaaaagtataaagagtatcttggactggacatcttttaaccaggagagaattgttgatgttgctggaccagggggttggaatgacccagatatgttagtgattggcaactttggcctcagctggaatcagcaagtaactcagatggccctctgggctatcatggctgctcctttattcatgtctaatgacctccgacacatcagccctcaagccaaagctctccttcaggataaggacgtaattgccatcaatcaggaccccttgggcaagcaagggtaccagcttagacagggagacaactttgaagtgtgggaacgacctctctcaggcttagcctgggctgtagctatgataaaccggcaggagattggtggacctcgctcttataccatcgcagttgcttccctgggtaaaggagtggcctgtaatcctgcctgcttcatcacacagctcctccctgtgaaaaggaagctagggttctatgaatggacttcaaggttaagaagtcacataaatcccacaggcactgttttgcttcagctagaaaatacaatgcagatgtcattaaaagacttactttaaaatgttaaaaaaa

SEQ ID NO: 306905 - DNA, 747 bp, Homo sapiens
gaagccaaggtggaggtctagtcgaaaagaaggctcatcagagaagtctaactaaagtttggtcaagaagagtctttgtcaaggtaaatctatcatttccctcaaaaggtaattttcaggatcccatcaggaagattagcatggctgctagctttctcctcagttctgggctatagctcacatgcctagtttgaactagctcagcagaactgggggatttattctttgtcttccaacaaactcatctggatgattttgggggtttgtggggaaaagcccccaatacctggtgaagtaaccttgtctcttcccccagcctggaatggttctctctttctgctacctcacgattgtgcttctacaatggtgactcttttcctccctctcatttcaggttcacagcaaaggactgaagctagggatttatgcagatgttggaaataaaacctgcgcaggcttccctgggagttttggatactacgacattgatgcccagacctttgctgactggggagtagatctgctaaaatttgatggttgttactgtgacagtttggaaaatttggcagatggtaatgtttcattccagagatttagccacaaaggaaagaactttgaggccatggtagctgagccaaagaaccaatcttcagaattttaaataccctgtcacaatactggaaataattattctccatgtgccagagctcccatctcttctctttcagttcattaattaattaatta

SEQ ID NO: 306906 - DNA, 157 bp, Homo sapiens
ctaaccaggtaatgtcagtgtgaggtcacatacaatgtgtgtgtttctgccctgcatttggctcagagccacttgtaataattttttgctgttgaggtttccttgatacttctctgaagtcactttttctttttttctttttctttttttttttttt

SEQ ID NO: 306907 - DNA, 829 bp, Homo sapiens
ttctacctgtcatttgtaaataaattgtaaaattaggtaaataatatatttacccagtgagtggttaacatttttataacttttaccaattaatgtattttagcaatggagatctgaagtagatgaaaagagacaggtattccatgccttagaggatgagttgcagaaagctaaagccatcagtgatgaaatgtttaaaacgtataaagaacgggaccttgattttgactggcacaaagaaaaagcagatcaattagttgaaaggtggcaaaatgttcatgtgcagattgacaacaggttacgggacttagagggcattggcaaatcactgaagtactacagagacacttaccatcctttagatgattggatccagcaggttgaaactactcagagaaagattcaggaaaatcagcctgaaaatagtaaaaccctagccacacagttgaatcaacagaagatgctggtgtccgaaatagaaatgaaacagagcaaaatggacgagtgtcaaaaatatgcagaacagtactcagctacagtgaaggactatgaattacaaacaatgacctaccgggccatggtagattcacaacaaaaatctccagtgaaacgccgaagaatgcagagttcagcagatctcattattcaagagttcatggacctaaggactcgatatactgccctggtcactctcatgacacaatatattaaatttgctggtgattcattgaagaggctggaagaggaggagaagtcactggaagaagaaaagaaagaacatgttgaaaaagccaaagaattgcaaaaatgggtatcaaatatcagcaag

SEQ ID NO: 306908 - DNA, 972 bp, Homo sapiens
caagaggggaaaaggcaaaccctaaaagtgctgcagaccttaaaaaacttagccacagggtggatgtcacttgagtttacagtttatattttgctggtggaagtgttttctgggtgctgtcagttgactctggttgttcacttggataaacgaagaggttagtgcagaacaatttgatccatatgcatttcattttcgattttcaagtttacatttctgttttctcctaaagctctccatgttttattggggaccatctgatgatttttgcaaagcgatgatggtagtgtgtgcttaaatgcttgtgctagtctccactctcaaaacgtggaccatccctctagggcaagtaactcctaatcactgcacccaggaaccagctccactgaagaaacacaagcgctccttgacctaggatttctttaggagttttcaggccaacctccacttatcctaagataatttcccctctttttaggaaagttgcacgccgccaggcttggaggttgctgcttggtgcagtttactcatgttggcaaagacttcatagttaaacgccctccatttacctgaagttatcttgcctttcatttcattagttaatcagatattttatgccaccctagatgttttattgggttctagttgcttaaaaactttaactgtattattgcaatatcattaaaatgttgcacaaagagtaattctactgtatatagccctggaaggtgagaactctattcagtttaggattcttgagaggataagtgaggtaatcagaggttccattcctggctttacattaactagctgtgtgatacatctcggtgcctcgatttacccatctgtaagatagggccattagtaccttgcagggttatgggagggtggaggaaattacaagaaattgtgtaaagaaaaatcccacttagttcataataagtattcagtatttggtagctatcattatat

SEQ ID NO: 306909 - DNA, 836 bp, Homo sapiens
gtttgataactttctacatgtggcacattctcttaagtgctgtacacatgttatctcattcaaatctcttaacaatctcatgaagcgggaattgttattatcctaatcttagattttggaaagtgcttggcacatagtaggttcttaatctgagttagcttccttccttcctaaaggtttaacactttctgttatatctagatatctgatatccatgttactggagagtcagaggatatgtctgcaaaagagagattgctactctggacgcagcaggcaacagagggttatgctggaattcggtgtgaaaatttcactacctgctggagagatggaaaattatttaatgccatcattcataaatacaggtatggaatttgtgtattttttccttatacaactgtaagacacatttctttcatctctgaattttaaaattatcttttattattatagaagcaaaagcatggcaaaaaattagaaaatacagaaaaattaaaataaaaaattggccaggtgcagtggcccatgcctgtaatcccaggacttagggaagccaaagtgggtagattgcttgagcctgggagttcgagaacagccttggcaaaagggtaaaaccctctctctacaaaaaaatacaaaaaattagcttggcatggtggcaagcacctgtatttccagctactccggaggccaaggctgcggtgagctgtgatcatgtgactgcactgcagcctgagtcacagggtgagactctggcttaagaaaataaaaaaaaaaatttaaaaatcacatttccactacttagaggccatgattctgaattgtagcttata

SEQ ID NO: 306910 - DNA, 412 bp, Homo sapiens
ttctacctgtcatttgtaaataaattgtaaaattaggtaaataatatatttacccagtgagtggttaacatttttataacttttaccaattaatgtattttagcaatggagatctgaagtagatgaaaagagacaggtattccatgccttagaggatgagttgcagaaagctaaagccatcagtgatgaaatgtttaaaacgtataaagaacgggaccttgattttgactggcacaaagaaaaagcagatcaattagttgaaaggtggcaaaatgttcatgtgcagattgacaacaggttagtatccttttttgttcagttttagcacagatttaatgtctatctatggaagtaaaaaaatagcctcatatgtgtagattttactcatttaccatagatagacattaagtct

SEQ ID NO: 306911 - DNA, 10452 bp, Homo sapiens
  misc_feature (1579)..(1579): n is a, c, g, or t
gcctccaccctccaccctcctccctccctctctccccggcgcgggcgagtgtctgcggcgcggcggccaggaaatgccgcagatgcgccgcgcagcatccccggtgaaggcagcgcgccggtcctcccgcaccgctgccgcggcctcggcccggcccgaagcacgcgcctcgtgcagggccagcagagcggtcagcgcggccgcagagggtccgggcgcccgccggcccccgcccgccctcgccgcacgccccgctcctccgcttggcgtggcgctgctcgtcgccgcccctgggctcgctgagatttgccgctgctgaaacccgagagggactcgggctcccggagccgggcggcccaccatcggcctgcccggaggcctgggcgtttcctttgccggccctggcgccggcagccccctgcgcccccgctctgcgtcttcggcttccgtgcttctccccagcgtgctgctccttcctcttttccagttcccaaggctgtgtcttgctgactgcgatactgtccgggggttacgagggggagaggggaatttgtcagtcatcgcttagataaacttcggcatggcgggttacctctcccctgctgcttacctgtacgtggaggagcaggagtatctccaggcctacgaggatgtcctggagaggtacaaagatgaacgggacaaagttcagaagaaaacatttacaaaatggataaatcagcatctcatgaaggttcgaaaacatgtgaatgatctctatgaagacttaagggatggacacaatttgatttctcttttagaggttctttcaggagataccttgcccagagaaaaaggtcggatgcgttttcacagactacagaatgtacaaattgcacttgactatttgaaaagacgccaggtgaaattagtgaatattagaaatgatgacataacagatggaaatcccaaattgactttgggattaatctggacaataattttgcactttcagatatctgatatccatgttactggagagtcagaggatatgtctgcaaaagagagattgctactctggacgcagcaggcaacagagggttatgctggaattcggtgtgaaaatttcactacctgctggagagatggaaaattatttaatgccatcattcataaatacaggccggacctgatagatatgaatactgttgctgttcaaagcaaccttgcaaatttagagcatgctttttacgtagcagaaaaaattggtgttataagacttctggaccctgaagatgtcgatgtctcctcacctgatgaaaaatcagtaataacttacgtgtcatctctctatgatgcatttcctaaagtccctgaaggtggggaaggcattggtgcaaatgatgttgaagtcaaatggattgaataccagaatatggtgaactacctcatccaatggattagacaccatgtgaccacaatgtctgagagaacatttcctaataatcctgtagaactgaaggcactttataatcagtatttacagtttaaagaaacagaaattccaccaaaggagacagaaaaatcaaaaattaaacgnctatataaattattagagatttggatagaatttggacgcatcaagctccttcaaggttatcatccaaatgacatagaaaaagagtgggggaaactcattattgccatgctagagagagagaaggcccttcgtccagaagtagaaaggttagaaatgttgcaacagattgccaacagagttcagagggacagtgtcatctgtgaagacaaactgattcttgctggaaatgctcttcagtctgattctaaaagattagaatcaggagtgcagtttcagaatgaagcagaaattgctgggtatatacttgaatgtgagaaccttttacgccagcatgtaattgatgtacagattcttattgatggaaaatactaccaggcagatcaattggtacagagggttgcaaaactgcgtgacgaaattatggccttaaggaacgaatgttcttctgtgtacagcaaaggacgcatactgacaacagaacagacaaagctcatgatatcaggaatcactcaaagtttaaactcaggatttgcacagaccttacaccctagtctgacctcagggctgacccagagtttaacaccttccctaacctcttctagtatgacttctggcctgtcatcagggatgacttcccgcctgactccatctgtcactccagcttatacacctggtttcccatcaggattagttccaaatttcagttcaggagtagagccaaattcattgcaaactttgaagttgatgcagatccgaaaaccccttctaaagtcttctttgctggatcaaaatttaacagaagaagaaatcaatatgaaatttgttcaggatcttttgaattgggttgatgagatgcaggtacaactggaccgcactgagtggggctcagatttgccaagtgttgaaagccatttagaaaatcataaaaatgttcatagagctattgaagaatttgaatctagtctcaaagaagctaaaatcagtgagattcaaatgacagcacctcttaaactgacttatgcagaaaagttgcacagattagagagtcagtatgcaaaactcttgaatacatccaggaatcaagaacggcaccttgatacactccataattttgtaagtcgtgcgactaatgaacttatttggttgaatgaaaaagaagaggaggaagttgcttatgactggagtgagagaaacaccaacatagctaggaaaaaagattatcatgctgaattaatgagagaacttgatcaaaaggaagaaaatattaaatcagttcaggagatagcagagcagctacttctagaaaatcatccagcccggttaactattgaggcctacagagcggcaatgcagacgcagtggagctggatcttacagctctgccagtgtgtggagcagcacataaaggagaacacagcgtatttcgagtttttcaatgatgccaaagaagctactgattacttaaggaatctaaaagatgccattcagcggaagtacagctgtgatagatcaagcagcattcacaagctagaagaccttgttcaggaatcaatggaagagaaagaagaacttctgcagtacaaaagcactatagcaaacctaatgggaaaagcaaaaacaataattcaactgaagccaaggaattctgactgtccactcaaaacttctattccgatcaaagctatctgtgactacagacaaattgagataaccatttacaaagacgatgaatgtgttttggcgaataactctcatcgtgctaaatggaaggtcattagtcctactgggaatgaggctatggtcccatctgtgtgcttcaccgttcctccaccaaacaaagaagcggtggaccttgccaacagaattgagcaacagtatcagaatgtcctgactctttggcatgagtctcacataaacatgaagagtgtagtatcctggcattatctcatcaatgaaattgatagaattcgagctagcaatgtggcttcaataaagacaatgctacctggtgaacatcagcaagttctaagtaatctacaatctcgttttgaagattttctggaagatagccaggaatcccaagtcttttcaggctcagatataacacaactggaaaaggaggttaatgtatgtaagcagtattatcaagaacttcttaaatctgcagaaagagaggagcaagaggaatcagtttataatctctacatctctgaagttcgaaacattagacttcggttagagaactgtgaagatcggctgattagacagattcgaactcccctggaaagagatgatttgcatgaaagtgtgttcagaatcacagaacaggagaaactaaagaaagagctggaacgacttaaagatgatttgggaacaatcacaaataagtgtgaggagtttttcagtcaagcagcagcctcttcatcagtccctaccctacgatcagagcttaatgtggtccttcagaacatgaaccaagtctattctatgtcttccacttacatagataagttgaaaactgttaacttggtgttaaaaaacactcaagctgcagaagccctcgtaaaactctatgaaactaaactgtgtgaagaagaagcagttatagctgacaagaataatattgagaatctaataagtactttaaagcaatggagatctgaagtagatgaaaagagacaggtattccatgccttagaggatgagttgcagaaagctaaagccatcagtgatgaaatgtttaaaacgtataaagaacgggaccttgattttgactggcacaaagaaaaagcagatcaattagttgaaaggtggcaaaatgttcatgtgcagattgacaacaggttacgggacttagagggcattggcaaatcactgaagtactacagagacacttaccatcctttagatgattggatccagcaggttgaaactactcagagaaagattcaggaaaatcagcctgaaaatagtaaaaccctagccacacagttgaatcaacagaagatgctggtgtccgaaatagaaatgaaacagagcaaaatggacgagtgtcaaaaatatgcagaacagtactcagctacagtgaaggactatgaattacaaacaatgacctaccgggccatggtagattcacaacaaaaatctccagtgaaacgccgaagaatgcagagttcagcagatctcattattcaagagttcatggacctaaggactcgatatactgccctggtcactctcatgacacaatatattaaatttgctggtgattcattgaagaggctggaagaggaggagattaaaaggtgtaaggagacttctgaacatggggcatattcagatctgcttcagcgtcagaaggcaacagtgcttgagaatagcaaacttacaggaaagataagtgagttggaaagaatggtagctgaactaaagaaacaaaagtcccgagtagaggaagaacttccgaaggtcagggaggctgcagaaaatgaattgagaaagcagcagagaaatgtagaagatatctctctgcagaagataagggctgaaagtgaagccaagcagtaccgcagggaacttgaaaccattgtgagagagaaggaagccgctgaaagagaactggagcgggtgaggcagctcaccatagaggccgaggctaaaagagctgccgtggaagagaacctcctgaattttcgcaatcagttggaggaaaacacctttaccagacgaacactggaagatcatcttaaaagaaaagatttaagtctcaatgatttggagcaacaaaaaaataaattaatggaagaattaagaagaaagagagacaatgaggaagaactcttgaagctgataaagcagatggaaaaagaccttgcatttcagaaacaggtagcagagaaacagttgaaagaaaagcagaaaattgaattggaagcaagaagaaaaataactgaaattcagtatacatgtagagaaaatgcattgccagtgtgtccgatcacacaggctacatcatgcagggcagtaacgggtctccagcaagaacatgacaagcagaaagcagaagaactcaaacagcaggtagatgaactaacagctgccaatagaaaggctgaacaagacatgagagagctgacatatgaacttaatgccctccagcttgaaaaaacgtcatctgaggaaaaggctcgtttgctaaaagataaactagatgaaacaaataatacactcagatgccttaagttggagctggaaaggaaggatcaggcggagaaagggtattctcaacaactcagagagcttggtaggcaattgaatcaaaccacaggtaaagctgaagaagccatgcaagaagctagtgatctcaagaaaataaagcgcaattatcagttagaattagaatctcttaatcatgaaaaagggaaactacaaagagaagtagacagaatcacaagggcacatgctgtagctgagaagaatattcagcatttaaattcacaaattcattcttttcgagatgagaaagaattagaaagactacaaatctgccagagaaaatcagatcatctaaaagaacaatttgagaaaagccatgagcagttgcttcaaaatatcaaagctgaaaaagaaaataatgataaaatccaaaggctcaatgaagaattggagaaaagtaatgagtgtgcagagatgctaaaacaaaaagtagaggagcttactaggcagaataatgaaaccaaattaatgatgcagagaattcaggcagaatcagagaatatagttttagagaaacaaactatccagcaaagatgtgaagcactgaaaattcaggcagatggttttaaagatcagctacgcagcacaaatgaacacttgcataaacagacaaaaacagagcaggattttcaaagaaaaattaaatgcctagaagaagacctggcgaaaagtcaaaatttggtaagtgaatttaagcaaaagtgtgaccaacagaacattatcatccagaataccaagaaagaagttagaaatctgaatgcggaactgaatgcttccaaagaagagaagcgacgcggggagcagaaagttcagctacaacaagctcaggtgcaagagttaaataacaggttgaaaaaagtacaagacgaattacacttaaagaccatagaggagcagatgacccacagaaagatggttctgtttcaggaagaatctggtaaattcaaacaatcagcagaggagtttcggaagaagatggaaaaattaatggagtccaaagtcatcactgaaaatgatatttcaggcattaggcttgactttgtgtctcttcaacaagaaaactctagagcccaagaaaatgctaagctttgtgaaacaaacattaaagaacttgaaagacagcttcaacagtatcgtgaacaaatgcagcaagggcagcacatggaagcaaatcattaccaaaaatgtcagaaacttgaggatgagctgatagcccagaagcgtgaggttgaaaacctgaagcaaaaaatggaccaacagatcaaagagcatgaacatcaattagttttgctccagtgtgaaattcaaaaaaagagcacagccaaagactgtaccttcaaaccagattttgagatgacagtgaaggagtgccagcactctggagagctgtcctctagaaacactggacaccttcacccaacacccagatcccctctgttgagatggactcaagaaccacagccattggaagagaagtggcagcatcgggttgttgaacagatacccaaagaagtccaattccagccaccaggggctccactcgagaaagagaaaagccagcagtgttactctgagtacttttctcagacaagcaccgagttacagataacttttgatgagacaaaccccattacaagactgtctgaaattgagaagataagagaccaagccctgaacaattctagaccacctgttaggtatcaagataacgcatgtgaaatggaactggtgaaggttttgacacccttagagatagctaagaacaagcagtatgatatgcatacagaagtcacaacattaaaacaagaaaagaacccagttcccagtgctgaagaatggatgcttgaagggtgcagagcatctggtggactcaagaaaggggatttccttaagaagggcttagaaccagagaccttccagaactttgatggtgatcatgcatgttcagtcagggatgatgaatttaaattccaagggcttaggcacactgtgactgccaggcagttggtggaagctaagcttctggacatgagaacaattgagcagctgcgactcggtcttaagactgttgaagaagttcagaaaactcttaacaagtttctgacgaaagccacctcaattgcagggctttacctagaatctacaaaagaaaagatttcatttgcctcagcggccgagagaatcataatagacaaaatggtggctttggcatttttagaagctcaggctgcaacaggttttataattgatcccatttcaggtcagacatattctgttgaagatgcagttcttaaaggagttgttgaccccgaattcagaattaggcttcttgaggcagagaaggcagctgtgggatattcttattcttctaagacattgtcagtgtttcaagctatggaaaatagaatgcttgacagacaaaaaggtaaacatatcttggaagcccagattgccagtgggggtgtcattgaccctgtgagaggcattcgtgttcctccagaaattgctctgcagcaggggttgttgaataatgccatcttacagtttttacatgagccatccagcaacacaagagttttccctaatcccaataacaagcaagctctgtattactcagaattactgcgaatgtgtgtatttgatgtagagtcccaatgctttctgtttccatttggggagaggaacatttccaatctcaatgtcaagaaaacacatagaatttctgtagtagatactaaaacaggatcagaattgaccgtgtatgaggctttccagagaaacctgattgagaaaagtatatatcttgaactttcagggcagcaatatcagtggaaggaagctatgttttttgaatcctatgggcattcttctcatatgctgactgatactaaaacaggattacacttcaatattaatgaggctatagagcagggaacaattgacaaagccttggtcaaaaagtatcaggaaggcctcatcacacttacagaacttgctgattctttgctgagccggttagtccccaagaaagatttgcacagtcctgttgcagggtattggctgactgctagtggggaaaggatctctgtactaaaagcctcccgtagaaatttggttgatcggattactgccctccgatgccttgaagcccaagtcagtacagggggcataattgatcctcttactggcaaaaagtaccgggtggccgaagctttgcatagaggcctggttgatgaggggtttgcccagcagctgcgacagtgtgaattagtaatcacagggattggccatcccatcactaacaaaatgatgtcagtggtggaagctgtgaatgcaaatattataaataaggaaatgggaatccgatgtttggaatttcagtacttgacaggagggttgatagagccacaggttcactctcggttatcaatagaagaggctctccaagtaggtattatagatgtcctcattgccacaaaactcaaagatcaaaagtcatatgtcagaaatataatatgccctcagacaaaaagaaagttgacatataaagaagccttagaaaaagctgattttgatttccacacaggacttaaactgttagaagtatctgagcccctgatgacaggaatttctagcctctactattcttcctaatgggacatgtttaaataactgtgcaaggggtgatgcaggctggttcatgccactttttcagagtatgatgatatcggctacatatgcagtctgtgaattatgtaacatactctatttcttgagggctgcaaattgctaagtgctcaaaatagagtaagttttaaattgaaaattacataagatttaatgcccttcaaatggtttcatttagccttgagaatggttttttgaaacttggccacactaaaatgtttttttttttttacgtagaatgtgggataaacttgatgaactccaagttcacagtgtcatttcttcagaactccccttcattgaatagtgatcatttattaaatgataaattgcactcgctgaaagagcacgtcatgaagcaccatggaatcaaagagaaagatataaattcgttcccacagccttcaagctgcagtgttttagattgcttcaaaaaatgaaaaagttttgcctttttctgtatatagtgaccttctttgcatattaaaatgtttaccacaatgtcccatttctagttaagtcttcgcacttgaaagctaacattatgaatattatgtgttggaggaggggaaggattttcttcattctgtgtattttccttacatgtacagtagacgttctctattctatcagccttctatggtacctttttgtcaggacaattaggattgtaatgctaatgcaaaggcagcaattcaaagatcttctagtgcctcatgaataaagttgagatttaaaatttgtaacattgatggaacagctgggaggttagaccaatcattaaggaatgtatgccatagctttctttgctaccataaacattttggaggtgcatctgctatgtgacatggtaaatatggttaagtgaatgaataaaatgttttagtaacctgtgtgtgatgaaaaaaaat

SEQ ID NO: 306912 - DNA, 10353 bp, Homo sapiens
  misc_feature (1480)..(1480): n is a, c, g, or t
tgaagaggatggtcataaagtctgtgtggaacagatgtcagagtggaattttcagacttaatggagaggatctaagtaagctctggattttgaaatgagtgaatctatggagctgtgatctcctacaaatcaaatggggaatgtctgtggatgtgtaagagctgagaaagaagaacaatatgtagatcctgccaaaactcctttgaaccctgaaaaatactctcctggaagaaaatatttcagaagaaaaccgatcaaaaaaactggaggtgacaaagagtcagttggggcaaacaatgaaaatgaaggcaagaagaagagcagcagtcagccttcaaaagaacagccagctcctttatccaggggactggtacagcaggaatctgttaccctaaactctgcactgggagatggtattcagcaaaagaagacagaagttgtagctgacagcgttaaacagaaacttctgccgagtgctgtaagcagttggtctgactgtgtgaacacttctcctgctaaagacagtgaaacagaagtaaaagttagtgaactggatgaaaggatttcagaaaaagacagcactccatattgcgcaaagaggaagaaacatttagatgatgtcaacacaagcgaaataacattccaggaaaaaactgatgttttttctttccgaaaggcagccagcttaagctctattccctcgggtatagaaagatcactcgaaaaaagtgggtttcctgaagacccaccaaaaagttatagcagtattcaagaaaagcaaaacactgagagattttgccctcatgcaacacagcattttcagtttaaaaaaaagagatgccattccctttatactagtatgtcctctgtttctaaggacacagatggaaatgagatatctgatatccatgttactggagagtcagaggatatgtctgcaaaagagagattgctactctggacgcagcaggcaacagagggttatgctggaattcggtgtgaaaatttcactacctgctggagagatggaaaattatttaatgccatcattcataaatacaggccggacctgatagatatgaatactgttgctgttcaaagcaaccttgcaaatttagagcatgctttttacgtagcagaaaaaattggtgttataagacttctggaccctgaagatgtcgatgtctcctcacctgatgaaaaatcagtaataacttacgtgtcatctctctatgatgcatttcctaaagtccctgaaggtggggaaggcattggtgcaaatgatgttgaagtcaaatggattgaataccagaatatggtgaactacctcatccaatggattagacaccatgtgaccacaatgtctgagagaacatttcctaataatcctgtagaactgaaggcactttataatcagtatttacagtttaaagaaacagaaattccaccaaaggagacagaaaaatcaaaaattaaacgnctatataaattattagagatttggatagaatttggacgcatcaagctccttcaaggttatcatccaaatgacatagaaaaagagtgggggaaactcattattgccatgctagagagagagaaggcccttcgtccagaagtagaaaggttagaaatgttgcaacagattgccaacagagttcagagggacagtgtcatctgtgaagacaaactgattcttgctggaaatgctcttcagtctgattctaaaagattagaatcaggagtgcagtttcagaatgaagcagaaattgctgggtatatacttgaatgtgagaaccttttacgccagcatgtaattgatgtacagattcttattgatggaaaatactaccaggcagatcaattggtacagagggttgcaaaactgcgtgacgaaattatggccttaaggaacgaatgttcttctgtgtacagcaaaggacgcatactgacaacagaacagacaaagctcatgatatcaggaatcactcaaagtttaaactcaggatttgcacagaccttacaccctagtctgacctcagggctgacccagagtttaacaccttccctaacctcttctagtatgacttctggcctgtcatcagggatgacttcccgcctgactccatctgtcactccagcttatacacctggtttcccatcaggattagttccaaatttcagttcaggagtagagccaaattcattgcaaactttgaagttgatgcagatccgaaaaccccttctaaagtcttctttgctggatcaaaatttaacagaagaagaaatcaatatgaaatttgttcaggatcttttgaattgggttgatgagatgcaggtacaactggaccgcactgagtggggctcagatttgccaagtgttgaaagccatttagaaaatcataaaaatgttcatagagctattgaagaatttgaatctagtctcaaagaagctaaaatcagtgagattcaaatgacagcacctcttaaactgacttatgcagaaaagttgcacagattagagagtcagtatgcaaaactcttgaatacatccaggaatcaagaacggcaccttgatacactccataattttgtaagtcgtgcgactaatgaacttatttggttgaatgaaaaagaagaggaggaagttgcttatgactggagtgagagaaacaccaacatagctaggaaaaaagattatcatgctgaattaatgagagaacttgatcaaaaggaagaaaatattaaatcagttcaggagatagcagagcagctacttctagaaaatcatccagcccggttaactattgaggcctacagagcggcaatgcagacgcagtggagctggatcttacagctctgccagtgtgtggagcagcacataaaggagaacacagcgtatttcgagtttttcaatgatgccaaagaagctactgattacttaaggaatctaaaagatgccattcagcggaagtacagctgtgatagatcaagcagcattcacaagctagaagaccttgttcaggaatcaatggaagagaaagaagaacttctgcagtacaaaagcactatagcaaacctaatgggaaaagcaaaaacaataattcaactgaagccaaggaattctgactgtccactcaaaacttctattccgatcaaagctatctgtgactacagacaaattgagataaccatttacaaagacgatgaatgtgttttggcgaataactctcatcgtgctaaatggaaggtcattagtcctactgggaatgaggctatggtcccatctgtgtgcttcaccgttcctccaccaaacaaagaagcggtggaccttgccaacagaattgagcaacagtatcagaatgtcctgactctttggcatgagtctcacataaacatgaagagtgtagtatcctggcattatctcatcaatgaaattgatagaattcgagctagcaatgtggcttcaataaagacaatgctacctggtgaacatcagcaagttctaagtaatctacaatctcgttttgaagattttctggaagatagccaggaatcccaagtcttttcaggctcagatataacacaactggaaaaggaggttaatgtatgtaagcagtattatcaagaacttcttaaatctgcagaaagagaggagcaagaggaatcagtttataatctctacatctctgaagttcgaaacattagacttcggttagagaactgtgaagatcggctgattagacagattcgaactcccctggaaagagatgatttgcatgaaagtgtgttcagaatcacagaacaggagaaactaaagaaagagctggaacgacttaaagatgatttgggaacaatcacaaataagtgtgaggagtttttcagtcaagcagcagcctcttcatcagtccctaccctacgatcagagcttaatgtggtccttcagaacatgaaccaagtctattctatgtcttccacttacatagataagttgaaaactgttaacttggtgttaaaaaacactcaagctgcagaagccctcgtaaaactctatgaaactaaactgtgtgaagaagaagcagttatagctgacaagaataatattgagaatctaataagtactttaaagcaatggagatctgaagtagatgaaaagagacaggtattccatgccttagaggatgagttgcagaaagctaaagccatcagtgatgaaatgtttaaaacgtataaagaacgggaccttgattttgactggcacaaagaaaaagcagatcaattagttgaaaggtggcaaaatgttcatgtgcagattgacaacaggttacgggacttagagggcattggcaaatcactgaagtactacagagacacttaccatcctttagatgattggatccagcaggttgaaactactcagagaaagattcaggaaaatcagcctgaaaatagtaaaaccctagccacacagttgaatcaacagaagatgctggtgtccgaaatagaaatgaaacagagcaaaatggacgagtgtcaaaaatatgcagaacagtactcagctacagtgaaggactatgaattacaaacaatgacctaccgggccatggtagattcacaacaaaaatctccagtgaaacgccgaagaatgcagagttcagcagatctcattattcaagagttcatggacctaaggactcgatatactgccctggtcactctcatgacacaatatattaaatttgctggtgattcattgaagaggctggaagaggaggagattaaaaggtgtaaggagacttctgaacatggggcatattcagatctgcttcagcgtcagaaggcaacagtgcttgagaatagcaaacttacaggaaagataagtgagttggaaagaatggtagctgaactaaagaaacaaaagtcccgagtagaggaagaacttccgaaggtcagggaggctgcagaaaatgaattgagaaagcagcagagaaatgtagaagatatctctctgcagaagataagggctgaaagtgaagccaagcagtaccgcagggaacttgaaaccattgtgagagagaaggaagccgctgaaagagaactggagcgggtgaggcagctcaccatagaggccgaggctaaaagagctgccgtggaagagaacctcctgaattttcgcaatcagttggaggaaaacacctttaccagacgaacactggaagatcatcttaaaagaaaagatttaagtctcaatgatttggagcaacaaaaaaataaattaatggaagaattaagaagaaagagagacaatgaggaagaactcttgaagctgataaagcagatggaaaaagaccttgcatttcagaaacaggtagcagagaaacagttgaaagaaaagcagaaaattgaattggaagcaagaagaaaaataactgaaattcagtatacatgtagagaaaatgcattgccagtgtgtccgatcacacaggctacatcatgcagggcagtaacgggtctccagcaagaacatgacaagcagaaagcagaagaactcaaacagcaggtagatgaactaacagctgccaatagaaaggctgaacaagacatgagagagctgacatatgaacttaatgccctccagcttgaaaaaacgtcatctgaggaaaaggctcgtttgctaaaagataaactagatgaaacaaataatacactcagatgccttaagttggagctggaaaggaaggatcaggcggagaaagggtattctcaacaactcagagagcttggtaggcaattgaatcaaaccacaggtaaagctgaagaagccatgcaagaagctagtgatctcaagaaaataaagcgcaattatcagttagaattagaatctcttaatcatgaaaaagggaaactacaaagagaagtagacagaatcacaagggcacatgctgtagctgagaagaatattcagcatttaaattcacaaattcattcttttcgagatgagaaagaattagaaagactacaaatctgccagagaaaatcagatcatctaaaagaacaatttgagaaaagccatgagcagttgcttcaaaatatcaaagctgaaaaagaaaataatgataaaatccaaaggctcaatgaagaattggagaaaagtaatgagtgtgcagagatgctaaaacaaaaagtagaggagcttactaggcagaataatgaaaccaaattaatgatgcagagaattcaggcagaatcagagaatatagttttagagaaacaaactatccagcaaagatgtgaagcactgaaaattcaggcagatggttttaaagatcagctacgcagcacaaatgaacacttgcataaacagacaaaaacagagcaggattttcaaagaaaaattaaatgcctagaagaagacctggcgaaaagtcaaaatttggtaagtgaatttaagcaaaagtgtgaccaacagaacattatcatccagaataccaagaaagaagttagaaatctgaatgcggaactgaatgcttccaaagaagagaagcgacgcggggagcagaaagttcagctacaacaagctcaggtgcaagagttaaataacaggttgaaaaaagtacaagacgaattacacttaaagaccatagaggagcagatgacccacagaaagatggttctgtttcaggaagaatctggtaaattcaaacaatcagcagaggagtttcggaagaagatggaaaaattaatggagtccaaagtcatcactgaaaatgatatttcaggcattaggcttgactttgtgtctcttcaacaagaaaactctagagcccaagaaaatgctaagctttgtgaaacaaacattaaagaacttgaaagacagcttcaacagtatcgtgaacaaatgcagcaagggcagcacatggaagcaaatcattaccaaaaatgtcagaaacttgaggatgagctgatagcccagaagcgtgaggttgaaaacctgaagcaaaaaatggaccaacagatcaaagagcatgaacatcaattagttttgctccagtgtgaaattcaaaaaaagagcacagccaaagactgtaccttcaaaccagattttgagatgacagtgaaggagtgccagcactctggagagctgtcctctagaaacactggacaccttcacccaacacccagatcccctctgttgagatggactcaagaaccacagccattggaagagaagtggcagcatcgggttgttgaacagatacccaaagaagtccaattccagccaccaggggctccactcgagaaagagaaaagccagcagtgttactctgagtacttttctcagacaagcaccgagttacagataacttttgatgagacaaaccccattacaagactgtctgaaattgagaagataagagaccaagccctgaacaattctagaccacctgttaggtatcaagataacgcatgtgaaatggaactggtgaaggttttgacacccttagagatagctaagaacaagcagtatgatatgcatacagaagtcacaacattaaaacaagaaaagaacccagttcccagtgctgaagaatggatgcttgaagggtgcagagcatctggtggactcaagaaaggggatttccttaagaagggcttagaaccagagaccttccagaactttgatggtgatcatgcatgttcagtcagggatgatgaatttaaattccaagggcttaggcacactgtgactgccaggcagttggtggaagctaagcttctggacatgagaacaattgagcagctgcgactcggtcttaagactgttgaagaagttcagaaaactcttaacaagtttctgacgaaagccacctcaattgcagggctttacctagaatctacaaaagaaaagatttcatttgcctcagcggccgagagaatcataatagacaaaatggtggctttggcatttttagaagctcaggctgcaacaggttttataattgatcccatttcaggtcagacatattctgttgaagatgcagttcttaaaggagttgttgaccccgaattcagaattaggcttcttgaggcagagaaggcagctgtgggatattcttattcttctaagacattgtcagtgtttcaagctatggaaaatagaatgcttgacagacaaaaaggtaaacatatcttggaagcccagattgccagtgggggtgtcattgaccctgtgagaggcattcgtgttcctccagaaattgctctgcagcaggggttgttgaataatgccatcttacagtttttacatgagccatccagcaacacaagagttttccctaatcccaataacaagcaagctctgtattactcagaattactgcgaatgtgtgtatttgatgtagagtcccaatgctttctgtttccatttggggagaggaacatttccaatctcaatgtcaagaaaacacatagaatttctgtagtagatactaaaacaggatcagaattgaccgtgtatgaggctttccagagaaacctgattgagaaaagtatatatcttgaactttcagggcagcaatatcagtggaaggaagctatgttttttgaatcctatgggcattcttctcatatgctgactgatactaaaacaggattacacttcaatattaatgaggctatagagcagggaacaattgacaaagccttggtcaaaaagtatcaggaaggcctcatcacacttacagaacttgctgattctttgctgagccggttagtccccaagaaagatttgcacagtcctgttgcagggtattggctgactgctagtggggaaaggatctctgtactaaaagcctcccgtagaaatttggttgatcggattactgccctccgatgccttgaagcccaagtcagtacagggggcataattgatcctcttactggcaaaaagtaccgggtggccgaagctttgcatagaggcctggttgatgaggggtttgcccagcagctgcgacagtgtgaattagtaatcacagggattggccatcccatcactaacaaaatgatgtcagtggtggaagctgtgaatgcaaatattataaataaggaaatgggaatccgatgtttggaatttcagtacttgacaggagggttgatagagccacaggttcactctcggttatcaatagaagaggctctccaagtaggtattatagatgtcctcattgccacaaaactcaaagatcaaaagtcatatgtcagaaatataatatgccctcagacaaaaagaaagttgacatataaagaagccttagaaaaagctgattttgatttccacacaggacttaaactgttagaagtatctgagcccctgatgacaggaatttctagcctctactattcttcctaatgggacatgtttaaataactgtgcaaggggtgatgcaggctggttcatgccactttttcagagtatgatgatatcggctacatatgcagtctgtgaattatgtaacatactctatttcttgagggctgcaaattgctaagtgctcaaaatagagtaagttttaaattgaaaattacataagatttaatgcccttcaaatggtttcatttagccttgagaatggttttttgaaacttggccacactaaaatgtttttttttttttacgtagaatgtgggataaacttgatgaactccaagttcacagtgtcatttcttcagaactccccttcattgaatagtgatcatttattaaatgataaattgcactcgctgaaagagcacgtcatgaagcaccatggaatcaaagagaaagatataaattcgttcccacagccttcaagctgcagtgttttagattgcttcaaaaaatgaaaaagttttgcctttttctgtatatagtgaccttctttgcatattaaaatgtttaccacaatgtcccatttctagttaagtcttcgcacttgaaagctaacattatgaatattatgtgttggaggaggggaaggattttcttcattctgtgtattttccttacatgtacagtagacgttctctattctatcagccttctatggtacctttttgtcaggacaattaggattgtaatgctaatgcaaaggcagcaattcaaagatcttctagtgcctcatgaataaagttgagatttaaaatttgtaacattgatggaacagctgggaggttagaccaatcattaaggaatgtatgccatagctttctttgctaccataaacattttggaggtgcatctgctatgtgacatggtaaatatggttaagtgaatgaataaaatgttttagtaacctgtgtgtgatgaaaaaaaat

SEQ ID NO: 306913 - DNA, 7611 bp, Homo sapiens
tagtcactggacgatatattacaacatctatcgtatctagaaaatcactccaggccggttaactattgaggcctacagagcggcaatgcagacgcagtggagctggatcttacagctctgccagtgtgtggagcagcacataaaggagaacacagcgtatttcgagtttttcaatgatgccaaagaagctactgattacttaaggaatctaaaagatgccattcagcggaagtacagctgtgatagatcaagcagcattcacaagctagaagaccttgttcaggaatcaatggaagagaaagaagaacttctgcagtacaaaagcactatagcaaacctaatgggaaaagcaaaaacaataattcaactgaagccaaggaattctgactgtccactcaaaacttctattccgatcaaagctatctgtgactacagacaaattgagataaccatttacaaagacgatgaatgtgttttggcgaataactctcatcgtgctaaatggaaggtcattagtcctactgggaatgaggctatggtcccatctgtgtgcttcaccgttcctccaccaaacaaagaagcggtggaccttgccaacagaattgagcaacagtatcagaatgtcctgactctttggcatgagtctcacataaacatgaagagtgtagtatcctggcattatctcatcaatgaaattgatagaattcgagctagcaatgtggcttcaataaagacaatgctacctggtgaacatcagcaagttctaagtaatctacaatctcgttttgaagattttctggaagatagccaggaatcccaagtcttttcaggctcagatataacacaactggaaaaggaggttaatgtatgtaagcagtattatcaagaacttcttaaatctgcagaaagagaggagcaagaggaatcagtttataatctctacatctctgaagttcgaaacattagacttcggttagagaactgtgaagatcggctgattagacagattcgaactcccctggaaagagatgatttgcatgaaagtgtgttcagaatcacagaacaggagaaactaaagaaagagctggaacgacttaaagatgatttgggaacaatcacaaataagtgtgaggagtttttcagtcaagcagcagcctcttcatcagtccctaccctacgatcagagcttaatgtggtccttcagaacatgaaccaagtctattctatgtcttccacttacatagataagttgaaaactgttaacttggtgttaaaaaacactcaagctgcagaagccctcgtaaaactctatgaaactaaactgtgtgaagaagaagcagttatagctgacaagaataatattgagaatctaataagtactttaaagcaatggagatctgaagtagatgaaaagagacaggtattccatgccttagaggatgagttgcagaaagctaaagccatcagtgatgaaatgtttaaaacgtataaagaacgggaccttgattttgactggcacaaagaaaaagcagatcaattagttgaaaggtggcaaaatgttcatgtgcagattgacaacaggttacgggacttagagggcattggcaaatcactgaagtactacagagacacttaccatcctttagatgattggatccagcaggttgaaactactcagagaaagattcaggaaaatcagcctgaaaatagtaaaaccctagccacacagttgaatcaacagaagatgctggtgtccgaaatagaaatgaaacagagcaaaatggacgagtgtcaaaaatatgcagaacagtactcagctacagtgaaggactatgaattacaaacaatgacctaccgggccatggtagattcacaacaaaaatctccagtgaaacgccgaagaatgcagagttcagcagatctcattattcaagagttcatggacctaaggactcgatatactgccctggtcactctcatgacacaatatattaaatttgctggtgattcattgaagaggctggaagaggaggagattaaaaggtgtaaggagacttctgaacatggggcatattcagatctgcttcagcgtcagaaggcaacagtgcttgagaatagcaaacttacaggaaagataagtgagttggaaagaatggtagctgaactaaagaaacaaaagtcccgagtagaggaagaacttccgaaggtcagggaggctgcagaaaatgaattgagaaagcagcagagaaatgtagaagatatctctctgcagaagataagggctgaaagtgaagccaagcagtaccgcagggaacttgaaaccattgtgagagagaaggaagccgctgaaagagaactggagcgggtgaggcagctcaccatagaggccgaggctaaaagagctgccgtggaagagaacctcctgaattttcgcaatcagttggaggaaaacacctttaccagacgaacactggaagatcatcttaaaagaaaagatttaagtctcaatgatttggagcaacaaaaaaataaattaatggaagaattaagaagaaagagagacaatgaggaagaactcttgaagctgataaagcagatggaaaaagaccttgcatttcagaaacaggtagcagagaaacagttgaaagaaaagcagaaaattgaattggaagcaagaagaaaaataactgaaattcagtatacatgtagagaaaatgcattgccagtgtgtccgatcacacaggctacatcatgcagggcagtaacgggtctccagcaagaacatgacaagcagaaagcagaagaactcaaacagcaggtagatgaactaacagctgccaatagaaaggctgaacaagacatgagagagctgacatatgaacttaatgccctccagcttgaaaaaacgtcatctgaggaaaaggctcgtttgctaaaagataaactagatgaaacaaataatacactcagatgccttaagttggagctggaaaggaaggatcaggcggagaaagggtattctcaacaactcagagagcttggtaggcaattgaatcaaaccacaggtaaagctgaagaagccatgcaagaagctagtgatctcaagaaaataaagcgcaattatcagttagaattagaatctcttaatcatgaaaaagggaaactacaaagagaagtagacagaatcacaagggcacatgctgtagctgagaagaatattcagcatttaaattcacaaattcattcttttcgagatgagaaagaattagaaagactacaaatctgccagagaaaatcagatcatctaaaagaacaatttgagaaaagccatgagcagttgcttcaaaatatcaaagctgaaaaagaaaataatgataaaatccaaaggctcaatgaagaattggagaaaagtaatgagtgtgcagagatgctaaaacaaaaagtagaggagcttactaggcagaataatgaaaccaaattaatgatgcagagaattcaggcagaatcagagaatatagttttagagaaacaaactatccagcaaagatgtgaagcactgaaaattcaggcagatggttttaaagatcagctacgcagcacaaatgaacacttgcataaacagacaaaaacagagcaggattttcaaagaaaaattaaatgcctagaagaagacctggcgaaaagtcaaaatttggtaagtgaatttaagcaaaagtgtgaccaacagaacattatcatccagaataccaagaaagaagttagaaatctgaatgcggaactgaatgcttccaaagaagagaagcgacgcggggagcagaaagttcagctacaacaagctcaggtgcaagagttaaataacaggttgaaaaaagtacaagacgaattacacttaaagaccatagaggagcagatgacccacagaaagatggttctgtttcaggaagaatctggtaaattcaaacaatcagcagaggagtttcggaagaagatggaaaaattaatggagtccaaagtcatcactgaaaatgatatttcaggcattaggcttgactttgtgtctcttcaacaagaaaactctagagcccaagaaaatgctaagctttgtgaaacaaacattaaagaacttgaaagacagcttcaacagtatcgtgaacaaatgcagcaagggcagcacatggaagcaaatcattaccaaaaatgtcagaaacttgaggatgagctgatagcccagaagcgtgaggttgaaaacctgaagcaaaaaatggaccaacagatcaaagagcatgaacatcaattagttttgctccagtgtgaaattcaaaaaaagagcacagccaaagactgtaccttcaaaccagattttgagatgacagtgaaggagtgccagcactctggagagctgtcctctagaaacactggacaccttcacccaacacccagatcccctctgttgagatggactcaagaaccacagccattggaagagaagtggcagcatcgggttgttgaacagatacccaaagaagtccaattccagccaccaggggctccactcgagaaagagaaaagccagcagtgttactctgagtacttttctcagacaagcaccgagttacagataacttttgatgagacaaaccccattacaagactgtctgaaattgagaagataagagaccaagccctgaacaattctagaccacctgttaggtatcaagataacgcatgtgaaatggaactggtgaaggttttgacacccttagagatagctaagaacaagcagtatgatatgcatacagaagtcacaacattaaaacaagaaaagaacccagttcccagtgctgaagaatggatgcttgaagggtgcagagcatctggtggactcaagaaaggggatttccttaagaagggcttagaaccagagaccttccagaactttgatggtgatcatgcatgttcagtcagggatgatgaatttaaattccaagggcttaggcacactgtgactgccaggcagttggtggaagctaagcttctggacatgagaacaattgagcagctgcgactcggtcttaagactgttgaagaagttcagaaaactcttaacaagtttctgacgaaagccacctcaattgcagggctttacctagaatctacaaaagaaaagatttcatttgcctcagcggccgagagaatcataatagacaaaatggtggctttggcatttttagaagctcaggctgcaacaggttttataattgatcccatttcaggtcagacatattctgttgaagatgcagttcttaaaggagttgttgaccccgaattcagaattaggcttcttgaggcagagaaggcagctgtgggatattcttattcttctaagacattgtcagtgtttcaagctatggaaaatagaatgcttgacagacaaaaaggtaaacatatcttggaagcccagattgccagtgggggtgtcattgaccctgtgagaggcattcgtgttcctccagaaattgctctgcagcaggggttgttgaataatgccatcttacagtttttacatgagccatccagcaacacaagagttttccctaatcccaataacaagcaagctctgtattactcagaattactgcgaatgtgtgtatttgatgtagagtcccaatgctttctgtttccatttggggagaggaacatttccaatctcaatgtcaagaaaacacatagaatttctgtagtagatactaaaacaggatcagaattgaccgtgtatgaggctttccagagaaacctgattgagaaaagtatatatcttgaactttcagggcagcaatatcagtggaaggaagctatgttttttgaatcctatgggcattcttctcatatgctgactgatactaaaacaggattacacttcaatattaatgaggctatagagcagggaacaattgacaaagccttggtcaaaaagtatcaggaaggcctcatcacacttacagaacttgctgattctttgctgagccggttagtccccaagaaagatttgcacagtcctgttgcagggtattggctgactgctagtggggaaaggatctctgtactaaaagcctcccgtagaaatttggttgatcggattactgccctccgatgccttgaagcccaagtcagtacagggggcataattgatcctcttactggcaaaaagtaccgggtggccgaagctttgcatagaggcctggttgatgaggggtttgcccagcagctgcgacagtgtgaattagtaatcacagggattggccatcccatcactaacaaaatgatgtcagtggtggaagctgtgaatgcaaatattataaataaggaaatgggaatccgatgtttggaatttcagtacttgacaggagggttgatagagccacaggttcactctcggttatcaatagaagaggctctccaagtaggtattatagatgtcctcattgccacaaaactcaaagatcaaaagtcatatgtcagaaatataatatgccctcagacaaaaagaaagttgacatataaagaagccttagaaaaagctgattttgatttccacacaggacttaaactgttagaagtatctgagcccctgatgacaggaatttctagcctctactattcttcctaatgggacatgtttaaataactgtgcaaggggtgatgcaggctggttcatgccactttttcagagtatgatgatatcggctacatatgcagtctgtgaattatgtaacatactctatttcttgagggctgcaaattgctaagtgctcaaaatagagtaagttttaaattgaaaattacataagatttaatgcccttcaaatggtttcatttagccttgagaatggttttttgaaacttggccacactaaaatgtttttttttttttacgtagaatgtgggataaacttgatgaactccaagttcacagtgtcatttcttcagaactccccttcattgaatagtgatcatttattaaatgataaattgcactcgctgaaagagcacgtcatgaagcaccatggaatcaaagagaaagatataaattcgttcccacagccttcaagctgcagtgttttagattgcttcaaaaaatgaaaaagttttgcctttttctgtatatagtgaccttctttgcatattaaaatgtttaccacaatgtcccatttctagttaagtcttcgcacttgaaagctaacattatgaatattatgtgttggaggaggggaaggattttcttcattctgtgtattttccttacatgtacagtagacgttctctattctatcagccttctatggtacctttttgtcaggacaattaggattgtaatgctaatgcaaaggcagcaattcaaagatcttctagtgcctcatgaataaagttgagatttaaaatttgtaacattgatggaacagctgggaggttagaccaatcattaaggaatgtatgccatagctttctttgctaccataaacattttggaggtgcatctgctatgtgacatggtaaatatggttaagtgaatgaataaaatgttttagtaacctgtgtgtgatgaaaaaaaat

SEQ ID NO: 306914 - DNA, 8127 bp, Homo sapiens
  misc_feature (1579)..(1579): n is a, c, g, or t
gcctccaccctccaccctcctccctccctctctccccggcgcgggcgagtgtctgcggcgcggcggccaggaaatgccgcagatgcgccgcgcagcatccccggtgaaggcagcgcgccggtcctcccgcaccgctgccgcggcctcggcccggcccgaagcacgcgcctcgtgcagggccagcagagcggtcagcgcggccgcagagggtccgggcgcccgccggcccccgcccgccctcgccgcacgccccgctcctccgcttggcgtggcgctgctcgtcgccgcccctgggctcgctgagatttgccgctgctgaaacccgagagggactcgggctcccggagccgggcggcccaccatcggcctgcccggaggcctgggcgtttcctttgccggccctggcgccggcagccccctgcgcccccgctctgcgtcttcggcttccgtgcttctccccagcgtgctgctccttcctcttttccagttcccaaggctgtgtcttgctgactgcgatactgtccgggggttacgagggggagaggggaatttgtcagtcatcgcttagataaacttcggcatggcgggttacctctcccctgctgcttacctgtacgtggaggagcaggagtatctccaggcctacgaggatgtcctggagaggtacaaagatgaacgggacaaagttcagaagaaaacatttacaaaatggataaatcagcatctcatgaaggttcgaaaacatgtgaatgatctctatgaagacttaagggatggacacaatttgatttctcttttagaggttctttcaggagataccttgcccagagaaaaaggtcggatgcgttttcacagactacagaatgtacaaattgcacttgactatttgaaaagacgccaggtgaaattagtgaatattagaaatgatgacataacagatggaaatcccaaattgactttgggattaatctggacaataattttgcactttcagatatctgatatccatgttactggagagtcagaggatatgtctgcaaaagagagattgctactctggacgcagcaggcaacagagggttatgctggaattcggtgtgaaaatttcactacctgctggagagatggaaaattatttaatgccatcattcataaatacaggccggacctgatagatatgaatactgttgctgttcaaagcaaccttgcaaatttagagcatgctttttacgtagcagaaaaaattggtgttataagacttctggaccctgaagatgtcgatgtctcctcacctgatgaaaaatcagtaataacttacgtgtcatctctctatgatgcatttcctaaagtccctgaaggtggggaaggcattggtgcaaatgatgttgaagtcaaatggattgaataccagaatatggtgaactacctcatccaatggattagacaccatgtgaccacaatgtctgagagaacatttcctaataatcctgtagaactgaaggcactttataatcagtatttacagtttaaagaaacagaaattccaccaaaggagacagaaaaatcaaaaattaaacgnctatataaattattagagatttggatagaatttggacgcatcaagctccttcaaggttatcatccaaatgacatagaaaaagagtgggggaaactcattattgccatgctagagagagagaaggcccttcgtccagaagtagaaaggttagaaatgttgcaacagattgccaacagagttcagagggacagtgtcatctgtgaagacaaactgattcttgctggaaatgctcttcagtctgattctaaaagattagaatcaggagtgcagtttcagaatgaagcagaaattgctgggtatatacttgaatgtgagaaccttttacgccagcatgtaattgatgtacagattcttattgatggaaaatactaccaggcagatcaattggtacagagggttgcaaaactgcgtgacgaaattatggccttaaggaacgaatgttcttctgtgtacagcaaaggacgcatactgacaacagaacagacaaagctcatgatatcaggaatcactcaaagtttaaactcaggatttgcacagaccttacaccctagtctgacctcagggctgacccagagtttaacaccttccctaacctcttctagtatgacttctggcctgtcatcagggatgacttcccgcctgactccatctgtcactccagcttatacacctggtttcccatcaggattagttccaaatttcagttcaggagtagagccaaattcattgcaaactttgaagttgatgcagatccgaaaaccccttctaaagtcttctttgctggatcaaaatttaacagaagaagaaatcaatatgaaatttgttcaggatcttttgaattgggttgatgagatgcaggtacaactggaccgcactgagtggggctcagatttgccaagtgttgaaagccatttagaaaatcataaaaatgttcatagagctattgaagaatttgaatctagtctcaaagaagctaaaatcagtgagattcaaatgacagcacctcttaaactgacttatgcagaaaagttgcacagattagagagtcagtatgcaaaactcttgaatacatccaggaatcaagaacggcaccttgatacactccataattttgtaagtcgtgcgactaatgaacttatttggttgaatgaaaaagaagaggaggaagttgcttatgactggagtgagagaaacaccaacatagctaggaaaaaagattatcatgctgaattaatgagagaacttgatcaaaaggaagaaaatattaaatcagttcaggagatagcagagcagctacttctagaaaatcatccagcccggttaactattgaggcctacagagcggcaatgcagacgcagtggagctggatcttacagctctgccagtgtgtggagcagcacataaaggagaacacagcgtatttcgagtttttcaatgatgccaaagaagctactgattacttaaggaatctaaaagatgccattcagcggaagtacagctgtgatagatcaagcagcattcacaagctagaagaccttgttcaggaatcaatggaagagaaagaagaacttctgcagtacaaaagcactatagcaaacctaatgggaaaagcaaaaacaataattcaactgaagccaaggaattctgactgtccactcaaaacttctattccgatcaaagctatctgtgactacagacaaattgagataaccatttacaaagacgatgaatgtgttttggcgaataactctcatcgtgctaaatggaaggtcattagtcctactgggaatgaggctatggtcccatctgtgtgcttcaccgttcctccaccaaacaaagaagcggtggaccttgccaacagaattgagcaacagtatcagaatgtcctgactctttggcatgagtctcacataaacatgaagagtgtagtatcctggcattatctcatcaatgaaattgatagaattcgagctagcaatgtggcttcaataaagacaatgctacctggtgaacatcagcaagttctaagtaatctacaatctcgttttgaagattttctggaagatagccaggaatcccaagtcttttcaggctcagatataacacaactggaaaaggaggttaatgtatgtaagcagtattatcaagaacttcttaaatctgcagaaagagaggagcaagaggaatcagtttataatctctacatctctgaagttcgaaacattagacttcggttagagaactgtgaagatcggctgattagacagattcgaactcccctggaaagagatgatttgcatgaaagtgtgttcagaatcacagaacaggagaaactaaagaaagagctggaacgacttaaagatgatttgggaacaatcacaaataagtgtgaggagtttttcagtcaagcagcagcctcttcatcagtccctaccctacgatcagagcttaatgtggtccttcagaacatgaaccaagtctattctatgtcttccacttacatagataagttgaaaactgttaacttggtgttaaaaaacactcaagctgcagaagccctcgtaaaactctatgaaactaaactgtgtgaagaagaagcagttatagctgacaagaataatattgagaatctaataagtactttaaagcaatggagatctgaagtagatgaaaagagacaggtattccatgccttagaggatgagttgcagaaagctaaagccatcagtgatgaaatgtttaaaacgtataaagaacgggaccttgattttgactggcacaaagaaaaagcagatcaattagttgaaaggtggcaaaatgttcatgtgcagattgacaacaggttacgggacttagagggcattggcaaatcactgaagtactacagagacacttaccatcctttagatgattggatccagcaggttgaaactactcagagaaagattcaggaaaatcagcctgaaaatagtaaaaccctagccacacagttgaatcaacagaagatgctggtgtccgaaatagaaatgaaacagagcaaaatggacgagtgtcaaaaatatgcagaacagtactcagctacagtgaaggactatgaattacaaacaatgacctaccgggccatggtagattcacaacaaaaatctccagtgaaacgccgaagaatgcagagttcagcagatctcattattcaagagttcatggacctaaggactcgatatactgccctggtcactctcatgacacaatatattaaatttgctggtgattcattgaagaggctggaagaggaggagattaaaaggtgtaaggagacttctgaacatggggcatattcagatctgcttcagcgtcagaaggcaacagtgcttgagaatagcaaacttacaggaaagataagtgagttggaaagaatggtagctgaactaaagaaacaaaagtcccgagtagaggaagaacttccgaaggtcagggaggctgcagaaaatgaattgagaaagcagcagagaaatgtagaagatatctctctgcagaagataagggctgaaagtgaagccaagcagtaccgcagggaacttgaaaccattgtgagagagaaggaagccgctgaaagagaactggagcgggtgaggcagctcaccatagaggccgaggctaaaagagctgccgtggaagagaacctcctgaattttcgcaatcagttggaggaaaacacctttaccagacgaacactggaagatcatcttaaaagaaaagatttaagtctcaatgatttggagcaacaaaaaaataaattaatggaagaattaagaagaaagagagacaatgaggaagaactcttgaagctgataaagcagatggaaaaagaccttgcatttcagaaacaggtagcagagaaacagttgaaagaaaagcagaaaattgaattggaagcaagaagaaaaataactgaaattcagtatacatgtagagaaaatgcattgccagtgtgtccgatcacacaggctacatcatgcagggcagtaacgggtctccagcaagaacatgacaagcagaaagcagaagaactcaaacagcaggtagatgaactaacagctgccaatagaaaggctgaacaagacatgagagagctgacatatgaacttaatgccctccagcttgaaaaaacgtcatctgaggaaaaggctcgtttgctaaaagataaactagatgaaacaaataatacactcagatgccttaagttggagctggaaaggaaggatcaggcggagaaagggtattctcaacaactcagagagcttggtaggcaattgaatcaaaccacaggtaaagctgaagaagccatgcaagaagctagtgatctcaagaaaataaagcgcaattatcagttagaattagaatctcttaatcatgaaaaagggaaactacaaagagaagtagacagaatcacaagggcacatgctgtagctgagaagaatattcagcatttaaattcacaaattcattcttttcgagatgagaaagaattagaaagactacaaatctgccagagaaaatcagatcatctaaaagaacaatttgagaaaagccatgagcagttgcttcaaaatatcaaagctgaaaaagaaaataatgataaaatccaaaggctcaatgaagaattggagaaaagtaatgagtgtgcagagatgctaaaacaaaaagtagaggagcttactaggcagaataatgaaaccaaattaatgatgcagagaattcaggcagaatcagagaatatagttttagagaaacaaactatccagcaaagatgtgaagcactgaaaattcaggcagatggttttaaagatcagctacgcagcacaaatgaacacttgcataaacagacaaaaacagagcaggattttcaaagaaaaattaaatgcctagaagaagacctggcgaaaagtcaaaatttggtaagtgaatttaagcaaaagtgtgaccaacagaacattatcatccagaataccaagaaagaagttagaaatctgaatgcggaactgaatgcttccaaagaagagaagcgacgcggggagcagaaagttcagctacaacaagctcaggtgcaagagttaaataacaggttgaaaaaagtacaagacgaattacacttaaagaccatagaggagcagatgacccacagaaagatggttctgtttcaggaagaatctggtaaattcaaacaatcagcagaggagtttcggaagaagatggaaaaattaatggagtccaaagtcatcactgaaaatgatatttcaggcattaggcttgactttgtgtctcttcaacaagaaaactctagagcccaagaaaatgctaagctttgtgaaacaaacattaaagaacttgaaagacagcttcaacagtatcgtgaacaaatgcagcaagggcagcacatggaagcaaatcattaccaaaaatgtcagaaacttgaggatgagctgatagcccagaagcgtgaggttgaaaacctgaagcaaaaaatggaccaacagatcaaagagcatgaacatcaattagttttgctccagtgtgaaattcaaaaaaagagcacagccaaagactgtaccttcaaaccagattttgagatgacagtgaaggagtgccagcactctggagagctgtcctctagaaacactggacaccttcacccaacacccagatcccctctgttgagatggactcaagaaccacagccattggaagagaagtggcagcatcgggttgttgaacagatacccaaagaagtccaattccagccaccaggggctccactcgagaaagagaaaagccagcagtgttactctgagtacttttctcagacaagcaccgagttacagataacttttgatgagacaaaccccattacaagactgtctgaaattgagaagataagagaccaagccctgaacaattctagaccacctgttaggtatcaagataacgcatgtgaaatggaactggtgaaggttttgacacccttagaggtatactctgtgttctgagaccttatcagctacctaatgtcaagtttcctcatttgtttcctttctctcctagactaaatttttaaaacaattttgaatgtgattggctcattgtagttctgacaggaaaataatgctatactctttctggtaacttacttgaatctttatcataaattaactttaatttttgaatgtttgagattaaacatacagatgtaatagatatactgttatatctgtggagatacattctgaaaaatgtgagtatcaaaaaagctagaagaaccaagcagttagctttaacttctaacatattctgtggctagattttgtcttagtcttttttaaagatataattttaatacctttaattgtcatctaagataaaattcagactctgaaaataatataatacttattcctgaaccctccttggtttgaaatttttcttcttttcactaatcttgtctttgtaattcaaagaattatgtttggattgagaatggataaagtgacat

SEQ ID NO: 306915 - DNA, 2994 bp, Homo sapiens
  misc_feature (1579)..(1579): n is a, c, g, or t
gcctccaccctccaccctcctccctccctctctccccggcgcgggcgagtgtctgcggcgcggcggccaggaaatgccgcagatgcgccgcgcagcatccccggtgaaggcagcgcgccggtcctcccgcaccgctgccgcggcctcggcccggcccgaagcacgcgcctcgtgcagggccagcagagcggtcagcgcggccgcagagggtccgggcgcccgccggcccccgcccgccctcgccgcacgccccgctcctccgcttggcgtggcgctgctcgtcgccgcccctgggctcgctgagatttgccgctgctgaaacccgagagggactcgggctcccggagccgggcggcccaccatcggcctgcccggaggcctgggcgtttcctttgccggccctggcgccggcagccccctgcgcccccgctctgcgtcttcggcttccgtgcttctccccagcgtgctgctccttcctcttttccagttcccaaggctgtgtcttgctgactgcgatactgtccgggggttacgagggggagaggggaatttgtcagtcatcgcttagataaacttcggcatggcgggttacctctcccctgctgcttacctgtacgtggaggagcaggagtatctccaggcctacgaggatgtcctggagaggtacaaagatgaacgggacaaagttcagaagaaaacatttacaaaatggataaatcagcatctcatgaaggttcgaaaacatgtgaatgatctctatgaagacttaagggatggacacaatttgatttctcttttagaggttctttcaggagataccttgcccagagaaaaaggtcggatgcgttttcacagactacagaatgtacaaattgcacttgactatttgaaaagacgccaggtgaaattagtgaatattagaaatgatgacataacagatggaaatcccaaattgactttgggattaatctggacaataattttgcactttcagatatctgatatccatgttactggagagtcagaggatatgtctgcaaaagagagattgctactctggacgcagcaggcaacagagggttatgctggaattcggtgtgaaaatttcactacctgctggagagatggaaaattatttaatgccatcattcataaatacaggccggacctgatagatatgaatactgttgctgttcaaagcaaccttgcaaatttagagcatgctttttacgtagcagaaaaaattggtgttataagacttctggaccctgaagatgtcgatgtctcctcacctgatgaaaaatcagtaataacttacgtgtcatctctctatgatgcatttcctaaagtccctgaaggtggggaaggcattggtgcaaatgatgttgaagtcaaatggattgaataccagaatatggtgaactacctcatccaatggattagacaccatgtgaccacaatgtctgagagaacatttcctaataatcctgtagaactgaaggcactttataatcagtatttacagtttaaagaaacagaaattccaccaaaggagacagaaaaatcaaaaattaaacgnctatataaattattagagatttggatagaatttggacgcatcaagctccttcaaggttatcatccaaatgacatagaaaaagagtgggggaaactcattattgccatgctagagagagagaaggcccttcgtccagaagtagaaaggttagaaatgttgcaacagattgccaacagagttcagagggacagtgtcatctgtgaagacaaactgattcttgctggaaatgctcttcagtctgattctaaaagattagaatcaggagtgcagtttcagaatgaagcagaaattgctgggtatatacttgaatgtgagaaccttttacgccagcatgtaattgatgtacagattcttattgatggaaaatactaccaggcagatcaattggtacagagggttgcaaaactgcgtgacgaaattatggccttaaggaacgaatgttcttctgtgtacagcaaaggacgcatactgacaacagaacagacaaagctcatgatatcaggaatcactcaaagtttaaactcaggatttgcacagaccttacaccctagtctgacctcagggctgacccagagtttaacaccttccctaacctcttctagtatgacttctggcctgtcatcagggatgacttcccgcctgactccatctgtcactccagcttatacacctggtttcccatcaggattagttccaaatttcagttcaggagtagagccaaattcattgcaaactttgaagttgatgcagatccgaaaaccccttctaaagtcttctttgctggatcaaaatttaacagaagaagaaatcaatatgaaatttgttcaggatcttttgaattgggttgatgagatgcaggtacaactggaccgcactgagtggggctcagatttgccaagtgttgaaagccatttagaaaatcataaaaatgttcatagagctattgaagaatttgaatctagtctcaaagaagctaaaatcagtgagattcaaatgacagcacctcttaaactgacttatgcagaaaagttgcacagattagagagtcagtatgcaaaactcttgaatacatccaggaatcaagaacggcaccttgatacactccataattttgtaagtcgtgcgactaatgaacttatttggttgaatgaaaaagaagaggaggaagttgcttatgactggagtgagagaaacaccaacatagctaggaaaaaagattatcatgctgaattaatgagagaacttgatcaaaaggaagaaaatattaaatcagttcaggagatagcagagcagctacttctagaaaatcatccagcccggttaactattgaggtaaagctggaaagtgtaatggtgttggttgaatattgatatgattatttcccttcagattcttttattgctgagaagttgaa

SEQ ID NO: 306916 - DNA, 2064 bp, Homo sapiens
tggtgttctagaggatctcggaagcacacgcaacacaagagttttccctaatcccaataacaagcaagctctgtattactcagaattactgcgaatgtgtgtatttgatgtagagtcccaatgctttctgtttccatttggggagaggaacatttccaatctcaatgtcaagaaaacacatagaatttctgtagtagatactaaaacaggatcagaattgaccgtgtatgaggctttccagagaaacctgattgagaaaagtatatatcttgaactttcagggcagcaatatcagtggaaggaagctatgttttttgaatcctatgggcattcttctcatatgctgactgatactaaaacaggattacacttcaatattaatgaggctatagagcagggaacaattgacaaagccttggtcaaaaagtatcaggaaggcctcatcacacttacagaacttgctgattctttgctgagccggttagtccccaagaaagatttgcacagtcctgttgcagggtattggctgactgctagtggggaaaggatctctgtactaaaagcctcccgtagaaatttggttgatcggattactgccctccgatgccttgaagcccaagtcagtacagggggcataattgatcctcttactggcaaaaagtaccgggtggccgaagctttgcatagaggcctggttgatgaggggtttgcccagcagctgcgacagtgtgaattagtaatcacagggattggccatcccatcactaacaaaatgatgtcagtggtggaagctgtgaatgcaaatattataaataaggaaatgggaatccgatgtttggaatttcagtacttgacaggagggttgatagagccacaggttcactctcggttatcaatagaagaggctctccaagtaggtattatagatgtcctcattgccacaaaactcaaagatcaaaagtcatatgtcagaaatataatatgccctcagacaaaaagaaagttgacatataaagaagccttagaaaaagctgattttgatttccacacaggacttaaactgttagaagtatctgagcccctgatgacaggaatttctagcctctactattcttcctaatgggacatgtttaaataactgtgcaaggggtgatgcaggctggttcatgccactttttcagagtatgatgatatcggctacatatgcagtctgtgaattatgtaacatactctatttcttgagggctgcaaattgctaagtgctcaaaatagagtaagttttaaattgaaaattacataagatttaatgcccttcaaatggtttcatttagccttgagaatggttttttgaaacttggccacactaaaatgtttttttttttttacgtagaatgtgggataaacttgatgaactccaagttcacagtgtcatttcttcagaactccccttcattgaatagtgatcatttattaaatgataaattgcactcgctgaaagagcacgtcatgaagcaccatggaatcaaagagaaagatataaattcgttcccacagccttcaagctgcagtgttttagattgcttcaaaaaatgaaaaagttttgcctttttctgtatatagtgaccttctttgcatattaaaatgtttaccacaatgtcccatttctagttaagtcttcgcacttgaaagctaacattatgaatattatgtgttggaggaggggaaggattttcttcattctgtgtattttccttacatgtacagtagacgttctctattctatcagccttctatggtacctttttgtcaggacaattaggattgtaatgctaatgcaaaggcagcaattcaaagatcttctagtgcctcatgaataaagttgagatttaaaatttgtaacattgatggaacagctgggaggttagaccaatcattaaggaatgtatgccatagctttctttgctaccataaacattttggaggtgcatctgctatgtgacatggtaaatatggttaagtgaatgaataaaatgttttagtaacctgtgtgtgatgaaaaaaaat

SEQ ID NO: 306917 - DNA, 591 bp, Homo sapiens
gtcatgagtcactcggtaggtgaagaacaaggagttaaatgaagtctcatttatctcttttctccccagatgctgttttgagatcgcaccactttcgttctgaggtaatttatttagcgcgcacgctcaaggtcagaagaagttctctttcctgagtaccaatattaattatatgcgtgttaagaaaccagtaggacactgaatgacgaacatgctgtcccctagccgaaagtggcatgtttccttttaagtgatttcatattagtgcccagcgaacggttttagcaaatttcttgtgtagtggagctgttgtacaagaggggaaaaggcaaaccctaaaagtgctgcagaccttaaaaaacttagccacagggtggatgtcacttgagtttacagtttatattttgctggtggaagtgttttctgggtgctgtcagttgactctggttgttcacttggataaacgaagaggttagtgcagaacaatttgatccatatgcatttcattttcgattttcaagtttacatttctgttttctcctaaagctctccatgttttattggggaccatctgatgatttttgcaaagcg

SEQ ID NO: 306918 - DNA, 8996 bp, Homo sapiens
gagctgccacttttcaccgttagaagtagagctttttccagacctcctaccttttagtctactttgaaaggtgaaagaaagaacatcgtttcaggaataaaaatgcacagtagtagttatagttaccgtagcagtgattctgtgtttagtaacactaccagcactcgaaccagtcttgattcaaatgaaaatcttctcttggttcattgtggtccaacactgatcaactcttgcattagcttcggcagtgaatcctttgatggacacaggttagaaatgttgcaacagattgccaacagagttcagagggacagtgtcatctgtgaagacaaactgattcttgctggaaatgctcttcagtctgattctaaaagattagaatcaggagtgcagtttcagaatgaagcagaaattgctgggtatatacttgaatgtgagaaccttttacgccagcatgtaattgatgtacagattcttattgatggaaaatactaccaggcagatcaattggtacagagggttgcaaaactgcgtgacgaaattatggccttaaggaacgaatgttcttctgtgtacagcaaaggacgcatactgacaacagaacagacaaagctcatgatatcaggaatcactcaaagtttaaactcaggatttgcacagaccttacaccctagtctgacctcagggctgacccagagtttaacaccttccctaacctcttctagtatgacttctggcctgtcatcagggatgacttcccgcctgactccatctgtcactccagcttatacacctggtttcccatcaggattagttccaaatttcagttcaggagtagagccaaattcattgcaaactttgaagttgatgcagatccgaaaaccccttctaaagtcttctttgctggatcaaaatttaacagaagaagaaatcaatatgaaatttgttcaggatcttttgaattgggttgatgagatgcaggtacaactggaccgcactgagtggggctcagatttgccaagtgttgaaagccatttagaaaatcataaaaatgttcatagagctattgaagaatttgaatctagtctcaaagaagctaaaatcagtgagattcaaatgacagcacctcttaaactgacttatgcagaaaagttgcacagattagagagtcagtatgcaaaactcttgaatacatccaggaatcaagaacggcaccttgatacactccataattttgtaagtcgtgcgactaatgaacttatttggttgaatgaaaaagaagaggaggaagttgcttatgactggagtgagagaaacaccaacatagctaggaaaaaagattatcatgctgaattaatgagagaacttgatcaaaaggaagaaaatattaaatcagttcaggagatagcagagcagctacttctagaaaatcatccagcccggttaactattgaggcctacagagcggcaatgcagacgcagtggagctggatcttacagctctgccagtgtgtggagcagcacataaaggagaacacagcgtatttcgagtttttcaatgatgccaaagaagctactgattacttaaggaatctaaaagatgccattcagcggaagtacagctgtgatagatcaagcagcattcacaagctagaagaccttgttcaggaatcaatggaagagaaagaagaacttctgcagtacaaaagcactatagcaaacctaatgggaaaagcaaaaacaataattcaactgaagccaaggaattctgactgtccactcaaaacttctattccgatcaaagctatctgtgactacagacaaattgagataaccatttacaaagacgatgaatgtgttttggcgaataactctcatcgtgctaaatggaaggtcattagtcctactgggaatgaggctatggtcccatctgtgtgcttcaccgttcctccaccaaacaaagaagcggtggaccttgccaacagaattgagcaacagtatcagaatgtcctgactctttggcatgagtctcacataaacatgaagagtgtagtatcctggcattatctcatcaatgaaattgatagaattcgagctagcaatgtggcttcaataaagacaatgctacctggtgaacatcagcaagttctaagtaatctacaatctcgttttgaagattttctggaagatagccaggaatcccaagtcttttcaggctcagatataacacaactggaaaaggaggttaatgtatgtaagcagtattatcaagaacttcttaaatctgcagaaagagaggagcaagaggaatcagtttataatctctacatctctgaagttcgaaacattagacttcggttagagaactgtgaagatcggctgattagacagattcgaactcccctggaaagagatgatttgcatgaaagtgtgttcagaatcacagaacaggagaaactaaagaaagagctggaacgacttaaagatgatttgggaacaatcacaaataagtgtgaggagtttttcagtcaagcagcagcctcttcatcagtccctaccctacgatcagagcttaatgtggtccttcagaacatgaaccaagtctattctatgtcttccacttacatagataagttgaaaactgttaacttggtgttaaaaaacactcaagctgcagaagccctcgtaaaactctatgaaactaaactgtgtgaagaagaagcagttatagctgacaagaataatattgagaatctaataagtactttaaagcaatggagatctgaagtagatgaaaagagacaggtattccatgccttagaggatgagttgcagaaagctaaagccatcagtgatgaaatgtttaaaacgtataaagaacgggaccttgattttgactggcacaaagaaaaagcagatcaattagttgaaaggtggcaaaatgttcatgtgcagattgacaacaggttacgggacttagagggcattggcaaatcactgaagtactacagagacacttaccatcctttagatgattggatccagcaggttgaaactactcagagaaagattcaggaaaatcagcctgaaaatagtaaaaccctagccacacagttgaatcaacagaagatgctggtgtccgaaatagaaatgaaacagagcaaaatggacgagtgtcaaaaatatgcagaacagtactcagctacagtgaaggactatgaattacaaacaatgacctaccgggccatggtagattcacaacaaaaatctccagtgaaacgccgaagaatgcagagttcagcagatctcattattcaagagttcatggacctaaggactcgatatactgccctggtcactctcatgacacaatatattaaatttgctggtgattcattgaagaggctggaagaggaggagattaaaaggtgtaaggagacttctgaacatggggcatattcagatctgcttcagcgtcagaaggcaacagtgcttgagaatagcaaacttacaggaaagataagtgagttggaaagaatggtagctgaactaaagaaacaaaagtcccgagtagaggaagaacttccgaaggtcagggaggctgcagaaaatgaattgagaaagcagcagagaaatgtagaagatatctctctgcagaagataagggctgaaagtgaagccaagcagtaccgcagggaacttgaaaccattgtgagagagaaggaagccgctgaaagagaactggagcgggtgaggcagctcaccatagaggccgaggctaaaagagctgccgtggaagagaacctcctgaattttcgcaatcagttggaggaaaacacctttaccagacgaacactggaagatcatcttaaaagaaaagatttaagtctcaatgatttggagcaacaaaaaaataaattaatggaagaattaagaagaaagagagacaatgaggaagaactcttgaagctgataaagcagatggaaaaagaccttgcatttcagaaacaggtagcagagaaacagttgaaagaaaagcagaaaattgaattggaagcaagaagaaaaataactgaaattcagtatacatgtagagaaaatgcattgccagtgtgtccgatcacacaggctacatcatgcagggcagtaacgggtctccagcaagaacatgacaagcagaaagcagaagaactcaaacagcaggtagatgaactaacagctgccaatagaaaggctgaacaagacatgagagagctgacatatgaacttaatgccctccagcttgaaaaaacgtcatctgaggaaaaggctcgtttgctaaaagataaactagatgaaacaaataatacactcagatgccttaagttggagctggaaaggaaggatcaggcggagaaagggtattctcaacaactcagagagcttggtaggcaattgaatcaaaccacaggtaaagctgaagaagccatgcaagaagctagtgatctcaagaaaataaagcgcaattatcagttagaattagaatctcttaatcatgaaaaagggaaactacaaagagaagtagacagaatcacaagggcacatgctgtagctgagaagaatattcagcatttaaattcacaaattcattcttttcgagatgagaaagaattagaaagactacaaatctgccagagaaaatcagatcatctaaaagaacaatttgagaaaagccatgagcagttgcttcaaaatatcaaagctgaaaaagaaaataatgataaaatccaaaggctcaatgaagaattggagaaaagtaatgagtgtgcagagatgctaaaacaaaaagtagaggagcttactaggcagaataatgaaaccaaattaatgatgcagagaattcaggcagaatcagagaatatagttttagagaaacaaactatccagcaaagatgtgaagcactgaaaattcaggcagatggttttaaagatcagctacgcagcacaaatgaacacttgcataaacagacaaaaacagagcaggattttcaaagaaaaattaaatgcctagaagaagacctggcgaaaagtcaaaatttggtaagtgaatttaagcaaaagtgtgaccaacagaacattatcatccagaataccaagaaagaagttagaaatctgaatgcggaactgaatgcttccaaagaagagaagcgacgcggggagcagaaagttcagctacaacaagctcaggtgcaagagttaaataacaggttgaaaaaagtacaagacgaattacacttaaagaccatagaggagcagatgacccacagaaagatggttctgtttcaggaagaatctggtaaattcaaacaatcagcagaggagtttcggaagaagatggaaaaattaatggagtccaaagtcatcactgaaaatgatatttcaggcattaggcttgactttgtgtctcttcaacaagaaaactctagagcccaagaaaatgctaagctttgtgaaacaaacattaaagaacttgaaagacagcttcaacagtatcgtgaacaaatgcagcaagggcagcacatggaagcaaatcattaccaaaaatgtcagaaacttgaggatgagctgatagcccagaagcgtgaggttgaaaacctgaagcaaaaaatggaccaacagatcaaagagcatgaacatcaattagttttgctccagtgtgaaattcaaaaaaagagcacagccaaagactgtaccttcaaaccagattttgagatgacagtgaaggagtgccagcactctggagagctgtcctctagaaacactggacaccttcacccaacacccagatcccctctgttgagatggactcaagaaccacagccattggaagagaagtggcagcatcgggttgttgaacagatacccaaagaagtccaattccagccaccaggggctccactcgagaaagagaaaagccagcagtgttactctgagtacttttctcagacaagcaccgagttacagataacttttgatgagacaaaccccattacaagactgtctgaaattgagaagataagagaccaagccctgaacaattctagaccacctgttaggtatcaagataacgcatgtgaaatggaactggtgaaggttttgacacccttagagatagctaagaacaagcagtatgatatgcatacagaagtcacaacattaaaacaagaaaagaacccagttcccagtgctgaagaatggatgcttgaagggtgcagagcatctggtggactcaagaaaggggatttccttaagaagggcttagaaccagagaccttccagaactttgatggtgatcatgcatgttcagtcagggatgatgaatttaaattccaagggcttaggcacactgtgactgccaggcagttggtggaagctaagcttctggacatgagaacaattgagcagctgcgactcggtcttaagactgttgaagaagttcagaaaactcttaacaagtttctgacgaaagccacctcaattgcagggctttacctagaatctacaaaagaaaagatttcatttgcctcagcggccgagagaatcataatagacaaaatggtggctttggcatttttagaagctcaggctgcaacaggttttataattgatcccatttcaggtcagacatattctgttgaagatgcagttcttaaaggagttgttgaccccgaattcagaattaggcttcttgaggcagagaaggcagctgtgggatattcttattcttctaagacattgtcagtgtttcaagctatggaaaatagaatgcttgacagacaaaaaggtaaacatatcttggaagcccagattgccagtgggggtgtcattgaccctgtgagaggcattcgtgttcctccagaaattgctctgcagcaggggttgttgaataatgccatcttacagtttttacatgagccatccagcaacacaagagttttccctaatcccaataacaagcaagctctgtattactcagaattactgcgaatgtgtgtatttgatgtagagtcccaatgctttctgtttccatttggggagaggaacatttccaatctcaatgtcaagaaaacacatagaatttctgtagtagatactaaaacaggatcagaattgaccgtgtatgaggctttccagagaaacctgattgagaaaagtatatatcttgaactttcagggcagcaatatcagtggaaggaagctatgttttttgaatcctatgggcattcttctcatatgctgactgatactaaaacaggattacacttcaatattaatgaggctatagagcagggaacaattgacaaagccttggtcaaaaagtatcaggaaggcctcatcacacttacagaacttgctgattctttgctgagccggttagtccccaagaaagatttgcacagtcctgttgcagggtattggctgactgctagtggggaaaggatctctgtactaaaagcctcccgtagaaatttggttgatcggattactgccctccgatgccttgaagcccaagtcagtacagggggcataattgatcctcttactggcaaaaagtaccgggtggccgaagctttgcatagaggcctggttgatgaggggtttgcccagcagctgcgacagtgtgaattagtaatcacagggattggccatcccatcactaacaaaatgatgtcagtggtggaagctgtgaatgcaaatattataaataaggaaatgggaatccgatgtttggaatttcagtacttgacaggagggttgatagagccacaggttcactctcggttatcaatagaagaggctctccaagtaggtattatagatgtcctcattgccacaaaactcaaagatcaaaagtcatatgtcagaaatataatatgccctcagacaaaaagaaagttgacatataaagaagccttagaaaaagctgattttgatttccacacaggacttaaactgttagaagtatctgagcccctgatgacaggaatttctagcctctactattcttcctaatgggacatgtttaaataactgtgcaaggggtgatgcaggctggttcatgccactttttcagagtatgatgatatcggctacatatgcagtctgtgaattatgtaacatactctatttcttgagggctgcaaattgctaagtgctcaaaatagagtaagttttaaattgaaaattacataagatttaatgcccttcaaatggtttcatttagccttgagaatggttttttgaaacttggccacactaaaatgtttttttttttttacgtagaatgtgggataaacttgatgaactccaagttcacagtgtcatttcttcagaactccccttcattgaatagtgatcatttattaaatgataaattgcactcgctgaaagagcacgtcatgaagcaccatggaatcaaagagaaagatataaattcgttcccacagccttcaagctgcagtgttttagattgcttcaaaaaatgaaaaagttttgcctttttctgtatatagtgaccttctttgcatattaaaatgtttaccacaatgtcccatttctagttaagtcttcgcacttgaaagctaacattatgaatattatgtgttggaggaggggaaggattttcttcattctgtgtattttccttacatgtacagtagacgttctctattctatcagccttctatggtacctttttgtcaggacaattaggattgtaatgctaatgcaaaggcagcaattcaaagatcttctagtgcctcatgaataaagttgagatttaaaatttgtaacattgatggaacagctgggaggttagaccaatcattaaggaatgtatgccatagctttctttgctaccataaacattttggaggtgcatctgctatgtgacatggtaaatatggttaagtgaatgaataaaatgttttagtaacctgtgtgtgatgaaaaaaaat

SEQ ID NO: 306919 - DNA, 1146 bp, Homo sapiens
tgaagaggatggtcataaagtctgtgtggaacagatgtcagagtggaattttcagacttaatggagaggatctaagtaagctctggattttgaaatgagtgaatctatggagctgtgatctcctacaaatcaaatggggaatgtctgtggatgtgtaagagctgagaaagaagaacaatatgtagatcctgccaaaactcctttgaaccctgaaaaatactctcctggaagaaaatatttcagaagaaaaccgatcaaaaaaactggaggtgacaaagagtcagttggggcaaacaatgaaaatgaaggcaagaagaagagcagcagtcagccttcaaaagaacagccagctcctttatccaggggactggtacagcaggaatctgttaccctaaactctgcactgggagatggtattcagcaaaagaagacagaagttgtagctgacagcgttaaacagaaacttctgccgagtgctgtaagcagttggtctgactgtgtgaacacttctcctgctaaagacagtgaaacagaagtaaaagttagtgaactggatgaaaggatttcagaaaaagacagcactccatattgcgcaaagaggaagaaacatttagatgatgtcaacacaagcgaaataacattccaggaaaaaactgatgttttttctttccgaaaggcagccagcttaagctctattccctcgggtatagaaagatcactcgaaaaaagtgggtttcctgaagacccaccaaaaagttatagcagtattcaagaaaagcaaaacactgagagattttgccctcatgcaacacagcattttcagtttaaaaaaaagagatgccattccctttatactagtatgtcctctgtttctaaggacacagatggaaatgaggtaagtgaaatgtggagtctgagttcaagtaaataagtgttccaggtgctcacatcagactgacatctaatttgtcttttataaagttattttcatattagtgtatgtaaaagccatagagtttctgttgcgttttgttagtagcctcaggtttgattgttatgattttatttttgtgctgtgcacattctttgaccacactttaatctaaaaatcctgtacattttcattattggtggaagactttaaaa

SEQ ID NO: 306920 - DNA, 10772 bp, Homo sapiens
  misc_feature (1899)..(1899): n is a, c, g, or t
ggcggccgcggcggcggcgctgctcctccccactcgccgcgtccccggcggggctgcgcccgggggctgcgcacggacgggggcgggggcgcctggggagggaggggagaggatcccagccgccgagtcgcagcctcgtcgctgtctgctgagtcatggcaagcgctccccgcagccctggatcactcgcgtagcgcggctggcgcggggtgcgcagccattgggctgggcgcggggccgcgagcgccaggcatgacgcgctgagccgcgctcacccgtgcccgccgtcccggcgtgcgcccagcgcgggtgcctgtgccgccgccctccagccccgccgtcgagtcgccctcgcctcgcccgcaccatgatcgccgcggctttcctcgtcttgctgagaccctacagcatccaatgtgccctcttcctcttgttgcttctgctgggcaccatcgccaccatcgtcttcttctgctgctggcaccgcaagctccagaaagggaggcatccgatgaaatcgtcttctcgggtcgttcaagaagccgagatgctgttttgagatcgcaccactttcgttctgagggattcagagcaagccctcggcatcttagaagacgagttgcagcggccgcagctgcccgtctggaagaagtgaagcccgtggtggaagttcaccatcagagtgagcaagaaacttcagtgaggaaacgaagaatcaagaagagcagccgagtccagccagaattttatcactctgttcaaggtgcttcaatcaggaggcctagttccgggaacgcgtcctatcgctgctctatgtcttcctctgcggatttttccgatgaggatgatttcagccagaaatctggctccgcatccccagctccgggagacaccttaccctggaatttgcctaaacatgagagatcgaaaagaaagattcaagggggctcagtgctggaccctgccgagagggcagtgcttcggatagcagatgaacgggacaaagttcagaagaaaacatttacaaaatggataaatcagcatctcatgaaggttcgaaaacatgtgaatgatctctatgaagacttaagggatggacacaatttgatttctcttttagaggttctttcaggagataccttgcccagagaaaaaggtcggatgcgttttcacagactacagaatgtacaaattgcacttgactatttgaaaagacgccaggtgaaattagtgaatattagaaatgatgacataacagatggaaatcccaaattgactttgggattaatctggacaataattttgcactttcagatatctgatatccatgttactggagagtcagaggatatgtctgcaaaagagagattgctactctggacgcagcaggcaacagagggttatgctggaattcggtgtgaaaatttcactacctgctggagagatggaaaattatttaatgccatcattcataaatacaggccggacctgatagatatgaatactgttgctgttcaaagcaaccttgcaaatttagagcatgctttttacgtagcagaaaaaattggtgttataagacttctggaccctgaagatgtcgatgtctcctcacctgatgaaaaatcagtaataacttacgtgtcatctctctatgatgcatttcctaaagtccctgaaggtggggaaggcattggtgcaaatgatgttgaagtcaaatggattgaataccagaatatggtgaactacctcatccaatggattagacaccatgtgaccacaatgtctgagagaacatttcctaataatcctgtagaactgaaggcactttataatcagtatttacagtttaaagaaacagaaattccaccaaaggagacagaaaaatcaaaaattaaacgnctatataaattattagagatttggatagaatttggacgcatcaagctccttcaaggttatcatccaaatgacatagaaaaagagtgggggaaactcattattgccatgctagagagagagaaggcccttcgtccagaagtagaaaggttagaaatgttgcaacagattgccaacagagttcagagggacagtgtcatctgtgaagacaaactgattcttgctggaaatgctcttcagtctgattctaaaagattagaatcaggagtgcagtttcagaatgaagcagaaattgctgggtatatacttgaatgtgagaaccttttacgccagcatgtaattgatgtacagattcttattgatggaaaatactaccaggcagatcaattggtacagagggttgcaaaactgcgtgacgaaattatggccttaaggaacgaatgttcttctgtgtacagcaaaggacgcatactgacaacagaacagacaaagctcatgatatcaggaatcactcaaagtttaaactcaggatttgcacagaccttacaccctagtctgacctcagggctgacccagagtttaacaccttccctaacctcttctagtatgacttctggcctgtcatcagggatgacttcccgcctgactccatctgtcactccagcttatacacctggtttcccatcaggattagttccaaatttcagttcaggagtagagccaaattcattgcaaactttgaagttgatgcagatccgaaaaccccttctaaagtcttctttgctggatcaaaatttaacagaagaagaaatcaatatgaaatttgttcaggatcttttgaattgggttgatgagatgcaggtacaactggaccgcactgagtggggctcagatttgccaagtgttgaaagccatttagaaaatcataaaaatgttcatagagctattgaagaatttgaatctagtctcaaagaagctaaaatcagtgagattcaaatgacagcacctcttaaactgacttatgcagaaaagttgcacagattagagagtcagtatgcaaaactcttgaatacatccaggaatcaagaacggcaccttgatacactccataattttgtaagtcgtgcgactaatgaacttatttggttgaatgaaaaagaagaggaggaagttgcttatgactggagtgagagaaacaccaacatagctaggaaaaaagattatcatgctgaattaatgagagaacttgatcaaaaggaagaaaatattaaatcagttcaggagatagcagagcagctacttctagaaaatcatccagcccggttaactattgaggcctacagagcggcaatgcagacgcagtggagctggatcttacagctctgccagtgtgtggagcagcacataaaggagaacacagcgtatttcgagtttttcaatgatgccaaagaagctactgattacttaaggaatctaaaagatgccattcagcggaagtacagctgtgatagatcaagcagcattcacaagctagaagaccttgttcaggaatcaatggaagagaaagaagaacttctgcagtacaaaagcactatagcaaacctaatgggaaaagcaaaaacaataattcaactgaagccaaggaattctgactgtccactcaaaacttctattccgatcaaagctatctgtgactacagacaaattgagataaccatttacaaagacgatgaatgtgttttggcgaataactctcatcgtgctaaatggaaggtcattagtcctactgggaatgaggctatggtcccatctgtgtgcttcaccgttcctccaccaaacaaagaagcggtggaccttgccaacagaattgagcaacagtatcagaatgtcctgactctttggcatgagtctcacataaacatgaagagtgtagtatcctggcattatctcatcaatgaaattgatagaattcgagctagcaatgtggcttcaataaagacaatgctacctggtgaacatcagcaagttctaagtaatctacaatctcgttttgaagattttctggaagatagccaggaatcccaagtcttttcaggctcagatataacacaactggaaaaggaggttaatgtatgtaagcagtattatcaagaacttcttaaatctgcagaaagagaggagcaagaggaatcagtttataatctctacatctctgaagttcgaaacattagacttcggttagagaactgtgaagatcggctgattagacagattcgaactcccctggaaagagatgatttgcatgaaagtgtgttcagaatcacagaacaggagaaactaaagaaagagctggaacgacttaaagatgatttgggaacaatcacaaataagtgtgaggagtttttcagtcaagcagcagcctcttcatcagtccctaccctacgatcagagcttaatgtggtccttcagaacatgaaccaagtctattctatgtcttccacttacatagataagttgaaaactgttaacttggtgttaaaaaacactcaagctgcagaagccctcgtaaaactctatgaaactaaactgtgtgaagaagaagcagttatagctgacaagaataatattgagaatctaataagtactttaaagcaatggagatctgaagtagatgaaaagagacaggtattccatgccttagaggatgagttgcagaaagctaaagccatcagtgatgaaatgtttaaaacgtataaagaacgggaccttgattttgactggcacaaagaaaaagcagatcaattagttgaaaggtggcaaaatgttcatgtgcagattgacaacaggttacgggacttagagggcattggcaaatcactgaagtactacagagacacttaccatcctttagatgattggatccagcaggttgaaactactcagagaaagattcaggaaaatcagcctgaaaatagtaaaaccctagccacacagttgaatcaacagaagatgctggtgtccgaaatagaaatgaaacagagcaaaatggacgagtgtcaaaaatatgcagaacagtactcagctacagtgaaggactatgaattacaaacaatgacctaccgggccatggtagattcacaacaaaaatctccagtgaaacgccgaagaatgcagagttcagcagatctcattattcaagagttcatggacctaaggactcgatatactgccctggtcactctcatgacacaatatattaaatttgctggtgattcattgaagaggctggaagaggaggagattaaaaggtgtaaggagacttctgaacatggggcatattcagatctgcttcagcgtcagaaggcaacagtgcttgagaatagcaaacttacaggaaagataagtgagttggaaagaatggtagctgaactaaagaaacaaaagtcccgagtagaggaagaacttccgaaggtcagggaggctgcagaaaatgaattgagaaagcagcagagaaatgtagaagatatctctctgcagaagataagggctgaaagtgaagccaagcagtaccgcagggaacttgaaaccattgtgagagagaaggaagccgctgaaagagaactggagcgggtgaggcagctcaccatagaggccgaggctaaaagagctgccgtggaagagaacctcctgaattttcgcaatcagttggaggaaaacacctttaccagacgaacactggaagatcatcttaaaagaaaagatttaagtctcaatgatttggagcaacaaaaaaataaattaatggaagaattaagaagaaagagagacaatgaggaagaactcttgaagctgataaagcagatggaaaaagaccttgcatttcagaaacaggtagcagagaaacagttgaaagaaaagcagaaaattgaattggaagcaagaagaaaaataactgaaattcagtatacatgtagagaaaatgcattgccagtgtgtccgatcacacaggctacatcatgcagggcagtaacgggtctccagcaagaacatgacaagcagaaagcagaagaactcaaacagcaggtagatgaactaacagctgccaatagaaaggctgaacaagacatgagagagctgacatatgaacttaatgccctccagcttgaaaaaacgtcatctgaggaaaaggctcgtttgctaaaagataaactagatgaaacaaataatacactcagatgccttaagttggagctggaaaggaaggatcaggcggagaaagggtattctcaacaactcagagagcttggtaggcaattgaatcaaaccacaggtaaagctgaagaagccatgcaagaagctagtgatctcaagaaaataaagcgcaattatcagttagaattagaatctcttaatcatgaaaaagggaaactacaaagagaagtagacagaatcacaagggcacatgctgtagctgagaagaatattcagcatttaaattcacaaattcattcttttcgagatgagaaagaattagaaagactacaaatctgccagagaaaatcagatcatctaaaagaacaatttgagaaaagccatgagcagttgcttcaaaatatcaaagctgaaaaagaaaataatgataaaatccaaaggctcaatgaagaattggagaaaagtaatgagtgtgcagagatgctaaaacaaaaagtagaggagcttactaggcagaataatgaaaccaaattaatgatgcagagaattcaggcagaatcagagaatatagttttagagaaacaaactatccagcaaagatgtgaagcactgaaaattcaggcagatggttttaaagatcagctacgcagcacaaatgaacacttgcataaacagacaaaaacagagcaggattttcaaagaaaaattaaatgcctagaagaagacctggcgaaaagtcaaaatttggtaagtgaatttaagcaaaagtgtgaccaacagaacattatcatccagaataccaagaaagaagttagaaatctgaatgcggaactgaatgcttccaaagaagagaagcgacgcggggagcagaaagttcagctacaacaagctcaggtgcaagagttaaataacaggttgaaaaaagtacaagacgaattacacttaaagaccatagaggagcagatgacccacagaaagatggttctgtttcaggaagaatctggtaaattcaaacaatcagcagaggagtttcggaagaagatggaaaaattaatggagtccaaagtcatcactgaaaatgatatttcaggcattaggcttgactttgtgtctcttcaacaagaaaactctagagcccaagaaaatgctaagctttgtgaaacaaacattaaagaacttgaaagacagcttcaacagtatcgtgaacaaatgcagcaagggcagcacatggaagcaaatcattaccaaaaatgtcagaaacttgaggatgagctgatagcccagaagcgtgaggttgaaaacctgaagcaaaaaatggaccaacagatcaaagagcatgaacatcaattagttttgctccagtgtgaaattcaaaaaaagagcacagccaaagactgtaccttcaaaccagattttgagatgacagtgaaggagtgccagcactctggagagctgtcctctagaaacactggacaccttcacccaacacccagatcccctctgttgagatggactcaagaaccacagccattggaagagaagtggcagcatcgggttgttgaacagatacccaaagaagtccaattccagccaccaggggctccactcgagaaagagaaaagccagcagtgttactctgagtacttttctcagacaagcaccgagttacagataacttttgatgagacaaaccccattacaagactgtctgaaattgagaagataagagaccaagccctgaacaattctagaccacctgttaggtatcaagataacgcatgtgaaatggaactggtgaaggttttgacacccttagagatagctaagaacaagcagtatgatatgcatacagaagtcacaacattaaaacaagaaaagaacccagttcccagtgctgaagaatggatgcttgaagggtgcagagcatctggtggactcaagaaaggggatttccttaagaagggcttagaaccagagaccttccagaactttgatggtgatcatgcatgttcagtcagggatgatgaatttaaattccaagggcttaggcacactgtgactgccaggcagttggtggaagctaagcttctggacatgagaacaattgagcagctgcgactcggtcttaagactgttgaagaagttcagaaaactcttaacaagtttctgacgaaagccacctcaattgcagggctttacctagaatctacaaaagaaaagatttcatttgcctcagcggccgagagaatcataatagacaaaatggtggctttggcatttttagaagctcaggctgcaacaggttttataattgatcccatttcaggtcagacatattctgttgaagatgcagttcttaaaggagttgttgaccccgaattcagaattaggcttcttgaggcagagaaggcagctgtgggatattcttattcttctaagacattgtcagtgtttcaagctatggaaaatagaatgcttgacagacaaaaaggtaaacatatcttggaagcccagattgccagtgggggtgtcattgaccctgtgagaggcattcgtgttcctccagaaattgctctgcagcaggggttgttgaataatgccatcttacagtttttacatgagccatccagcaacacaagagttttccctaatcccaataacaagcaagctctgtattactcagaattactgcgaatgtgtgtatttgatgtagagtcccaatgctttctgtttccatttggggagaggaacatttccaatctcaatgtcaagaaaacacatagaatttctgtagtagatactaaaacaggatcagaattgaccgtgtatgaggctttccagagaaacctgattgagaaaagtatatatcttgaactttcagggcagcaatatcagtggaaggaagctatgttttttgaatcctatgggcattcttctcatatgctgactgatactaaaacaggattacacttcaatattaatgaggctatagagcagggaacaattgacaaagccttggtcaaaaagtatcaggaaggcctcatcacacttacagaacttgctgattctttgctgagccggttagtccccaagaaagatttgcacagtcctgttgcagggtattggctgactgctagtggggaaaggatctctgtactaaaagcctcccgtagaaatttggttgatcggattactgccctccgatgccttgaagcccaagtcagtacagggggcataattgatcctcttactggcaaaaagtaccgggtggccgaagctttgcatagaggcctggttgatgaggggtttgcccagcagctgcgacagtgtgaattagtaatcacagggattggccatcccatcactaacaaaatgatgtcagtggtggaagctgtgaatgcaaatattataaataaggaaatgggaatccgatgtttggaatttcagtacttgacaggagggttgatagagccacaggttcactctcggttatcaatagaagaggctctccaagtaggtattatagatgtcctcattgccacaaaactcaaagatcaaaagtcatatgtcagaaatataatatgccctcagacaaaaagaaagttgacatataaagaagccttagaaaaagctgattttgatttccacacaggacttaaactgttagaagtatctgagcccctgatgacaggaatttctagcctctactattcttcctaatgggacatgtttaaataactgtgcaaggggtgatgcaggctggttcatgccactttttcagagtatgatgatatcggctacatatgcagtctgtgaattatgtaacatactctatttcttgagggctgcaaattgctaagtgctcaaaatagagtaagttttaaattgaaaattacataagatttaatgcccttcaaatggtttcatttagccttgagaatggttttttgaaacttggccacactaaaatgtttttttttttttacgtagaatgtgggataaacttgatgaactccaagttcacagtgtcatttcttcagaactccccttcattgaatagtgatcatttattaaatgataaattgcactcgctgaaagagcacgtcatgaagcaccatggaatcaaagagaaagatataaattcgttcccacagccttcaagctgcagtgttttagattgcttcaaaaaatgaaaaagttttgcctttttctgtatatagtgaccttctttgcatattaaaatgtttaccacaatgtcccatttctagttaagtcttcgcacttgaaagctaacattatgaatattatgtgttggaggaggggaaggattttcttcattctgtgtattttccttacatgtacagtagacgttctctattctatcagccttctatggtacctttttgtcaggacaattaggattgtaatgctaatgcaaaggcagcaattcaaagatcttctagtgcctcatgaataaagttgagatttaaaatttgtaacattgatggaacagctgggaggttagaccaatcattaaggaatgtatgccatagctttctttgctaccataaacattttggaggtgcatctgctatgtgacatggtaaatatggttaagtgaatgaataaaatgttttagtaacctgtgtgtgatgaaaaaaaat

SEQ ID NO: 306921 - DNA, 9659 bp, Homo sapiens
  misc_feature (786)..(786): n is a, c, g, or t
gtttgataactttctacatgtggcacattctcttaagtgctgtacacatgttatctcattcaaatctcttaacaatctcatgaagcgggaattgttattatcctaatcttagattttggaaagtgcttggcacatagtaggttcttaatctgagttagcttccttccttcctaaaggtttaacactttctgttatatctagatatctgatatccatgttactggagagtcagaggatatgtctgcaaaagagagattgctactctggacgcagcaggcaacagagggttatgctggaattcggtgtgaaaatttcactacctgctggagagatggaaaattatttaatgccatcattcataaatacaggccggacctgatagatatgaatactgttgctgttcaaagcaaccttgcaaatttagagcatgctttttacgtagcagaaaaaattggtgttataagacttctggaccctgaagatgtcgatgtctcctcacctgatgaaaaatcagtaataacttacgtgtcatctctctatgatgcatttcctaaagtccctgaaggtggggaaggcattggtgcaaatgatgttgaagtcaaatggattgaataccagaatatggtgaactacctcatccaatggattagacaccatgtgaccacaatgtctgagagaacatttcctaataatcctgtagaactgaaggcactttataatcagtatttacagtttaaagaaacagaaattccaccaaaggagacagaaaaatcaaaaattaaacgnctatataaattattagagatttggatagaatttggacgcatcaagctccttcaaggttatcatccaaatgacatagaaaaagagtgggggaaactcattattgccatgctagagagagagaaggcccttcgtccagaagtagaaaggttagaaatgttgcaacagattgccaacagagttcagagggacagtgtcatctgtgaagacaaactgattcttgctggaaatgctcttcagtctgattctaaaagattagaatcaggagtgcagtttcagaatgaagcagaaattgctgggtatatacttgaatgtgagaaccttttacgccagcatgtaattgatgtacagattcttattgatggaaaatactaccaggcagatcaattggtacagagggttgcaaaactgcgtgacgaaattatggccttaaggaacgaatgttcttctgtgtacagcaaaggacgcatactgacaacagaacagacaaagctcatgatatcaggaatcactcaaagtttaaactcaggatttgcacagaccttacaccctagtctgacctcagggctgacccagagtttaacaccttccctaacctcttctagtatgacttctggcctgtcatcagggatgacttcccgcctgactccatctgtcactccagcttatacacctggtttcccatcaggattagttccaaatttcagttcaggagtagagccaaattcattgcaaactttgaagttgatgcagatccgaaaaccccttctaaagtcttctttgctggatcaaaatttaacagaagaagaaatcaatatgaaatttgttcaggatcttttgaattgggttgatgagatgcaggtacaactggaccgcactgagtggggctcagatttgccaagtgttgaaagccatttagaaaatcataaaaatgttcatagagctattgaagaatttgaatctagtctcaaagaagctaaaatcagtgagattcaaatgacagcacctcttaaactgacttatgcagaaaagttgcacagattagagagtcagtatgcaaaactcttgaatacatccaggaatcaagaacggcaccttgatacactccataattttgtaagtcgtgcgactaatgaacttatttggttgaatgaaaaagaagaggaggaagttgcttatgactggagtgagagaaacaccaacatagctaggaaaaaagattatcatgctgaattaatgagagaacttgatcaaaaggaagaaaatattaaatcagttcaggagatagcagagcagctacttctagaaaatcatccagcccggttaactattgaggcctacagagcggcaatgcagacgcagtggagctggatcttacagctctgccagtgtgtggagcagcacataaaggagaacacagcgtatttcgagtttttcaatgatgccaaagaagctactgattacttaaggaatctaaaagatgccattcagcggaagtacagctgtgatagatcaagcagcattcacaagctagaagaccttgttcaggaatcaatggaagagaaagaagaacttctgcagtacaaaagcactatagcaaacctaatgggaaaagcaaaaacaataattcaactgaagccaaggaattctgactgtccactcaaaacttctattccgatcaaagctatctgtgactacagacaaattgagataaccatttacaaagacgatgaatgtgttttggcgaataactctcatcgtgctaaatggaaggtcattagtcctactgggaatgaggctatggtcccatctgtgtgcttcaccgttcctccaccaaacaaagaagcggtggaccttgccaacagaattgagcaacagtatcagaatgtcctgactctttggcatgagtctcacataaacatgaagagtgtagtatcctggcattatctcatcaatgaaattgatagaattcgagctagcaatgtggcttcaataaagacaatgctacctggtgaacatcagcaagttctaagtaatctacaatctcgttttgaagattttctggaagatagccaggaatcccaagtcttttcaggctcagatataacacaactggaaaaggaggttaatgtatgtaagcagtattatcaagaacttcttaaatctgcagaaagagaggagcaagaggaatcagtttataatctctacatctctgaagttcgaaacattagacttcggttagagaactgtgaagatcggctgattagacagattcgaactcccctggaaagagatgatttgcatgaaagtgtgttcagaatcacagaacaggagaaactaaagaaagagctggaacgacttaaagatgatttgggaacaatcacaaataagtgtgaggagtttttcagtcaagcagcagcctcttcatcagtccctaccctacgatcagagcttaatgtggtccttcagaacatgaaccaagtctattctatgtcttccacttacatagataagttgaaaactgttaacttggtgttaaaaaacactcaagctgcagaagccctcgtaaaactctatgaaactaaactgtgtgaagaagaagcagttatagctgacaagaataatattgagaatctaataagtactttaaagcaatggagatctgaagtagatgaaaagagacaggtattccatgccttagaggatgagttgcagaaagctaaagccatcagtgatgaaatgtttaaaacgtataaagaacgggaccttgattttgactggcacaaagaaaaagcagatcaattagttgaaaggtggcaaaatgttcatgtgcagattgacaacaggttacgggacttagagggcattggcaaatcactgaagtactacagagacacttaccatcctttagatgattggatccagcaggttgaaactactcagagaaagattcaggaaaatcagcctgaaaatagtaaaaccctagccacacagttgaatcaacagaagatgctggtgtccgaaatagaaatgaaacagagcaaaatggacgagtgtcaaaaatatgcagaacagtactcagctacagtgaaggactatgaattacaaacaatgacctaccgggccatggtagattcacaacaaaaatctccagtgaaacgccgaagaatgcagagttcagcagatctcattattcaagagttcatggacctaaggactcgatatactgccctggtcactctcatgacacaatatattaaatttgctggtgattcattgaagaggctggaagaggaggagattaaaaggtgtaaggagacttctgaacatggggcatattcagatctgcttcagcgtcagaaggcaacagtgcttgagaatagcaaacttacaggaaagataagtgagttggaaagaatggtagctgaactaaagaaacaaaagtcccgagtagaggaagaacttccgaaggtcagggaggctgcagaaaatgaattgagaaagcagcagagaaatgtagaagatatctctctgcagaagataagggctgaaagtgaagccaagcagtaccgcagggaacttgaaaccattgtgagagagaaggaagccgctgaaagagaactggagcgggtgaggcagctcaccatagaggccgaggctaaaagagctgccgtggaagagaacctcctgaattttcgcaatcagttggaggaaaacacctttaccagacgaacactggaagatcatcttaaaagaaaagatttaagtctcaatgatttggagcaacaaaaaaataaattaatggaagaattaagaagaaagagagacaatgaggaagaactcttgaagctgataaagcagatggaaaaagaccttgcatttcagaaacaggtagcagagaaacagttgaaagaaaagcagaaaattgaattggaagcaagaagaaaaataactgaaattcagtatacatgtagagaaaatgcattgccagtgtgtccgatcacacaggctacatcatgcagggcagtaacgggtctccagcaagaacatgacaagcagaaagcagaagaactcaaacagcaggtagatgaactaacagctgccaatagaaaggctgaacaagacatgagagagctgacatatgaacttaatgccctccagcttgaaaaaacgtcatctgaggaaaaggctcgtttgctaaaagataaactagatgaaacaaataatacactcagatgccttaagttggagctggaaaggaaggatcaggcggagaaagggtattctcaacaactcagagagcttggtaggcaattgaatcaaaccacaggtaaagctgaagaagccatgcaagaagctagtgatctcaagaaaataaagcgcaattatcagttagaattagaatctcttaatcatgaaaaagggaaactacaaagagaagtagacagaatcacaagggcacatgctgtagctgagaagaatattcagcatttaaattcacaaattcattcttttcgagatgagaaagaattagaaagactacaaatctgccagagaaaatcagatcatctaaaagaacaatttgagaaaagccatgagcagttgcttcaaaatatcaaagctgaaaaagaaaataatgataaaatccaaaggctcaatgaagaattggagaaaagtaatgagtgtgcagagatgctaaaacaaaaagtagaggagcttactaggcagaataatgaaaccaaattaatgatgcagagaattcaggcagaatcagagaatatagttttagagaaacaaactatccagcaaagatgtgaagcactgaaaattcaggcagatggttttaaagatcagctacgcagcacaaatgaacacttgcataaacagacaaaaacagagcaggattttcaaagaaaaattaaatgcctagaagaagacctggcgaaaagtcaaaatttggtaagtgaatttaagcaaaagtgtgaccaacagaacattatcatccagaataccaagaaagaagttagaaatctgaatgcggaactgaatgcttccaaagaagagaagcgacgcggggagcagaaagttcagctacaacaagctcaggtgcaagagttaaataacaggttgaaaaaagtacaagacgaattacacttaaagaccatagaggagcagatgacccacagaaagatggttctgtttcaggaagaatctggtaaattcaaacaatcagcagaggagtttcggaagaagatggaaaaattaatggagtccaaagtcatcactgaaaatgatatttcaggcattaggcttgactttgtgtctcttcaacaagaaaactctagagcccaagaaaatgctaagctttgtgaaacaaacattaaagaacttgaaagacagcttcaacagtatcgtgaacaaatgcagcaagggcagcacatggaagcaaatcattaccaaaaatgtcagaaacttgaggatgagctgatagcccagaagcgtgaggttgaaaacctgaagcaaaaaatggaccaacagatcaaagagcatgaacatcaattagttttgctccagtgtgaaattcaaaaaaagagcacagccaaagactgtaccttcaaaccagattttgagatgacagtgaaggagtgccagcactctggagagctgtcctctagaaacactggacaccttcacccaacacccagatcccctctgttgagatggactcaagaaccacagccattggaagagaagtggcagcatcgggttgttgaacagatacccaaagaagtccaattccagccaccaggggctccactcgagaaagagaaaagccagcagtgttactctgagtacttttctcagacaagcaccgagttacagataacttttgatgagacaaaccccattacaagactgtctgaaattgagaagataagagaccaagccctgaacaattctagaccacctgttaggtatcaagataacgcatgtgaaatggaactggtgaaggttttgacacccttagagatagctaagaacaagcagtatgatatgcatacagaagtcacaacattaaaacaagaaaagaacccagttcccagtgctgaagaatggatgcttgaagggtgcagagcatctggtggactcaagaaaggggatttccttaagaagggcttagaaccagagaccttccagaactttgatggtgatcatgcatgttcagtcagggatgatgaatttaaattccaagggcttaggcacactgtgactgccaggcagttggtggaagctaagcttctggacatgagaacaattgagcagctgcgactcggtcttaagactgttgaagaagttcagaaaactcttaacaagtttctgacgaaagccacctcaattgcagggctttacctagaatctacaaaagaaaagatttcatttgcctcagcggccgagagaatcataatagacaaaatggtggctttggcatttttagaagctcaggctgcaacaggttttataattgatcccatttcaggtcagacatattctgttgaagatgcagttcttaaaggagttgttgaccccgaattcagaattaggcttcttgaggcagagaaggcagctgtgggatattcttattcttctaagacattgtcagtgtttcaagctatggaaaatagaatgcttgacagacaaaaaggtaaacatatcttggaagcccagattgccagtgggggtgtcattgaccctgtgagaggcattcgtgttcctccagaaattgctctgcagcaggggttgttgaataatgccatcttacagtttttacatgagccatccagcaacacaagagttttccctaatcccaataacaagcaagctctgtattactcagaattactgcgaatgtgtgtatttgatgtagagtcccaatgctttctgtttccatttggggagaggaacatttccaatctcaatgtcaagaaaacacatagaatttctgtagtagatactaaaacaggatcagaattgaccgtgtatgaggctttccagagaaacctgattgagaaaagtatatatcttgaactttcagggcagcaatatcagtggaaggaagctatgttttttgaatcctatgggcattcttctcatatgctgactgatactaaaacaggattacacttcaatattaatgaggctatagagcagggaacaattgacaaagccttggtcaaaaagtatcaggaaggcctcatcacacttacagaacttgctgattctttgctgagccggttagtccccaagaaagatttgcacagtcctgttgcagggtattggctgactgctagtggggaaaggatctctgtactaaaagcctcccgtagaaatttggttgatcggattactgccctccgatgccttgaagcccaagtcagtacagggggcataattgatcctcttactggcaaaaagtaccgggtggccgaagctttgcatagaggcctggttgatgaggggtttgcccagcagctgcgacagtgtgaattagtaatcacagggattggccatcccatcactaacaaaatgatgtcagtggtggaagctgtgaatgcaaatattataaataaggaaatgggaatccgatgtttggaatttcagtacttgacaggagggttgatagagccacaggttcactctcggttatcaatagaagaggctctccaagtaggtattatagatgtcctcattgccacaaaactcaaagatcaaaagtcatatgtcagaaatataatatgccctcagacaaaaagaaagttgacatataaagaagccttagaaaaagctgattttgatttccacacaggacttaaactgttagaagtatctgagcccctgatgacaggaatttctagcctctactattcttcctaatgggacatgtttaaataactgtgcaaggggtgatgcaggctggttcatgccactttttcagagtatgatgatatcggctacatatgcagtctgtgaattatgtaacatactctatttcttgagggctgcaaattgctaagtgctcaaaatagagtaagttttaaattgaaaattacataagatttaatgcccttcaaatggtttcatttagccttgagaatggttttttgaaacttggccacactaaaatgtttttttttttttacgtagaatgtgggataaacttgatgaactccaagttcacagtgtcatttcttcagaactccccttcattgaatagtgatcatttattaaatgataaattgcactcgctgaaagagcacgtcatgaagcaccatggaatcaaagagaaagatataaattcgttcccacagccttcaagctgcagtgttttagattgcttcaaaaaatgaaaaagttttgcctttttctgtatatagtgaccttctttgcatattaaaatgtttaccacaatgtcccatttctagttaagtcttcgcacttgaaagctaacattatgaatattatgtgttggaggaggggaaggattttcttcattctgtgtattttccttacatgtacagtagacgttctctattctatcagccttctatggtacctttttgtcaggacaattaggattgtaatgctaatgcaaaggcagcaattcaaagatcttctagtgcctcatgaataaagttgagatttaaaatttgtaacattgatggaacagctgggaggttagaccaatcattaaggaatgtatgccatagctttctttgctaccataaacattttggaggtgcatctgctatgtgacatggtaaatatggttaagtgaatgaataaaatgttttagtaacctgtgtgtgatgaaaaaaaat

SEQ ID NO: 306922 - DNA, 8716 bp, Homo sapiens
  misc_feature (1579)..(1579): n is a, c, g, or t
gcctccaccctccaccctcctccctccctctctccccggcgcgggcgagtgtctgcggcgcggcggccaggaaatgccgcagatgcgccgcgcagcatccccggtgaaggcagcgcgccggtcctcccgcaccgctgccgcggcctcggcccggcccgaagcacgcgcctcgtgcagggccagcagagcggtcagcgcggccgcagagggtccgggcgcccgccggcccccgcccgccctcgccgcacgccccgctcctccgcttggcgtggcgctgctcgtcgccgcccctgggctcgctgagatttgccgctgctgaaacccgagagggactcgggctcccggagccgggcggcccaccatcggcctgcccggaggcctgggcgtttcctttgccggccctggcgccggcagccccctgcgcccccgctctgcgtcttcggcttccgtgcttctccccagcgtgctgctccttcctcttttccagttcccaaggctgtgtcttgctgactgcgatactgtccgggggttacgagggggagaggggaatttgtcagtcatcgcttagataaacttcggcatggcgggttacctctcccctgctgcttacctgtacgtggaggagcaggagtatctccaggcctacgaggatgtcctggagaggtacaaagatgaacgggacaaagttcagaagaaaacatttacaaaatggataaatcagcatctcatgaaggttcgaaaacatgtgaatgatctctatgaagacttaagggatggacacaatttgatttctcttttagaggttctttcaggagataccttgcccagagaaaaaggtcggatgcgttttcacagactacagaatgtacaaattgcacttgactatttgaaaagacgccaggtgaaattagtgaatattagaaatgatgacataacagatggaaatcccaaattgactttgggattaatctggacaataattttgcactttcagatatctgatatccatgttactggagagtcagaggatatgtctgcaaaagagagattgctactctggacgcagcaggcaacagagggttatgctggaattcggtgtgaaaatttcactacctgctggagagatggaaaattatttaatgccatcattcataaatacaggccggacctgatagatatgaatactgttgctgttcaaagcaaccttgcaaatttagagcatgctttttacgtagcagaaaaaattggtgttataagacttctggaccctgaagatgtcgatgtctcctcacctgatgaaaaatcagtaataacttacgtgtcatctctctatgatgcatttcctaaagtccctgaaggtggggaaggcattggtgcaaatgatgttgaagtcaaatggattgaataccagaatatggtgaactacctcatccaatggattagacaccatgtgaccacaatgtctgagagaacatttcctaataatcctgtagaactgaaggcactttataatcagtatttacagtttaaagaaacagaaattccaccaaaggagacagaaaaatcaaaaattaaacgnctatataaattattagagatttggatagaatttggacgcatcaagctccttcaaggttatcatccaaatgacatagaaaaagagtgggggaaactcattattgccatgctagagagagagaaggcccttcgtccagaagtagaaaggttagaaatgttgcaacagattgccaacagagttcagagggacagtgtcatctgtgaagacaaactgattcttgctggaaatgctcttcagtctgattctaaaagattagaatcaggagtgcagtttcagaatgaagcagaaattgctgggtatatacttgaatgtgagaaccttttacgccagcatgtaattgatgtacagattcttattgatggaaaatactaccaggcagatcaattggtacagagggttgcaaaactgcgtgacgaaattatggccttaaggaacgaatgttcttctgtgtacagcaaaggacgcatactgacaacagaacagacaaagctcatgatatcaggaatcactcaaagtttaaactcaggatttgcacagaccttacaccctagtctgacctcagggctgacccagagtttaacaccttccctaacctcttctagtatgacttctggcctgtcatcagggatgacttcccgcctgactccatctgtcactccagcttatacacctggtttcccatcaggattagttccaaatttcagttcaggagtagagccaaattcattgcaaactttgaagttgatgcagatccgaaaaccccttctaaagtcttctttgctggatcaaaatttaacagaagaagaaatcaatatgaaatttgttcaggatcttttgaattgggttgatgagatgcaggtacaactggaccgcactgagtggggctcagatttgccaagtgttgaaagccatttagaaaatcataaaaatgttcatagagctattgaagaatttgaatctagtctcaaagaagctaaaatcagtgagattcaaatgacagcacctcttaaactgacttatgcagaaaagttgcacagattagagagtcagtatgcaaaactcttgaatacatccaggaatcaagaacggcaccttgatacactccataattttgtaagtcgtgcgactaatgaacttatttggttgaatgaaaaagaagaggaggaagttgcttatgactggagtgagagaaacaccaacatagctaggaaaaaagattatcatgctgaattaatgagagaacttgatcaaaaggaagaaaatattaaatcagttcaggagatagcagagcagctacttctagaaaatcatccagcccggttaactattgaggcctacagagcggcaatgcagacgcagtggagctggatcttacagctctgccagtgtgtggagcagcacataaaggagaacacagcgtatttcgagtttttcaatgatgccaaagaagctactgattacttaaggaatctaaaagatgccattcagcggaagtacagctgtgatagatcaagcagcattcacaagctagaagaccttgttcaggaatcaatggaagagaaagaagaacttctgcagtacaaaagcactatagcaaacctaatgggaaaagcaaaaacaataattcaactgaagccaaggaattctgactgtccactcaaaacttctattccgatcaaagctatctgtgactacagacaaattgagataaccatttacaaagacgatgaatgtgttttggcgaataactctcatcgtgctaaatggaaggtcattagtcctactgggaatgaggctatggtcccatctgtgtgcttcaccgttcctccaccaaacaaagaagcggtggaccttgccaacagaattgagcaacagtatcagaatgtcctgactctttggcatgagtctcacataaacatgaagagtgtagtatcctggcattatctcatcaatgaaattgatagaattcgagctagcaatgtggcttcaataaagacaatgctacctggtgaacatcagcaagttctaagtaatctacaatctcgttttgaagattttctggaagatagccaggaatcccaagtcttttcaggctcagatataacacaactggaaaaggaggttaatgtatgtaagcagtattatcaagaacttcttaaatctgcagaaagagaggagcaagaggaatcagtttataatctctacatctctgaagttcgaaacattagacttcggttagagaactgtgaagatcggctgattagacagattcgaactcccctggaaagagatgatttgcatgaaagtgtgttcagaatcacagaacaggagaaactaaagaaagagctggaacgacttaaagatgatttgggaacaatcacaaataagtgtgaggagtttttcagtcaagcagcagcctcttcatcagtccctaccctacgatcagagcttaatgtggtccttcagaacatgaaccaagtctattctatgtcttccacttacatagataagttgaaaactgttaacttggtgttaaaaaacactcaagctgcagaagccctcgtaaaactctatgaaactaaactgtgtgaagaagaagcagttatagctgacaagaataatattgagaatctaataagtactttaaagcaatggagatctgaagtagatgaaaagagacaggtattccatgccttagaggatgagttgcagaaagctaaagccatcagtgatgaaatgtttaaaacgtataaagaacgggaccttgattttgactggcacaaagaaaaagcagatcaattagttgaaaggtggcaaaatgttcatgtgcagattgacaacaggttacgggacttagagggcattggcaaatcactgaagtactacagagacacttaccatcctttagatgattggatccagcaggttgaaactactcagagaaagattcaggaaaatcagcctgaaaatagtaaaaccctagccacacagttgaatcaacagaagatgctggtgtccgaaatagaaatgaaacagagcaaaatggacgagtgtcaaaaatatgcagaacagtactcagctacagtgaaggactatgaattacaaacaatgacctaccgggccatggtagattcacaacaaaaatctccagtgaaacgccgaagaatgcagagttcagcagatctcattattcaagagttcatggacctaaggactcgatatactgccctggtcactctcatgacacaatatattaaatttgctggtgattcattgaagaggctggaagaggaggagattaaaaggtgtaaggagacttctgaacatggggcatattcagatctgcttcagcgtcagaaggcaacagtgcttgagaatagcaaacttacaggaaagataagtgagttggaaagaatggtagctgaactaaagaaacaaaagtcccgagtagaggaagaacttccgaaggtcagggaggctgcagaaaatgaattgagaaagcagcagagaaatgtagaagatatctctctgcagaagataagggctgaaagtgaagccaagcagtaccgcagggaacttgaaaccattgtgagagagaaggaagccgctgaaagagaactggagcgggtgaggcagctcaccatagaggccgaggctaaaagagctgccgtggaagagaacctcctgaattttcgcaatcagttggaggaaaacacctttaccagacgaacactggaagatcatcttaaaagaaaagatttaagtctcaatgatttggagcaacaaaaaaataaattaatggaagaattaagaagaaagagagacaatgaggaagaactcttgaagctgataaagcagatggaaaaagaccttgcatttcagaaacaggtagcagagaaacagttgaaagaaaagcagaaaattgaattggaagcaagaagaaaaataactgaaattcagtatacatgtagagaaaatgcattgccagtgtgtccgatcacacaggctacatcatgcagggcagtaacgggtctccagcaagaacatgacaagcagaaagcagaagaactcaaacagcaggtagatgaactaacagctgccaatagaaaggctgaacaagacatgagagagctgacatatgaacttaatgccctccagcttgaaaaaacgtcatctgaggaaaaggctcgtttgctaaaagataaactagatgaaacaaataatacactcagatgccttaagttggagctggaaaggaaggatcaggcggagaaagggtattctcaacaactcagagagcttggtaggcaattgaatcaaaccacaggtaaagctgaagaagccatgcaagaagctagtgatctcaagaaaataaagcgcaattatcagttagaattagaatctcttaatcatgaaaaagggaaactacaaagagaagtagacagaatcacaagggcacatgctgtagctgagaagaatattcagcatttaaattcacaaattcattcttttcgagatgagaaagaattagaaagactacaaatctgccagagaaaatcagatcatctaaaagaacaatttgagaaaagccatgagcagttgcttcaaaatatcaaagctgaaaaagaaaataatgataaaatccaaaggctcaatgaagaattggagaaaagtaatgagtgtgcagagatgctaaaacaaaaagtagaggagcttactaggcagaataatgaaaccaaattaatgatgcagagaattcaggcagaatcagagaatatagttttagagaaacaaactatccagcaaagatgtgaagcactgaaaattcaggcagatggttttaaagatcagctacgcagcacaaatgaacacttgcataaacagacaaaaacagagcaggattttcaaagaaaaattaaatgcctagaagaagacctggcgaaaagtcaaaatttggtaagtgaatttaagcaaaagtgtgaccaacagaacattatcatccagaataccaagaaagaagttagaaatctgaatgcggaactgaatgcttccaaagaagagaagcgacgcggggagcagaaagttcagctacaacaagctcaggtgcaagagttaaataacaggttgaaaaaagtacaagacgaattacacttaaagaccatagaggagcagatgacccacagaaagatggttctgtttcaggaagaatctggtaaattcaaacaatcagcagaggagtttcggaagaagatggaaaaattaatggagtccaaagtcatcactgaaaatgatatttcaggcattaggcttgactttgtgtctcttcaacaagaaaactctagagcccaagaaaatgctaagctttgtgaaacaaacattaaagaacttgaaagacagcttcaacagtatcgtgaacaaatgcagcaagggcagcacatggaagcaaatcattaccaaaaatgtcagaaacttgaggatgagctgatagcccagaagcgtgaggttgaaaacctgaagcaaaaaatggaccaacagatcaaagagcatgaacatcaattagttttgctccagtgtgaaattcaaaaaaagagcacagccaaagactgtaccttcaaaccagattttgagatgacagtgaaggagtgccagcactctggagagctgtcctctagaaacactggacaccttcacccaacacccagatcccctctgttgagatggactcaagaaccacagccattggaagagaagtggcagcatcgggttgttgaacagatacccaaagaagtccaattccagccaccaggggctccactcgagaaagagaaaagccagcagtgttactctgagtacttttctcagacaagcaccgagttacagataacttttgatgagacaaaccccattacaagactgtctgaaattgagaagataagagaccaagccctgaacaattctagaccacctgttaggtatcaagataacgcatgtgaaatggaactggtgaaggttttgacacccttagagatagctaagaacaagcagtatgatatgcatacagaagtcacaacattaaaacaagaaaagaacccagttcccagtgctgaagaatggatgcttgaagggtgcagagcatctggtggactcaagaaaggggatttccttaagaagggcttagaaccagagaccttccagaactttgatggtgatcatgcatgttcagtcagggatgatgaatttaaattccaagggcttaggcacactgtgactgccaggcagttggtggaagctaagcttctggacatgagaacaattgagcagctgcgactcggtcttaagactgttgaagaagttcagaaaactcttaacaagtttctgacgaaagccacctcaattgcagggctttacctagaatctacaaaagaaaagatttcatttgcctcagcggccgagagaatcataatagacaaaatggtggctttggcatttttagaagctcaggctgcaacaggttttataattgatcccatttcaggtcagacatattctgttgaagatgcagttcttaaaggagttgttgaccccgaattcagaattaggcttcttgaggcagagaaggcagctgtgggatattcttattcttctaagacattgtcagtgtttcaagctatggaaaatagaatgcttgacagacaaaaaggtaaacatatcttggaagcccagattgccagtgggggtgtcattgaccctgtgagaggcattcgtgttcctccagaaattgctctgcagcaggggttgttgaataatgccatcttacagtttttacatgagccatccagcaacacaagagttttccctaatcccaataacaagcaagctctgtattactcagaattactgcgaatgtgtgtatttgatgtagagtcccaatgctttctgtttccatttggggagaggaacatttccaatctcaatgtcaagaaaacacatagaatttctgtagtagatactaaaacaggatcagaattgaccgtgtatgaggctttccagagaaacctgattgagaaaagtatatatcttgaactttcagggcctttttgggatacaggattttctttattcaggtcaaaaaaatga

SEQ ID NO: 306923 - DNA, 4954 bp, Homo sapiens
  misc_feature (1579)..(1579): n is a, c, g, or t
gcctccaccctccaccctcctccctccctctctccccggcgcgggcgagtgtctgcggcgcggcggccaggaaatgccgcagatgcgccgcgcagcatccccggtgaaggcagcgcgccggtcctcccgcaccgctgccgcggcctcggcccggcccgaagcacgcgcctcgtgcagggccagcagagcggtcagcgcggccgcagagggtccgggcgcccgccggcccccgcccgccctcgccgcacgccccgctcctccgcttggcgtggcgctgctcgtcgccgcccctgggctcgctgagatttgccgctgctgaaacccgagagggactcgggctcccggagccgggcggcccaccatcggcctgcccggaggcctgggcgtttcctttgccggccctggcgccggcagccccctgcgcccccgctctgcgtcttcggcttccgtgcttctccccagcgtgctgctccttcctcttttccagttcccaaggctgtgtcttgctgactgcgatactgtccgggggttacgagggggagaggggaatttgtcagtcatcgcttagataaacttcggcatggcgggttacctctcccctgctgcttacctgtacgtggaggagcaggagtatctccaggcctacgaggatgtcctggagaggtacaaagatgaacgggacaaagttcagaagaaaacatttacaaaatggataaatcagcatctcatgaaggttcgaaaacatgtgaatgatctctatgaagacttaagggatggacacaatttgatttctcttttagaggttctttcaggagataccttgcccagagaaaaaggtcggatgcgttttcacagactacagaatgtacaaattgcacttgactatttgaaaagacgccaggtgaaattagtgaatattagaaatgatgacataacagatggaaatcccaaattgactttgggattaatctggacaataattttgcactttcagatatctgatatccatgttactggagagtcagaggatatgtctgcaaaagagagattgctactctggacgcagcaggcaacagagggttatgctggaattcggtgtgaaaatttcactacctgctggagagatggaaaattatttaatgccatcattcataaatacaggccggacctgatagatatgaatactgttgctgttcaaagcaaccttgcaaatttagagcatgctttttacgtagcagaaaaaattggtgttataagacttctggaccctgaagatgtcgatgtctcctcacctgatgaaaaatcagtaataacttacgtgtcatctctctatgatgcatttcctaaagtccctgaaggtggggaaggcattggtgcaaatgatgttgaagtcaaatggattgaataccagaatatggtgaactacctcatccaatggattagacaccatgtgaccacaatgtctgagagaacatttcctaataatcctgtagaactgaaggcactttataatcagtatttacagtttaaagaaacagaaattccaccaaaggagacagaaaaatcaaaaattaaacgnctatataaattattagagatttggatagaatttggacgcatcaagctccttcaaggttatcatccaaatgacatagaaaaagagtgggggaaactcattattgccatgctagagagagagaaggcccttcgtccagaagtagaaaggttagaaatgttgcaacagattgccaacagagttcagagggacagtgtcatctgtgaagacaaactgattcttgctggaaatgctcttcagtctgattctaaaagattagaatcaggagtgcagtttcagaatgaagcagaaattgctgggtatatacttgaatgtgagaaccttttacgccagcatgtaattgatgtacagattcttattgatggaaaatactaccaggcagatcaattggtacagagggttgcaaaactgcgtgacgaaattatggccttaaggaacgaatgttcttctgtgtacagcaaaggacgcatactgacaacagaacagacaaagctcatgatatcaggaatcactcaaagtttaaactcaggatttgcacagaccttacaccctagtctgacctcagggctgacccagagtttaacaccttccctaacctcttctagtatgacttctggcctgtcatcagggatgacttcccgcctgactccatctgtcactccagcttatacacctggtttcccatcaggattagttccaaatttcagttcaggagtagagccaaattcattgcaaactttgaagttgatgcagatccgaaaaccccttctaaagtcttctttgctggatcaaaatttaacagaagaagaaatcaatatgaaatttgttcaggatcttttgaattgggttgatgagatgcaggtacaactggaccgcactgagtggggctcagatttgccaagtgttgaaagccatttagaaaatcataaaaatgttcatagagctattgaagaatttgaatctagtctcaaagaagctaaaatcagtgagattcaaatgacagcacctcttaaactgacttatgcagaaaagttgcacagattagagagtcagtatgcaaaactcttgaatacatccaggaatcaagaacggcaccttgatacactccataattttgtaagtcgtgcgactaatgaacttatttggttgaatgaaaaagaagaggaggaagttgcttatgactggagtgagagaaacaccaacatagctaggaaaaaagattatcatgctgaattaatgagagaacttgatcaaaaggaagaaaatattaaatcagttcaggagatagcagagcagctacttctagaaaatcatccagcccggttaactattgaggcctacagagcggcaatgcagacgcagtggagctggatcttacagctctgccagtgtgtggagcagcacataaaggagaacacagcgtatttcgagtttttcaatgatgccaaagaagctactgattacttaaggaatctaaaagatgccattcagcggaagtacagctgtgatagatcaagcagcattcacaagctagaagaccttgttcaggaatcaatggaagagaaagaagaacttctgcagtacaaaagcactatagcaaacctaatgggaaaagcaaaaacaataattcaactgaagccaaggaattctgactgtccactcaaaacttctattccgatcaaagctatctgtgactacagacaaattgagataaccatttacaaagacgatgaatgtgttttggcgaataactctcatcgtgctaaatggaaggtcattagtcctactgggaatgaggctatggtcccatctgtgtgcttcaccgttcctccaccaaacaaagaagcggtggaccttgccaacagaattgagcaacagtatcagaatgtcctgactctttggcatgagtctcacataaacatgaagagtgtagtatcctggcattatctcatcaatgaaattgatagaattcgagctagcaatgtggcttcaataaagacaatgctacctggtgaacatcagcaagttctaagtaatctacaatctcgttttgaagattttctggaagatagccaggaatcccaagtcttttcaggctcagatataacacaactggaaaaggaggttaatgtatgtaagcagtattatcaagaacttcttaaatctgcagaaagagaggagcaagaggaatcagtttataatctctacatctctgaagttcgaaacattagacttcggttagagaactgtgaagatcggctgattagacagattcgaactcccctggaaagagatgatttgcatgaaagtgtgttcagaatcacagaacaggagaaactaaagaaagagctggaacgacttaaagatgatttgggaacaatcacaaataagtgtgaggagtttttcagtcaagcagcagcctcttcatcagtccctaccctacgatcagagcttaatgtggtccttcagaacatgaaccaagtctattctatgtcttccacttacatagataagttgaaaactgttaacttggtgttaaaaaacactcaagctgcagaagccctcgtaaaactctatgaaactaaactgtgtgaagaagaagcagttatagctgacaagaataatattgagaatctaataagtactttaaagcaatggagatctgaagtagatgaaaagagacaggtattccatgccttagaggatgagttgcagaaagctaaagccatcagtgatgaaatgtttaaaacgtataaagaacgggaccttgattttgactggcacaaagaaaaagcagatcaattagttgaaaggtggcaaaatgttcatgtgcagattgacaacaggttacgggacttagagggcattggcaaatcactgaagtactacagagacacttaccatcctttagatgattggatccagcaggttgaaactactcagagaaagattcaggaaaatcagcctgaaaatagtaaaaccctagccacacagttgaatcaacagaagatgctggtgtccgaaatagaaatgaaacagagcaaaatggacgagtgtcaaaaatatgcagaacagtactcagctacagtgaaggactatgaattacaaacaatgacctaccgggccatggtagattcacaacaaaaatctccagtgaaacgccgaagaatgcagagttcagcagatctcattattcaagagttcatggacctaaggactcgatatactgccctggtcactctcatgacacaatatattaaatttgctggtgattcattgaagaggctggaagaggaggagaagtcactggaagaagaaaagaaagaacatgttgaaaaagccaaagaattgcaaaaatgggtatcaaatatcagcaag

SEQ ID NO: 306924 - DNA, 1530 bp, Homo sapiens
tgaagaggatggtcataaagtctgtgtggaacagatgtcagagtggaattttcagacttaatggagaggatctaagtaagctctggattttgaaatgagtgaatctatggagctgtgatctcctacaaatcaaatggggaatgtctgtggatgtgtaagagctgagaaagaagaacaatatgtagatcctgccaaaactcctttgaaccctgaaaaatactctcctggaagaaaatatttcagaagaaaaccgatcaaaaaaactggaggtgacaaagagtcagttggggcaaacaatgaaaatgaaggcaagaagaagagcagcagtcagccttcaaaagaacagccagctcctttatccaggggactggtacagcaggaatctgttaccctaaactctgcactgggagatggtattcagcaaaagaagacagaagttgtagctgacagcgttaaacagaaacttctgccgagtgctgtaagcagttggtctgactgtgtgaacacttctcctgctaaagacagtgaaacagaagtaaaagttagtgaactggatgaaaggatttcagaaaaagacagcactccatattgcgcaaagaggaagaaacatttagatgatgtcaacacaagcgaaataacattccaggaaaaaactgatgttttttctttccgaaaggcagccagcttaagctctattccctcgggtatagaaagatcactcgaaaaaagtgggtttcctgaagacccaccaaaaagttatagcagtattcaagaaaagcaaaacactgagagattttgccctcatgcaacacagcattttcagtttaaaaaaaagagatgccattccctttatactagtatgtcctctgtttctaaggacacagatggaaatgagatatctgatatccatgttactggagagtcagaggatatgtctgcaaaagagagattgctactctggacgcagcaggcaacagagggttatgctggaattcggtgtgaaaatttcactacctgctggagagatggaaaattatttaatgccatcattcataaatacaggtatggaatttgtgtattttttccttatacaactgtaagacacatttctttcatctctgaattttaaaattatcttttattattatagaagcaaaagcatggcaaaaaattagaaaatacagaaaaattaaaataaaaaattggccaggtgcagtggcccatgcctgtaatcccaggacttagggaagccaaagtgggtagattgcttgagcctgggagttcgagaacagccttggcaaaagggtaaaaccctctctctacaaaaaaatacaaaaaattagcttggcatggtggcaagcacctgtatttccagctactccggaggccaaggctgcggtgagctgtgatcatgtgactgcactgcagcctgagtcacagggtgagactctggcttaagaaaataaaaaaaaaaatttaaaaatcacatttccactacttagaggccatgattctgaattgtagcttata

SEQ ID NO: 306925 - DNA, 530 bp, Homo sapiens
acatgttgtttgaaaaatatacccagatgtatatttttatgtcgtggtgctataatttctacttttttccccttcaaaatatctaagttactggaaaatttcaacttaggaacaaatctgttggagaaagtgaggtatgtttaagtgtttatttcttaaggaaagtaaatgttctacataaaaaatgattattgagataatcactgttaactaatttaaaaacaaaaaatgtcatttaagaggcccatatagcatcaatatcaagtaaacaattatgtcaccttttgctttaggaaaccaaatatcactgctaacccatatgtcgtctttttattttttcttcagggtatgacaaggcagcaaagattgctaagacagcacacaaaaatggatcaaccttaaaggaaactgctatcgaacttggctatctcacagcagagcagtttgacgaatgggtaaaacctaaggacatgctgggtccaaagtgatttacataaatttataatgaaaataaacatgtataaaattta

SEQ ID NO: 306926 - DNA, 1608 bp, Homo sapiens
  misc_feature (1)..(1): n is a, c, g, or t
ncccagaaattctacccaagctccctcagcaccatgtaccgagcacttcggctcctcgcgcgctcgcgtcccctcgtgcgggctccagccgcagccttagcttcggctcccggcttgggtggcgcggccgtgccctcgttttggcctccgaacgcggctcgaatggcaagccaaaattccttccggatagaatatgatacctttggtgaactaaaggtgccaaatgataagtattatggcgcccagaccgtgagatctacgatgaactttaagattggaggtgtgacagaacgcatgccaaccccagttattaaagcttttggcatcttgaagcgagcggccgctgaagtaaaccaggattatggtcttgatccaaagattgctaatgcaataatgaaggcagcagatgaggtagctgaaggtaaattaaatgatcattttcctctcgtggtatggcagactggatcaggaactcagacaaatatgaatgtaaatgaagtcattagcaatagagcaattgaaatgttaggaggtgaacttggcagcaagatacctgtgcatcccaacgatcatgttaataaaagccagagctcaaatgatacttttcccacagcaatgcacattgctgctgcaatagaagttcatgaagtactgttaccaggactacagaagttacatgatgctcttgatgcaaaatccaaagagtttgcacagatcatcaagattggacgtactcatactcaggatgctgttccacttactcttgggcaggaatttagtggttatgttcaacaagtaaaatatgcaatgacaagaataaaagctgccatgccaagaatctatgagctcgcagctggaggcactgctgttggtacaggtttaaatactagaattggctttgcagaaaaggttgctgcaaaagtggctgcacttacaggcttgccttttgtcactgctccgaataaatttgaagctctggctgctcatgacgctctggttgagctcagtggagccatgaacactactgcctgcagtctgatgaagatagcaaatgatattcgatttttgggttctggtcctcggtcaggtctgggagaattgatcttgcctgaaaatgaaccaggaagcagtatcatgccaggcaaggtgaaccctactcagtgtgaagcaatgaccatggttgcagcccaagtcatggggaaccatgttgctgtcactgtcggaggcagcaatggacattttgagttgaatgttttcaagccaatgatgattaaaaatgtgttacactcagccaggctgctgggggatgcttcagtttcctttacagaaaactgcgtggtgggaatccaggccaatacagaaaggatcaacaagctgatgaatgagtctctaatgttggtgacagctctcaatcctcatatagggtatgacaaggcagcaaagattgctaagacagcacacaaaaatggatcaaccttaaaggaaactgctatcgaacttggctatctcacagcagagcagtttgacgaatgggtaaaacctaaggacatgctgggtccaaagtgatttacataaatttataatgaaaataaacatgtataaaattta

SEQ ID NO: 306927 - DNA, 610 bp, Homo sapiens
gcttcagtttcctttacagaaaactgcgtggtgggaatccaggccaatacagaaaggatcaacaagctgatgaatgagtctctaatgttttcaagccaatgatgattaaaaatgtgttacactcagccaggctgctgggggatgcttcagtttcctttacagaaaactgcgtggtgggaatccaggccaatacagaaaggatcaacaagctgatgaatgagtctctaatgttggtgacagctctcaatcctcatatagggtatgacaaggcagcaaagattgctaagacagcacacaaaaatggatcaaccttaaaggaaactgctatcgaacttggctatctcacagcagagcagtttgacgaatgggtaaaacctaaggacatgctgggtccaaagtgatttacataaatttataatgaaaataaacatgtataaaatttaaaaaaacagactcccatttcttaaaaacggataagtttgaaaggaaactgctattgaacttaagcatctctagcagagcaatttgatcagtatataaaaccctaggatgtgctaggtctaagatggattaaacaagtataaaataaaatacatttataaaataaaaa

SEQ ID NO: 306928 - DNA, 2703 bp, Homo sapiens
  misc_feature (1)..(1): n is a, c, g, or t
ncccagaaattctacccaagctccctcagcaccatgtaccgagcacttcggctcctcgcgcgctcgcgtcccctcgtgcgggctccagccgcagccttagcttcggctcccggcttgggtggcgcggccgtgccctcgttttggcctccgaacgcggctcgaatggcaagccaaaattccttccggatagaatatgatacctttggtgaactaaaggtgccaaatgataagtattatggcgcccagaccgtgagatctacgatgaactttaagattggaggtgtgacagaacgcatgccaaccccagttattaaagcttttggcatcttgaagcgagcggccgctgaagtaaaccaggattatggtcttgatccaaagattgctaatgcaataatgaaggcagcagatgaggtagctgaaggtaaattaaatgatcattttcctctcgtggtatggcagactggatcaggaactcagacaaatatgaatgtaaatgaagtcattagcaatagagcaattgaaatgttaggaggtgaacttggcagcaagatacctgtgcatcccaacgatcatgttaataaaagccagagctcaaatgatacttttcccacagcaatgcacattgctgctgcaatagaagttcatgaagtactgttaccaggactacagaagttacatgatgctcttgatgcaaaatccaaagagtttgcacagatcatcaagattggacgtactcatactcaggatgctgttccacttactcttgggcaggaatttagtggttatgttcaacaagtaaaatatgcaatgacaagaataaaagctgccatgccaagaatctatgagctcgcagctggaggcactgctgttggtacaggtttaaatactagaattggctttgcagaaaaggttgctgcaaaagtggctgcacttacaggcttgccttttgtcactgctccgaataaatttgaagctctggctgctcatgacgctctggttgagctcagtggagccatgaacactactgcctgcagtctgatgaagatagcaaatgatattcgatttttgggttctggtcctcggtcaggtctgggagaattgatcttgcctgaaaatgaaccaggaagcagtatcatgccaggcaaggtgaaccctactcagtgtgaagcaatgaccatggttgcagcccaagtcatggggaaccatgttgctgtcactgtcggaggcagcaatggacattttgagttgaatgttttcaagccaatgatgattaaaaatgtgttacactcagccaggctgctgggggatgcttcagtttcctttacagaaaactgcgtggtgggaatccaggccaatacagaaaggatcaacaagctgatgaatgagtctctaatgttggtgacagctctcaatcctcatatagggtatgacaaggcagcaaagattgctaagacagcacacaaaaatggatcaaccttaaaggaaactgctatcgaacttggctatctcacagcagagcagtttgacgaatgggtaaaacctaaggacatgctgggtccaaagtgatttacataaatttataatgaaaataaacatgtataaaatttaaaaaaacagactcccatttcttaaaaacggataagtttgaaaggaaactgctattgaacttaagcatctctagcagagcaatttgatcagtatataaaaccctaggatgtgctaggtctaagatggattaaacaagtataaaataaaatacatttataaaataaaaaaaaaaaaaaaaaaaaaaaaaaaaaaaaaaaaaaaaaaaaaaaaaaaaaaaaaaaaaaaaaaaaaaaaaaaaaaaaaaaaaaaaaaaaaaaaaaaaaaaaaaaaaaaaaaaaaacaaaaacaaagaaaaaacaatatagtgaagtacaataaacaacacaaacaagggacggacgtccagcgtataatcacatcagcacaggaggaagagaatatagcacagatagatacatggtagaagaaagaaggccaacaagctttaggggagaaaaaaataccacacacaaatgctgagcccaacatgaataacgtcacaagcagagaaaaaaataaaagcacgcctacgtaaacaaacaggctaaaaaacacaaacaagataaagatatgtataggatatcaaattgacgataaaaaagaatcagatcaagaaaagataaagtataagcagagagaacgtcgatcaacagaaacaacaccgagccgaggcctcagttcgagctggggagcaacgaccaacgcgacaatagcacgaagacgaagataagaataaaatacgaagaacaagaagagaacaaaaagaaaaagaagacagggaaacaagaaaagaagcaaacgaaaaagaaggaagaagaaagaatagtataggggagcagacgacaagagaacgagagagaaaggaacaagagggaagagagaaagagggtgcagcggagggcgagagaaaggggagaagaaagaacatgcgaataggaggtacagacgaacaagacggagagagacatacaagctaaaggaaaaaagaaggaggaagagggagggagggaagagaaatacgaaggtgtagaaagagaaaagagagacgaaaaagacgactaaaaggaaaagggggaagaaagggagagaagaagaaagcaagaaagggagacatgg

SEQ ID NO: 306929 - DNA, 1636 bp, Homo sapiens
  misc_feature (1)..(1): n is a, c, g, or t
ncccagaaattctacccaagctccctcagcaccatgtaccgagcacttcggctcctcgcgcgctcgcgtcccctcgtgcgggctccagccgcagccttagcttcggctcccggcttgggtggcgcggccgtgccctcgttttggcctccgaacgcggctcgaatggcaagccaaaattccttccggatagaatatgatacctttggtgaactaaaggtgccaaatgataagtattatggcgcccagaccgtgagatctacgatgaactttaagattggaggtgtgacagaacgcatgccaaccccagttattaaagcttttggcatcttgaagcgagcggccgctgaagtaaaccaggattatggtcttgatccaaagattgctaatgcaataatgaaggcagcagatgaggtagctgaaggtaaattaaatgatcattttcctctcgtggtatggcagactggatcaggaactcagacaaatatgaatgtaaatgaagtcattagcaatagagcaattgaaatgttaggaggtgaacttggcagcaagatacctgtgcatcccaacgatcatgttaataaaagccagagctcaaatgatacttttcccacagcaatgcacattgctgctgcaatagaagttcatgaagtactgttaccaggactacagaagttacatgatgctcttgatgcaaaatccaaagagtttgcacagatcatcaagattggacgtactcatactcaggatgctgttccacttactcttgggcaggaatttagtggttatgttcaacaagtaaaatatgcaatgacaagaataaaagctgccatgccaagaatctatgagctcgcagctggaggcactgctgttggtacaggtttaaatactagaattggctttgcagaaaaggttgctgcaaaagtggctgcacttacaggcttgccttttgtcactgctccgaataaatttgaagctctggctgctcatgacgctctggttgagctcagtggagccatgaacactactgcctgcagtctgatgaagatagcaaatgatattcgatttttgggttctggtcctcggtcaggtctgggagaattgatcttgcctgaaaatgaaccaggaagcagtatcatgccaggcaaggtgaaccctactcagtgtgaagcaatgaccatggttgcagcccaagtcatggggaaccatgttgctgtcactgtcggaggcagcaatggacattttgagttgaatgttttcaagccaatgatgattaaaaatgtgttacactcagccaggctgctgggggatgcttcagtttcctttacagaaaactgcgtggtgggaatccaggccaatacagaaaggatcaacaagctgatgaatgagtctctaatgttggtgacagtcccatctctatagggtatgaacaggcgcaaagatgtaagacgcacaaaatggtcactaaaggacgttcgaatggtactaagcgaacttgccacggttaaccggaccgggcaggtactaattcagaaaaatttatataaaagccctttaagagtggagagcggcactctcagaggttacgggtcgggacaaatataaacctcgggagctctctagattcaaaattaacaaa

SEQ ID NO: 306930 - DNA, 1579 bp, Homo sapiens
  misc_feature (58)..(58): n is a, c, g, or t
  misc_feature (71)..(71): n is a, c, g, or t
ggtccctcaacgggtcagccgcaccgccccttggcgctcgcgcccgtaaactctacgngaccaccggacgngttcggctcctcgcgcgctcgcgtcccctcgtgcgggctccagccgcagccttagcttcggctcccggcttgggtggcgcggccgtgccctcgttttggcctccgaacgcggctcgaatgcaaatgataagtattatggcgcccagaccgtgagatctacgatgaactttaagattggaggtgtgacagaacgcatgccaaccccagttattaaagcttttggcatcttgaagcgagcggccgctgaagtaaaccaggattatggtcttgatccaaagattgctaatgcaataatgaaggcagcagatgaggtagctgaaggtaaattaaatgatcattttcctctcgtggtatggcagactggatcaggaactcagacaaatatgaatgtaaatgaagtcattagcaatagagcaattgaaatgttaggaggtgaacttggcagcaagatacctgtgcatcccaacgatcatgttaataaaagccagagctcaaatgatacttttcccacagcaatgcacattgctgctgcaatagaagttcatgaagtactgttaccaggactacagaagttacatgatgctcttgatgcaaaatccaaagagtttgcacagatcatcaagattggacgtactcatactcaggatgctgttccacttactcttgggcaggaatttagtggttatgttcaacaagtaaaatatgcaatgacaagaataaaagctgccatgccaagaatctatgagctcgcagctggaggcactgctgttggtacaggtttaaatactagaattggctttgcagaaaaggttgctgcaaaagtggctgcacttacaggcttgccttttgtcactgctccgaataaatttgaagctctggctgctcatgacgctctggttgagctcagtggagccatgaacactactgcctgcagtctgatgaagatagcaaatgatattcgatttttgggttctggtcctcggtcaggtctgggagaattgatcttgcctgaaaatgaaccaggaagcagtatcatgccaggcaaggtgaaccctactcagtgtgaagcaatgaccatggttgcagcccaagtcatggggaaccatgttgctgtcactgtcggaggcagcaatggacattttgagttgaatgttttcaagccaatgatgattaaaaatgtgttacactcagccaggctgctgggggatgcttcagtttcctttacagaaaactgcgtggtgggaatccaggccaatacagaaaggatcaacaagctgatgaatgagtctctaatgttggtgacagctctcaatcctcatatagggtatgacaaggcagcaaagattgctaagacagcacacaaaaatggatcaaccttaaaggaaactgctatcgaacttggctatctcacagcagagcagtttgacgaatgggtaaaacctaaggacatgctgggtccaaagtgatttacataaatttataatgaaaataaacatgtataaaattta

SEQ ID NO: 306931 - DNA, 1370 bp, Homo sapiens
gggccgttaagttgttactttactggcccgtggtctacaattaacatgaataacgcatgacaaccccagttattaaagcttttggcatcttgaagcgagcggccgctgaagtaaaccaggattatggtcttgatccaaagattgctaatgcaataatgaaggcagcagatgaggtagctgaaggtaaattaaatgatcattttcctctcgtggtatggcagactggatcaggaactcagacaaatatgaatgtaaatgaagtcattagcaatagagcaattgaaatgttaggaggtgaacttggcagcaagatacctgtgcatcccaacgatcatgttaataaaagccagagctcaaatgatacttttcccacagcaatgcacattgctgctgcaatagaagttcatgaagtactgttaccaggactacagaagttacatgatgctcttgatgcaaaatccaaagagtttgcacagatcatcaagattggacgtactcatactcaggatgctgttccacttactcttgggcaggaatttagtggttatgttcaacaagtaaaatatgcaatgacaagaataaaagctgccatgccaagaatctatgagctcgcagctggaggcactgctgttggtacaggtttaaatactagaattggctttgcagaaaaggttgctgcaaaagtggctgcacttacaggcttgccttttgtcactgctccgaataaatttgaagctctggctgctcatgacgctctggttgagctcagtggagccatgaacactactgcctgcagtctgatgaagatagcaaatgatattcgatttttgggttctggtcctcggtcaggtctgggagaattgatcttgcctgaaaatgaaccaggaagcagtatcatgccaggcaaggtgaaccctactcagtgtgaagcaatgaccatggttgcagcccaagtcatggggaaccatgttgctgtcactgtcggaggcagcaatggacattttgagttgaatgttttcaagccaatgatgattaaaaatgtgttacactcagccaggctgctgggggatgcttcagtttcctttacagaaaactgcgtggtgggaatccaggccaatacagaaaggatcaacaagctgatgaatgagtctctaatgttggtgacagctctcaatcctcatatagggtatgacaaggcagcaaagattgctaagacagcacacaaaaatggatcaaccttaaaggaaactgctatcgaacttggctatctcacagcagagcagtttgacgaatgggtaaaacctaaggacatgctgggtccaaagtgatttacataaatttataatgaaaataaacatgtataaaattta

SEQ ID NO: 306932 - DNA, 1671 bp, Homo sapiens
tctagaggatccggactgtctctcctcatccggtacctctttttttcattaagaatcctgcctggaagtttaggtcaaagaggctgcttggagcaaaatacagtggtgtctcatcccaaatattctccaggcgtttcttccatccttccaggatttgaattcgggcgacactcgagtgtctcgcgtaggtgagagctgttgcatagccacagtataacttcacatgttcattaaaaaggcaaattgaccgctaaaacttcaaagaaaaagtactcataaaaaaaggggggacactcgagggtcgcccagaccgtgagatctacgatgaactttaagattggaggtgtgacagaacgcatgccaaccccagttattaaagcttttggcatcttgaagcgagcggccgctgaagtaaaccaggattatggtcttgatccaaagattgctaatgcaataatgaaggcagcagatgaggtagctgaaggtaaattaaatgatcattttcctctcgtggtatggcagactggatcaggaactcagacaaatatgaatgtaaatgaagtcattagcaatagagcaattgaaatgttaggaggtgaacttggcagcaagatacctgtgcatcccaacgatcatgttaataaaagccagagctcaaatgatacttttcccacagcaatgcacattgctgctgcaatagaagttcatgaagtactgttaccaggactacagaagttacatgatgctcttgatgcaaaatccaaagagtttgcacagatcatcaagattggacgtactcatactcaggatgctgttccacttactcttgggcaggaatttagtggttatgttcaacaagtaaaatatgcaatgacaagaataaaagctgccatgccaagaatctatgagctcgcagctggaggcactgctgttggtacaggtttaaatactagaattggctttgcagaaaaggttgctgcaaaagtggctgcacttacaggcttgccttttgtcactgctccgaataaatttgaagctctggctgctcatgacgctctggttgagctcagtggagccatgaacactactgcctgcagtctgatgaagatagcaaatgatattcgatttttgggttctggtcctcggtcaggtctgggagaattgatcttgcctgaaaatgaaccaggaagcagtatcatgccaggcaaggtgaaccctactcagtgtgaagcaatgaccatggttgcagcccaagtcatggggaaccatgttgctgtcactgtcggaggcagcaatggacattttgagttgaatgttttcaagccaatgatgattaaaaatgtgttacactcagccaggctgctgggggatgcttcagtttcctttacagaaaactgcgtggtgggaatccaggccaatacagaaaggatcaacaagctgatgaatgagtctctaatgttggtgacagctctcaatcctcatatagggtatgacaaggcagcaaagattgctaagacagcacacaaaaatggatcaaccttaaaggaaactgctatcgaacttggctatctcacagcagagcagtttgacgaatgggtaaaacctaaggacatgctgggtccaaagtgatttacataaatttataatgaaaataaacatgtataaaattta

SEQ ID NO: 306933 - DNA, 1230 bp, Homo sapiens
ataatacagttctgagtatgtgttagaaaccaggatgctgcttatttgattctataataactcacctatgacatgccacacatacatgtaactgagctgggttttgagtagttagttggagagttttttaattgagaagtttaattcagaagtttgtttttgttgcctctgatttaacattttatatttcttttgaaaaatttccaacagagctcaaatgatacttttcccacagcaatgcacattgctgctgcaatagaagttcatgaagtactgttaccaggactacagaagttacatgatgctcttgatgcaaaatccaaagagtttgcacagatcatcaagattggacgtactcatactcaggatgctgttccacttactcttgggcaggaatttagtggttatgttcaacaagtaaaatatgcaatgacaagaataaaagctgccatgccaagaatctatgagctcgcagctggaggcactgctgttggtacaggtttaaatactagaattggctttgcagaaaaggttgctgcaaaagtggctgcacttacaggcttgccttttgtcactgctccgaataaatttgaagctctggctgctcatgacgctctggttgagctcagtggagccatgaacactactgcctgcagtctgatgaagatagcaaatgatattcgatttttgggttctggtcctcggtcaggtctgggagaattgatcttgcctgaaaatgaaccaggaagcagtatcatgccaggcaaggtgaaccctactcagtgtgaagcaatgaccatggttgcagcccaagtcatggggaaccatgttgctgtcactgtcggaggcagcaatggacattttgagttgaatgttttcaagccaatgatgattaaaaatgtgttacactcagccaggctgctgggggatgcttcagtttcctttacagaaaactgcgtggtgggaatccaggccaatacagaaaggatcaacaagctgatgaatgagtctctaatgttggtgacagctctcaatcctcatatagggtatgacaaggcagcaaagattgctaagacagcacacaaaaatggatcaaccttaaaggaaactgctatcgaacttggctatctcacagcagagcagtttgacgaatgggtaaaacctaaggacatgctgggtccaaagtgatttacataaatttataatgaaaataaacatgtataaaattta

SEQ ID NO: 306934 - DNA, 1670 bp, Homo sapiens
  misc_feature (1)..(1): n is a, c, g, or t
ncccagaaattctacccaagctccctcagcaccatgtaccgagcacttcggctcctcgcgcgctcgcgtcccctcgtgcgggctccagccgcagccttagcttcggctcccggcttgggtggcgcggccgtgccctcgttttggcctccgaacgcggctcgaatggcaagccaaaattccttccggatagaatatgatacctttggtgaactaaaggtgccaaatgataagtattatggcgcccagaccgtgagatctacgatgaactttaagattggaggtgtgacagaacgcatgccaaccccagttattaaagcttttggcatcttgaagcgagcggccgctgaagtaaaccaggattatggtcttgatccaaagattgctaatgcaataatgaaggcagcagatgaggtagctgaaggtaaattaaatgatcattttcctctcgtggtatggcagactggatcaggaactcagacaaatatgaatgtaaatgaagtcattagcaatagagcaattgaaatgttaggaggtgaacttggcagcaagatacctgtgcatcccaacgatcatgttaataaaagccaggtcagtatgtgagctttgctgttttttggttataaattgaaaagcatacctgagattgttcttgtaaaacaagcattcactttttgacaagaagtgttcattatttaatggataaggcttcttatggttcttatttcttgaaggaatcttggttttatgtttcaatccttataaaaattatttttaggacacctgaatttagtgtatgtatttttttattgtttaaaactctattttgaaataattttagatttataagagaattgcaaagatagttcaaatagtttctatatcccttcactcagcttcccttattgttaacatcttatgtaaccatggtacatttatcaaaactaagaaattaacatagatacagtactcttagctaaacaacagactttaaaaaaaaaacaaaaaactgaggctttcctcagtttttccactcatgttctttttcaggatccaatcaatgctatacattacatttagtcacatgtccccttggtttcttctaatctgtgacagtttcttggtcttttgcgattgtctcagtcctttggggctgcagtaataaaatacaatagactgactggcttataaacaatagaagaagttaatttgtcacagttctggcagctagaagtccgaggtcaggccactggccaattcattggcttggtgggggcccactttttggtttgtagatggccatcttttctgtgtcctcacatggtagaagggacaagggagctctctggggtctcttcgtaaggacactaattccgttcatgagagctttgccctatgaactaatcaccttgcaaaggccgcatctcctaatactattaccctaggggttaggatttcacatagcagtgaccttgacactttgaaagcagtggtcaggtatactgtagaatgtcctcaattctggtgtgtctgacgtttctcattagattgagacttttgaatttttgagaaaactatcacagaaataaagggcccttctcattgcatcatatcaggggttcatgatagcaacatgacttttactggtgatgttaaccttaatcacttggtta

SEQ ID NO: 306935 - DNA, 697 bp, Homo sapiens
acatgttgtttgaaaaatatacccagatgtatatttttatgtcgtggtgctataatttctacttttttccccttcaaaatatctaagttactggaaaatttcaacttaggaacaaatctgttggagaaagtgaggtatgtttaagtgtttatttcttaaggaaagtaaatgttctacataaaaaatgattattgagataatcactgttaactaatttaaaaacaaaaaatgtcatttaagaggcccatatagcatcaatatcaagtaaacaattatgtcaccttttgctttaggaaaccaaatatcactgctaacccatatgtcgtctttttattttttcttcagggtatgacaaggcagcaaagattgctaagacagcacacaaaaatggatcaaccttaaaggaaactgctatcgaacttggctatctcacagcagagcagtttgacgaatgggtaaaacctaaggacatgctgggtccaaagtgatttacataaatttataatgaaaataaacatgtataaaatttaaaaaaacagactcccatttcttaaaaacggataagtttgaaaggaaactgctattgaacttaagcatctctagcagagcaatttgatcagtatataaaaccctaggatgtgctaggtctaagatggattaaacaagtataaaataaaatacatttataaaataaaaa

SEQ ID NO: 306936 - DNA, 406 bp, Homo sapiens
agagaaaataatggttcttgctggtgaaaagattgagtactaaatttgtttttatttatagtatatgaaataaacacatataatttattgtgtgtatttgtgcataggattgtattcgtgtgaatatgtgtgtatatgtatgtgggagacgtacacacatatatatatgaagagtcaatgtatttgtttttatttggttccttaaacaaatagatctatgataatgttgattcttggttcatgaattcctgtctataatctttctctataaccgaaacattttagagctatagtgttactgttttattgttattgttttatgtatagcttttgcatctgccaaaataataaacttccatgcttaagtaaaattgtaaatttgaaatatttttctgattaattttag

SEQ ID NO: 306937 - DNA, 1775 bp, Homo sapiens
  misc_feature (1)..(1): n is a, c, g, or t
ncccagaaattctacccaagctccctcagcaccatgtaccgagcacttcggctcctcgcgcgctcgcgtcccctcgtgcgggctccagccgcagccttagcttcggctcccggcttgggtggcgcggccgtgccctcgttttggcctccgaacgcggctcgaatggcaagccaaaattccttccggatagaatatgatacctttggtgaactaaaggtgccaaatgataagtattatggcgcccagaccgtgagatctacgatgaactttaagattggaggtgtgacagaacgcatgccaaccccagttattaaagcttttggcatcttgaagcgagcggccgctgaagtaaaccaggattatggtcttgatccaaagattgctaatgcaataatgaaggcagcagatgaggtagctgaaggtaaattaaatgatcattttcctctcgtggtatggcagactggatcaggaactcagacaaatatgaatgtaaatgaagtcattagcaatagagcaattgaaatgttaggaggtgaacttggcagcaagatacctgtgcatcccaacgatcatgttaataaaagccagagctcaaatgatacttttcccacagcaatgcacattgctgctgcaatagaagttcatgaagtactgttaccaggactacagaagttacatgatgctcttgatgcaaaatccaaagagtttgcacagatcatcaagattggacgtactcatactcaggatgctgttccacttactcttgggcaggaatttagtggttatgttcaacaagtaaaatatgcaatgacaagaataaaagctgccatgccaagaatctatgagctcgcagctggaggcactgctgttggtacaggtttaaatactagaattggctttgcagaaaaggttgctgcaaaagtggctgcacttacaggcttgccttttgtcactgctccgaataaatttgaagctctggctgctcatgacgctctggttgagctcagtggagccatgaacactactgcctgcagtctgatgaagatagcaaatgatattcgatttttgggttctggtcctcggtcaggtctgggagaattgatcttgcctgaaaatgaaccaggaagcagtatcatgccaggcaaggtgaaccctactcagtgtgaagcaatgaccatggttgcagcccaagtcatggggaaccatgttgctgtcactgtcggaggcagcaatggacattttgagttgaatgttttcaagccaatgatgattaaaaatgtgttacactcagccaggctgctgggggatgcttcagtttcctttacagaaaactgcgtggtgggaatccaggccaatacagaaaggatcaacaagctgatgaatgagtctctaatgttggtgacagctctcaatcctcatatagggtatgacaaggcagcaaagattgctaagacagcacacaaaaatggatcaaccttaaaggaaactgctatcgaacttggctatctcacagcagagcagtttgacgaatgggtaaaacctaaggacatgctgggtccaaagtgatttacataaatttataatgaaaataaacatgtataaaatttaaaaaaacagactcccatttcttaaaaacggataagtttgaaaggaaactgctattgaacttaagcatctctagcagagcaatttgatcagtatataaaaccctaggatgtgctaggtctaagatggattaaacaagtataaaataaaatacatttataaaataaaaa

SEQ ID NO: 306938 - DNA, 1847 bp, Homo sapiens
  misc_feature (1)..(1): n is a, c, g, or t
ncccagaaattctacccaagctccctcagcaccatgtaccgagcacttcggctcctcgcgcgctcgcgtcccctcgtgcgggctccagccgcagccttagcttcggctcccggcttgggtggcgcggccgtgccctcgttttggcctccgaacgcggctcgaatggcaagccaaaattccttccggatagaatatgatacctttggtgaactaaaggtgccaaatgataagtattatggcgcccagaccgtgagatctacgatgaactttaagattggaggtgtgacagaacgcatgccaaccccagttattaaagcttttggcatcttgaagcgagcggccgctgaagtaaaccaggattatggtcttgatccaaagattgctaatgcaataatgaaggcagcagatgaggtagctgaaggtaaattaaatgatcattttcctctcgtggtatggcagactggatcaggaactcagacaaatatgaatgtaaatgaagtcattagcaatagagcaattgaaatgttaggaggtgaacttggcagcaagatacctgtgcatcccaacgatcatgttaataaaagccagagctcaaatgatacttttcccacagcaatgcacattgctgctgcaatagaagttcatgaagtactgttaccaggactacagaagttacatgatgctcttgatgcaaaatccaaagagtttgcacagatcatcaagattggacgtactcatactcaggatgctgttccacttactcttgggcaggaatttagtggttatgttcaacaagtaaaatatgcaatgacaagaataaaagctgccatgccaagaatctatgagctcgcagctggaggcactgctgttggtacaggtttaaatactagaattggctttgcagaaaaggttgctgcaaaagtggctgcacttacaggcttgccttttgtcactgctccgaataaatttgaagctctggctgctcatgacgctctggttgagctcagtggagccatgaacactactgcctgcagtctgatgaagatagcaaatgatattcgatttttgggttctggtcctcggtcaggtctgggagaattgatcttgcctgaaaatgaaccaggaagcagtatcatgccaggcaaggtgaaccctactcagtgtgaagcaatgaccatggttgcagcccaagtcatggggaaccatgttgctgtcactgtcggaggcagcaatggacattttgagttgaatgttttcaagccaatgatgattaaaaatgtgttacactcagccaggctgctgggggatgcttcagtttcctttacagaaaactgcgtggtgggaatccaggccaatacagaaaggatcaacaagctgatgaatgagtctctaatgttggtgacagctctcaatcctcatatagggtatgacaaggcagcaaagattgctaagacagcacacaaaaatggatcaaccttaaaggaaactgctatcgaacttggctatctcacagcagagcagtttgacgaatgggtaaaacctaaggacatgctgggtccaaagtgatttacataaatttataatgaaaataaacatgtataaaatttaaaaaaacagactcccatttcttaaaaacggataagtttgaaaggaaactgctattgaacttaagcatctctagcagagcaatttgatcagtatataaaaccctaggatgtgctaggtctaagatggattaaacaagtataaaataaaatacatttataaaataaaaaggaaaacagacttaaattttctcctatgttaattgacttgtattatagttgaatctatgatatttgtgcatg

SEQ ID NO: 306939 - DNA, 1634 bp, Homo sapiens
  misc_feature (58)..(58): n is a, c, g, or t
  misc_feature (71)..(71): n is a, c, g, or t
ggtccctcaacgggtcagccgcaccgccccttggcgctcgcgcccgtaaactctacgngaccaccggacgngttcggctcctcgcgcgctcgcgtcccctcgtgcgggctccagccgcagccttagcttcggctcccggcttgggtggcgcggccgtgccctcgttttggcctccgaacgcggctcgaatggcaagccaaaattccttccggatagaatatgatacctttggtgaactaaaggtgccaaatgataagtattatggcgcccagaccgtgagatctacgatgaactttaagattggaggtgtgacagaacgcatgccaaccccagttattaaagcttttggcatcttgaagcgagcggccgctgaagtaaaccaggattatggtcttgatccaaagattgctaatgcaataatgaaggcagcagatgaggtagctgaaggtaaattaaatgatcattttcctctcgtggtatggcagactggatcaggaactcagacaaatatgaatgtaaatgaagtcattagcaatagagcaattgaaatgttaggaggtgaacttggcagcaagatacctgtgcatcccaacgatcatgttaataaaagccagagctcaaatgatacttttcccacagcaatgcacattgctgctgcaatagaagttcatgaagtactgttaccaggactacagaagttacatgatgctcttgatgcaaaatccaaagagtttgcacagatcatcaagattggacgtactcatactcaggatgctgttccacttactcttgggcaggaatttagtggttatgttcaacaagtaaaatatgcaatgacaagaataaaagctgccatgccaagaatctatgagctcgcagctggaggcactgctgttggtacaggtttaaatactagaattggctttgcagaaaaggttgctgcaaaagtggctgcacttacaggcttgccttttgtcactgctccgaataaatttgaagctctggctgctcatgacgctctggttgagctcagtggagccatgaacactactgcctgcagtctgatgaagatagcaaatgatattcgatttttgggttctggtcctcggtcaggtctgggagaattgatcttgcctgaaaatgaaccaggaagcagtatcatgccaggcaaggtgaaccctactcagtgtgaagcaatgaccatggttgcagcccaagtcatggggaaccatgttgctgtcactgtcggaggcagcaatggacattttgagttgaatgttttcaagccaatgatgattaaaaatgtgttacactcagccaggctgctgggggatgcttcagtttcctttacagaaaactgcgtggtgggaatccaggccaatacagaaaggatcaacaagctgatgaatgagtctctaatgttggtgacagctctcaatcctcatatagggtatgacaaggcagcaaagattgctaagacagcacacaaaaatggatcaaccttaaaggaaactgctatcgaacttggctatctcacagcagagcagtttgacgaatgggtaaaacctaaggacatgctgggtccaaagtgatttacataaatttataatgaaaataaacatgtataaaattta

SEQ ID NO: 306940 - DNA, 1688 bp, Homo sapiens
gggccgaggccggggcgttttgaggtaacttcgctgctgctggcgcgcaggcccccagccccggggcgctgccctcaaggacagtgccggcgtgggcggagggtgctgggagaggggcagctcccgcaccgtcctgccccatagctgggccttgctggccggacactggccgcctgtgcatctagtggtttctgaactgtggtttgtttcgccaaggggcactgcactgctttcaggccctccaggcaagccaaaattccttccggatagaatatgatacctttggtgaactaaaggtgccaaatgataagtattatggcgcccagaccgtgagatctacgatgaactttaagattggaggtgtgacagaacgcatgccaaccccagttattaaagcttttggcatcttgaagcgagcggccgctgaagtaaaccaggattatggtcttgatccaaagattgctaatgcaataatgaaggcagcagatgaggtagctgaaggtaaattaaatgatcattttcctctcgtggtatggcagactggatcaggaactcagacaaatatgaatgtaaatgaagtcattagcaatagagcaattgaaatgttaggaggtgaacttggcagcaagatacctgtgcatcccaacgatcatgttaataaaagccagagctcaaatgatacttttcccacagcaatgcacattgctgctgcaatagaagttcatgaagtactgttaccaggactacagaagttacatgatgctcttgatgcaaaatccaaagagtttgcacagatcatcaagattggacgtactcatactcaggatgctgttccacttactcttgggcaggaatttagtggttatgttcaacaagtaaaatatgcaatgacaagaataaaagctgccatgccaagaatctatgagctcgcagctggaggcactgctgttggtacaggtttaaatactagaattggctttgcagaaaaggttgctgcaaaagtggctgcacttacaggcttgccttttgtcactgctccgaataaatttgaagctctggctgctcatgacgctctggttgagctcagtggagccatgaacactactgcctgcagtctgatgaagatagcaaatgatattcgatttttgggttctggtcctcggtcaggtctgggagaattgatcttgcctgaaaatgaaccaggaagcagtatcatgccaggcaaggtgaaccctactcagtgtgaagcaatgaccatggttgcagcccaagtcatggggaaccatgttgctgtcactgtcggaggcagcaatggacattttgagttgaatgttttcaagccaatgatgattaaaaatgtgttacactcagccaggctgctgggggatgcttcagtttcctttacagaaaactgcgtggtgggaatccaggccaatacagaaaggatcaacaagctgatgaatgagtctctaatgttggtgacagctctcaatcctcatatagggtatgacaaggcagcaaagattgctaagacagcacacaaaaatggatcaaccttaaaggaaactgctatcgaacttggctatctcacagcagagcagtttgacgaatgggtaaaacctaaggacatgctgggtccaaagtgatttacataaatttataatgaaaataaacatgtataaaattta

SEQ ID NO: 306941 - DNA, 1554 bp, Homo sapiens
  misc_feature (1)..(1): n is a, c, g, or t
ncccagaaattctacccaagctccctcagcaccatgtaccgagcacttcggctcctcgcgcgctcgcgtcccctcgtgcgggctccagccgcagccttagcttcggctcccggcttgggtggcgcggccgtgccctcgttttggcctccgaacgcggctcgaatggcaagccaaaattccttccggatagaatatgatacctttggtgaactaaaggtgccaaatgataagtattatggcgcccagaccgtgagatctacgatgaactttaagattggaggtgtgacagaacgcatgccaaccccagttattaaagcttttggcatcttgaagcgagcggccgctgaagtaaaccaggattatggtcttgatccaaagattgctaatgcaataatgaaggcagcagatgaggtagctgaaggtaaattaaatgatcattttcctctcgtggtatggcagactggatcaggaactcagacaaatatgaatgtaaatgaagtcattagcaatagagcaattgaaatgttaggaggtgaacttggcagcaagatacctgtgcatcccaacgatcatgttaataaaagccagagctcaaatgatacttttcccacagcaatgcacattgctgctgcaatagaagttcatgaagtactgttaccaggactacagaagttacatgatgctcttgatgatgctgttccacttactcttgggcaggaatttagtggttatgttcaacaagtaaaatatgcaatgacaagaataaaagctgccatgccaagaatctatgagctcgcagctggaggcactgctgttggtacaggtttaaatactagaattggctttgcagaaaaggttgctgcaaaagtggctgcacttacaggcttgccttttgtcactgctccgaataaatttgaagctctggctgctcatgacgctctggttgagctcagtggagccatgaacactactgcctgcagtctgatgaagatagcaaatgatattcgatttttgggttctggtcctcggtcaggtctgggagaattgatcttgcctgaaaatgaaccaggaagcagtatcatgccaggcaaggtgaaccctactcagtgtgaagcaatgaccatggttgcagcccaagtcatggggaaccatgttgctgtcactgtcggaggcagcaatggacattttgagttgaatgttttcaagccaatgatgattaaaaatgtgttacactcagccaggctgctgggggatgcttcagtttcctttacagaaaactgcgtggtgggaatccaggccaatacagaaaggatcaacaagctgatgaatgagtctctaatgttggtgacagctctcaatcctcatatagggtatgacaaggcagcaaagattgctaagacagcacacaaaaatggatcaaccttaaaggaaactgctatcgaacttggctatctcacagcagagcagtttgacgaatgggtaaaacctaaggacatgctgggtccaaagtgatttacataaatttataatgaaaataaacatgtataaaattta

SEQ ID NO: 306942 - DNA, 1161 bp, Homo sapiens
tcgctgactgcattctcgtactctcatacacttctgatggtactgtgattacttgactcttaaacaatggcgatgatggggctgtgactttattatggggatactcgagagtcgcactgatcgtgtgcatgctaggcacaggtcgtactgataataacgctcagtgactggcacattgctgctgcaatagaagttcatgaagtactgttaccaggactacagaagttacatgatgctcttgatgcaaaatccaaagagtttgcacagatcatcaagattggacgtactcatactcaggatgctgttccacttactcttgggcaggaatttagtggttatgttcaacaagtaaaatatgcaatgacaagaataaaagctgccatgccaagaatctatgagctcgcagctggaggcactgctgttggtacaggtttaaatactagaattggctttgcagaaaaggttgctgcaaaagtggctgcacttacaggcttgccttttgtcactgctccgaataaatttgaagctctggctgctcatgacgctctggttgagctcagtggagccatgaacactactgcctgcagtctgatgaagatagcaaatgatattcgatttttgggttctggtcctcggtcaggtctgggagaattgatcttgcctgaaaatgaaccaggaagcagtatcatgccaggcaaggtgaaccctactcagtgtgaagcaatgaccatggttgcagcccaagtcatggggaaccatgttgctgtcactgtcggaggcagcaatggacattttgagttgaatgttttcaagccaatgatgattaaaaatgtgttacactcagccaggctgctgggggatgcttcagtttcctttacagaaaactgcgtggtgggaatccaggccaatacagaaaggatcaacaagctgatgaatgagtctctaatgttggtgacagctctcaatcctcatatagggtatgacaaggcagcaaagattgctaagacagcacacaaaaatggatcaaccttaaaggaaactgctatcgaacttggctatctcacagcagagcagtttgacgaatgggtaaaacctaaggacatgctgggtccaaagtgatttacataaatttataatgaaaataaacatgtataaaattta

SEQ ID NO: 306943 - DNA, 2492 bp, Homo sapiens
tgagacaaggcctcactctgttgcccaggctggagtgcaagtggtgtaatctgggctcactccaacctccaccaccttggctcaagtagtcttcccacctcagcctcctgagaagatgggactacaggtgcacacctcacctggctaatttttggattttttgtagacaatgggtttcatcatgttgcctcaagaaaaataacatcatggtaatactaagtcttttatcagtgacatgtaactgattttaaaatattatatagtgcttcctagtttaaccaaactggaggcatgttttatatgatgggctgatgtctcatgaataactgtgccaaaatcctcacttctgagtgcactgatgcagtagatggatgtctcagatccctcagctcccagattgggccaactctccttataccaccacacctgggacctgggaggaatggggaaggggactttatagggcagagctttcccagactcttgttccaccctaaggataaagtattacagtaactttcttcctgccttccagaggcactttcattcttcctggagctctcgtcaaccctgacctcttcctttgtcagcaaggtcaaacgcctgagccacaagtcttagctgtttccagaagggtgattgtgtgctcccacctatatctgaggtcctagactcctcagaggaagtcagcttcatgtgatctaggttactcaagcctggggctagtgttttcatattctggtatgagagacttgcttcctctggaaagatctttatggtttacacaaatgtaacagaccacttaacaatagctagtctctaaaatgtacatcttaaaatggctttatacttacgggaattcctaattaaaaaaaaaactcacttgatttatatcacattgtaaaatatagtttacttcaaaagatgatcctgaagatcccatcacagagtgtttaagggatgattataaacttttagcccttaagagagaatatatatactcaactgagtactgtctttcaaagcagtccctgtcagtttgtccattgattccatagcagctctcactgcccaccctgcttgagaagcctcttggagttgcctagagagtctatagcactcatctgaaggccctccatgagaacaactcttctcttccacatagatatttttgcatcagcccaaagctatttggacacaagtttggtgaacacggtaagaaaaaaacaaaccaagcaacaaaaacaaaaagcaggcagtgctgtgttagactgaaagtaaaagataaaaactctaagaacctatgaagcgccagggcagtgctggttgctttcacccatatggtctcctttggtgttctgctggtgcttatgaagcagtatccctactgacaatgaccctagcttaagagggctgagaactgctgaaagtgaagctgtttataaatggtacagtcaggaccgacagacacatgggtgtggtatgactgcaaagtacctgtggaattcagatgggattaccatccccactataaagggcaatatgatctgttgcaggagggtttatagggtacttagttacacaggtcacactgatccccttttcctctttttttctatgcaagtatctatttgtctatatgtctgtctaccttggtaggttgggctccttgaagaagggttatgttttcttcatctccatatccccagtagctggccaatgcccagtatacaccaggggctcagtcgctgtttgtcttattttcttgttgactctactctgacttaggacatatcactttcctctcttgaccttcacattcagatgtgttaataaaagtggataaagaccactctagctttaaaacaccctccaatatagagagaactctgaaaccagaagcagaagctgaggaatggtgaatagagcattttccctcacacgatgggtatcagggtggtttcttgtcctttcaatgcctctgcagaacttgaccctagtttttcaaattggactcaagaatgatcttagtgttggtggttttgtggttttctttgagactttgttattgacagaacagcttctggaaatcccagctactccagaggctgagattacaggtgcccgccacatagcccggctaattttttgtatttttagtagatacggggtttcaccatgttagccaggatggtctcaatctcttcacctcgtgatctgcccgcctcggcctcccaaagtgctgcgattacaggcgtgagccactgcgcccggcccttttttttttttttaaactaatatttatcaaggaggcaccagctgccaggcagtgaagagcttccaaacagcaactcattggctgcccagaagcaccctgtggcgcagagtcctttcttaggccacctttgggcccagaaaactaaagtgacttgccaagtccacacagccagtatgtgctaagccctctgacttgagagaccgagagcgtcact

SEQ ID NO: 306944 - DNA, 3593 bp, Homo sapiens
  misc_feature (3020)..(3020): n is a, c, g, or t
ccgcgcccgcgcccccgccgcccccatgggcgtgcagggcttccaggactacatcgagaagcactgcccgagcgccgtggtgccggtggagctgcagaagctggcccggggcagcctggtgggcggcgggcggcagcggcccccgcagaccccgctgcgcctgctggtggacgccgacaactgcctgcaccgcctctacggcggcttctacaccgactgggtcagcggcggccagtggaaccacatgcttggctacctggcggcgctggccaaggcctgcttcggcggcaacatcgagctcttcgtcttcttcaacggcgcgctcgagaaggcccggctgcacgagtgggtcaagcggcagggcaacgagcgccagacggcacagcagatcgtcagccatgtccagaacaagggcaccccgccgccaaaggtctggttcctgccgcccgtctgcatggcccactgcatccgcctggcgctcatccgcttccacgtcaaggttgcacagagcattgaggatcaccatcaggaagtgattggtttctgcagagagaatggtttccatggcttggttgcgtatgactctgattatgcactgtgcaacatcccctactatttcagtgcccatgccctaaaactgagccggaacgggaaaagtctcaccacaagccaatatctgatgcatgaagttgccaagcaactggacctgaatccaaatcgttttcctatttttgctgctctcttaggaaatcacattctgcctgatgaagatctggcttcctttcattggagtttacttggtccagaacatccactagcctcactaaaggtccgggcccaccagctggtcttgccaccttgcgacgtagtgatcaaagccgttgctgactatgtacgcaacattcaggacacctctgacttggatgccatagctaaagatgttttccagcattcacagtctagaacagatgacaaagttattcgatttaagagagcaattggatattattcagcgactagtaagcctatgtcatttcatccaccacattacttagcagccagacccggtccgtttggaatgcctgggatggtgccgccgcatgttcctcctcagatgctcaacattccgcagacctctctgcaagcaaagcccgtggccccacaggtgcccagcccagggggcgccccgggccagggtccatacccgtacagcctctctgagccagcacctctcactttggacacgagcgggaagaatctgacggagcagaacagctacagcaacattcctcacgaagggaagcacacgccgctgtatgagcggtcctcgcccatcaacccggcccagagcggcagccccaaccacgtggattccgcctacttccctggctcttctacatcgtcatcttccgacaacgacgagggcagcggaggggcgacaaaccatatcagcgggaacaagattggctgggagaagacgggaagccactcagagcctcaggcacgaggagacccaggagaccaaacaaaggcagaaggctcgtccactgcctcttcaggaagccaactagccgaaggcaagggaagccagatgggcactgtccagccaatcccgtgcctcctgtcgatgcccaccaggaaccacatggacatcaccacacctcccctgccccccgtcgcacctgaggtgctgagagtggccgagcacaggcacaagaaggggctgatgtacccctacatcttccatgtcctgacgaaggtattatcaaaggggccctggagtggcttctgttatttgatgagtggccattcctatgggtgttttgtccttttgtccttttttgaaccatttttctgtcttactaatctacttgaaacaaagttcactttcccctttctaaacattgaatgaaagatgaacatttataactgtaaatagttttaaaataactcgtgaaaagtctcacttttttccttcaacttagtatagaatattttatacttctaatgaaataatgcatcacattattttatgacttgtaattttattctttttacttcaatttcagaattttcttaaaccatatttgtgctgtaatgtcaggtttaattctgatgtcagatacaatatctggttcctttatcatttgtgcttagaaaataatgtttccccctttgaatggctcatagtgcttcatgtgttttgacttgttcatgacctcattgagtgcagttttaatagtgctaagaacaaaaaatataatacaggattttgttaacatacgcatagtcagaaaatgaaactatcattttatacagtgtcataatttcactttattagtgtcttaatgtatgcttaaatatatacatatagtgtggcatcaattattttttaatcttggtgtctcaaatgtatctatgtgtatttaaatttcctcagtgatttgtagtctttatgttggcacttttaatcttagccccacaatttaacaagttacctcagttactagattaatcctgcagaactggtttattgctatcatgtattattaacatgaatacctatatgaccatatataaccagacttttctgtctattctctacaacccatctgtggtttgtaaaatggagtcaataaatgcaataatgaactcctgttctcaaatactcctgaggtggacttcaactgttaactgactaatccaaatattgcttacttttattaattaaaggacatggaaaacatgtagccagtactatttgctcagatcctttaatttattttttagttgtaatgcctccaaatctcatctattatttgatatgggtatgcatttatagtatcacttttcagattatggttgtaaggtgaacattttatttttcaggttcaacataaattataaagggtaagtgaaaagtaattgttgtggggaaaacattttgctaagtttaaggaaccaaagttttgggaagacatctttcaaaataaggtgtgaagaaacaacactcattcctngtggggctgtttgaaatgtaaggtccccaggagctacctgttatgtccacactgctggatctgatgcgtggatagtcggttagatctatatgagggttgcaaattgtaccgacatgctttcttatttcttatgaatttcaagggcaaatactgataaaatgaccatggttgagaaaattgtcttttcacattttaaaatgctacttaagttttttcagtttatcctataagctgaatggctctggtattaattgcccaggctaagacatttacagtgagatgcatctttatggtaatgaagagaatttgcaaagcatcatattattgagataaatattccctagatgagagtgttagaacacatgtagctactggattaatgaatatgaaagtatggagggtaaggggaaagaccagtttttaaattaaacttatgtgaatgaaagaaacagcaaatattacaaaattattatttaaagcatatatatcaatgaacttcatagacattgaggtcataaatgcattgttgtgctctgagtataattaaataaaatttgttgcatgaaatcttga

SEQ ID NO: 306945 - DNA, 921 bp, Homo sapiens
cggggtccgcggccgcgtggggacacttgagggctgggagagagccccggaccagaattcggaggcgacagtgtcatcatccccaatatccttagtttttcccatcctatttgaggcgggcaggctatcactcaccttcaactttgacaaaatactcccttttctaatttagcctgttctttcccagcaacaggttcatcttggaagcaggcaggatacagagtaatagagggggtttcgccagagcccttgggggctgcaaatatcagtgctgctgccgccgcccttgccaatgttgttagcccggtgacagcgagacgtgtctaagggccagtgccctggcctctacttcagaacgcagtgccctgtccgtgttcctcttagtacagggtgtttagagaatctttctatggctttttgtgttagatttcaaagacccgtgcactttgacaggatgggattttgtcagttctgtgacttcacgtccgtgtgaaagaggtctttaaggcagttcggttttgtagatcccatgcgaaaggagtcgctcaaaatcagggggcgaactacgcgggcgtgaactcgcaggatttatttttcgggtgcacagtaagtattcagtgaccttcagcggtgccctgacgggtgggtaatcagagctctatatcaccggcctcctctggccctttggcagagggcttcgcagctggcactgggccagaggagaacttcaggacccagcagtgactgtgaagataagcacatccatgatcctggacttcacgttctgattgcttgcttttttcattggttttcttgaaaacaattttgggggcctttttgttgtcttagctcttgacactcggtcttccatcttgtcatttgacatttccttgaaactgctggagctgaaagtttgtgaaa

SEQ ID NO: 306946 - DNA, 961 bp, Homo sapiens
cattctggtcgtctgtggcagtggtccgggttgttgcgctggtgtttgtgggcttttcgtcgggcatggctgtggtgtgtgcacggttccatgtgggtgtggtctgcaggctgtcctggccttcaggccttgtcggttggctctcttggtgtgtttctttcgtagggtatgcgtccagctttttgcctgtattcttcccttttctaatttagcctgttctttcccagcaacaggttcatcttggaagcaggcaggatacagagtaatagagggggtttcgccagagcccttgggggctgcaaatatcagtgctgctgccgccgcccttgccaatgttgttagcccggtgacagcgagacgtgtctaagggccagtgccctggcctctacttcagaacgcagtgccctgtccgtgttcctcttagtacagggtgtttagagaatctttctatggctttttgtgttagatttcaaagacccgtgcactttgacaggatgggattttgtcagttctgtgacttcacgtccgtgtgaaagaggtctttaaggcagttcggttttgtagatcccatgcgaaaggagtcgctcaaaatcagggggcgaactacgcgggcgtgaactcgcaggatttatttttcgggtgcacagtaagtattcagtgaccttcagcggtgccctgacgggtgggtaatcagagctctatatcaccggcctcctctggccctttggcagagggcttcgcagctggcactgggccagaggagaacttcaggacccagcagtgactgtgaagataagcacatccatgatcctggacttcacgttctgattgcttgcttttttcattggttttcttgaaaacaattttgggggcctttttgttgtcttagctcttgacactcggtcttccatcttgtcatttgacatttccttgaaactgctggagctgaaagtttgtgaaa

SEQ ID NO: 306947 - DNA, 5117 bp, Homo sapiens
ccgcgcccgcgcccccgccgcccccatgggcgtgcagggcttccaggactacatcgagaagcactgcccgagcgccgtggtgccggtggagctgcagaagctggcccggggcagcctggtgggcggcgggcggcagcggcccccgcagaccccgctgcgcctgctggtggacgccgacaactgcctgcaccgcctctacggcggcttctacaccgactgggtcagcggcggccagtggaaccacatgcttggctacctggcggcgctggccaaggcctgcttcggcggcaacatcgagctcttcgtcttcttcaacggcgcgctcgagaaggcccggctgcacgagtgggtcaagcggcagggcaacgagcgccagacggcacagcagatcgtcagccatgtccagaacaagggcaccccgccgccaaaggtctggttcctgccgcccgtctgcatggcccactgcatccgcctggcgctcatccgcttccacgtcaaggttgcacagagcattgaggatcaccatcaggaagtgattggtttctgcagagagaatggtttccatggcttggttgcgtatgactctgattatgcactgtgcaacatcccctactatttcagtgcccatgccctaaaactgagccggaacgggaaaagtctcaccacaagccaatatctgatgcatgaagttgccaagcaactggacctgaatccaaatcgttttcctatttttgctgctctcttaggaaatcacattctgcctgatgaagatctggcttcctttcattggagtttacttggtccagaacatccactagcctcactaaaggtccgggcccaccagctggtcttgccaccttgcgacgtagtgatcaaagccgttgctgactatgtacgcaacattcaggacacctctgacttggatgccatagctaaagatgttttccagcattcacagtctagaacagatgacaaagttattcgatttaagagagcaattggatattattcagcgactagtaagcctatgtcatttcatccaccacattacttagcagccagacccggtccgtttggaatgcctgggatggtgccgccgcatgttcctcctcagatgctcaacattccgcagacctctctgcaagcaaagcccgtggccccacaggtgcccagcccagggggcgccccgggccagggtccatacccgtacagcctctctgagccagcacctctcactttggacacgagcgggaagaatctgacggagcagaacagctacagcaacattcctcacgaagggaagcacacgccgctgtatgagcggtcctcgcccatcaacccggcccagagcggcagccccaaccacgtggattccgcctacttccctggctcttctacatcgtcatcttccgacaacgacgagggcagcggaggggcgacaaaccatatcagcgggaacaagattggctgggagaagacgggaagccactcagagcctcaggcacgaggagacccaggagaccaaacaaaggcagaaggctcgtccactgcctcttcaggaagccaactagccgaaggcaagggaagccagatgggcactgtccagccaatcccgtgcctcctgtcgatgcccaccaggaaccacatggacatcaccacacctcccctgccccccgtcgcacctgaggtgctgagagtggccgagcacaggcacaagaaggggctgatgtacccctacatcttccatgtcctgacgaagggtgaaatcaaaattgctgtttctattgaagatgaagccaacaaggacctgcctccggccgctctgctctataggccagttcgtcagtatgtttacggagtcctgtttagtttggcagaaagcagaaagaaaactgagagacttgcttttagaaagaacagacttccaccagaattttcaccagtgatcattaaagaatgggcagcttacaaaggaaagtctcctcaaaccccggaactggttgaagctcttgccttcagggagtggacctgccccaacctgaagaggctgtggttgggtaaggcggtagaggacaagaaccgcaggatgagggccttcctggcctgcatgaggtcggacaccccagccatgctcaaccctgccaacgtgcccactcacctcatggtgctctgctgcgtcttacggtacatggtgcagtggccgggagcacgcatccttcggcgtcaggagctagatgccttcctggctcaggcgctgtcccccaaactctacgagcctgatcagctccaggagctcaagattgagaacctagatccccgaggaattcagctatcagctctcttcatgagtggagtagacatggccttgtttgcaaatgatgcatgcggacagccaatcccctgggaacactgttgtccttggatgtattttgatgggaagctcttccaatccaaactcctcaaagccagccgggaaaagaccccactcattgacctctgtgatggtcaggctgatcaggctgccaaggtagagaagatgcgccagagcgtcctcgaggggctcagcttctccaggcagagccacacgctccctttcccgccgccacctgccctgcccttctaccctgcctctgcgtacccccggcactttgggcctgtcccaccctctcagggcaggggcagaggctttgcaggcgtctgtggctttggaggcccctatggggaaacggtagcaacaggcccttaccgtgccttccgtgtggcggcagcatcgggacactgcggagccttctcaggcagtgacagcagcaggactagcaagtcccagggcggagtccaacctataccttctcagggaggcaaactagaaatagctggcactgtggttggccattgggctgggagcaggcggggccgtgggggccgggggcctttccccctgcaggtggtttctgtcggaggaccagctagagggcgtccaagaggagttatttccaccccagtgattagaacatttggaagaggtggaaggtactatggcagaggttacaaaaaccaggcagcaattcagggcagacctccttatgctgcttcagcagaagaagtggccaaagaacttaagtcaaaatctggggaatcgaagtcctctgctatgtcttcagacgggtccctggctgaaaacggagtgatggccgaggagaagccggctccccagatgaacgggagcacgggtgacgccagggcccccagccactctgaaagtgccttgaataatgactctaaaacgtgcaatacaaatcctcatttaaatgcactaagtacagacagcgcttgccgcagagaagctgctctggaggcagctgtcttaaataaagaagagtaaacttattttttatagagggtgaaggatgctggaagggtaaggatttaggaatatctggagagaaagagagcctgcagttatgtacattttgtcctttccgtaagagaaaaatgaggactttggaaattcagatccctctttgatatcagagatttaaacaacacatttttagttttaaccagttgtagtcaaaatgctacaataaaacaaaaaagagaaagaaaatgaagagcatttgactcccgcacttaaaatgaagtacacataaagtttaaactggttatgacaaaagcctatagttgtgtttcttgaactataaagaaaacaaattttggcagtctttaagtatatatagcttaaaatataatttttagcatttggcaccatatgtatgccattatatttgattttgcattactgtttcacaatgaagctttctttaaggctttgatttttatgattatgaaagaaataaggcacaaccacagtttttctttcttaaatttcatcactgttgatgtggttcttttgtgttaaaaaaaaaaagtgcaactatcaaaactaaaaaattatagagtaatattgccgttctgctgattttaaatatacaatacatcatacatactttacaagcaagttaaatggagataaagttgaaatcatagaagatgcaaatgacctttcaaaatcaacacaatgtgttctgaaactttcgtgactaataccatgcatctgtgatcaatgaactatgtggttttgaatcggatgtagaccattagtactactacttgagctaaacttctgcatggttcataatttttaaagtgtgtagttaatatgcatgttatcgtcctttcttccattcttaacagtatgtgcccatttgcaaaacaaaaatgctaataatcagtaatagtcctataaaagatgttaactctgtttagtcattgactgatcttgctctaaccttaaaattttgtgattattgacctctgttgcatttattctaaagccccccaaaaattatctagccgtttcgaatatcaacattaccctggtgtattcactgctgtatgcattattgttctttgttgctgttttatgccttcatattagcaaatatgaaattctgtgaaaaaaaaccctttgatcttaaaaaaaaaaaaaccaccccccccttctgtagcaggaaacaaattgcttgttcttgagaactttcccatcaagaatttagtagaagcaggtatacttctatcattttgatgtttttgttaatgtttccaaacaatgtactttgaaatcagaatcacttcttatcgttttcatatacttctgatgctcttcatcacattagtgatcagaaatgaggtgtaattccccaacccctgcccgcaagagctaagtaggatcttactgtaagttgaagggagttttgccctaactcatggattgtgcaagaatgaactgctgttgggtttgattgactgtcgatggattgtggtgtggtgtatctgaaggctattgaatgcaacttacaatgcttaataaaaatctttattcttttaggtataaaaaaaaaaaaaaaaaaaaaaaaaaaaagaagaaagcagaaaagaagcagaaaaagcaaagaggaaaaagaaaaagaaaaagagcagaaagaatgaaacaggaagaaacagagaaggaaagaaaaggaggcaagcagaagaacaagaacaagaagacacaatgt

SEQ ID NO: 306948 - DNA, 6623 bp, Homo sapiens
atttgttcgttcttctgttttcctctttttgttcgttctttttgtttcttcttgctgtcgcgtgtctgcttctcgtcctgttcttctcctgcgtctgctcgggcttattttataatccttgtctctcctttgtccctccggttgtgtatactgtcccgctgtttgttctctcccgtggttcccttctttcgagattttggtttctcacaatcctgctcttgtgttttctctctcccccgcttttttttatttgtgtggatattcccctccgttatttgtgtgccgcggtgcttctcctgggtatctctttttgtctactgttctaccttgacccttgtggtgccccctcgtcgtcactactcttgttttctataaacctttttctcggtcccctctttctcgccaaacaattttttttttttttctttttttttttttttttttcacattgtaaaatatagtttacttcaaaagatgatcctgaagatcccatcacagagtgtttaagggatgattataaacttttagcccttaagagagaatatatatactcaactgagtactgtctttcaaagcagtccctgtcagtttgtccattgattccatagcagctctcactgcccaccctgcttgagaagcctcttggagttgcctagagagtctatagcactcatctgaaggccctccatgagaacaactcttctcttccacatagatatttttgcatcagcccaaagctatttggacacaagtttggtgaacacggtaagaaaaaaacaaaccaagcaacaaaaacaaaaagcaggcagtgctgtgttagactgaaagtaaaagataaaaactctaagaacctatgaagcgccagggcagtgctggttgctttcacccatatggtctcctttggtgttctgctggtgcttatgaagcagtatccctactgacaatgaccctagcttaagagggctgagaactgctgaaagtgaagctgtttataaatggtacagtcaggaccgacagacacatgggtgtggtatgactgcaaagtacctgtggaattcagatgggattaccatccccactataaagggcaatatgatctgttgcaggagggtttatagggtacttagttacacaggtcacactgatccccttttcctctttttttctatgcaagtatctatttgtctatatgtctgtctaccttggtaggttgggctccttgaagaagggttatgttttcttcatctccatatccccagtagctggccaatgcccagtatacaccaggggctcagtcgctgtttgtcttattttcttgttgactctactctgacttaggacatatcactttcctctcttgaccttcacattcagatgtgttaataaaagtggataaagaccactctagctttaaaacaccctccaatatagagagaactctgaaaccagaagcagaagctgaggaatggtgaatagagcattttccctcacacgatgggtatcagggtggtttcttgtcctttcaatgcctctgcagaacttgaccctagtttttcaaattggactcaagaatgatcttagtgttggtggttttgtggttttctttgagactttgttattgacagaacagcttctggaaatctttttcaccgggagtatgggggcttctttggccaaaccgtgcgcgtgcaggctccatgtgctgggcagcagctgtccggccacagcctgtcggttgcatcctgctcctctacagaggtttctggcggcgctggccaaggcctgcttcggcggcaacatcgagctcttcgtcttcttcaacggcgcgctcgagaaggcccggctgcacgagtgggtcaagcggcagggcaacgagcgccagacggcacagcagatcgtcagccatgtccagaacaagggcaccccgccgccaaaggtctggttcctgccgcccgtctgcatggcccactgcatccgcctggcgctcatccgcttccacgtcaaggttgcacagagcattgaggatcaccatcaggaagtgattggtttctgcagagagaatggtttccatggcttggttgcgtatgactctgattatgcactgtgcaacatcccctactatttcagtgcccatgccctaaaactgagccggaacgggaaaagtctcaccacaagccaatatctgatgcatgaagttgccaagcaactggacctgaatccaaatcgttttcctatttttgctgctctcttaggaaatcacattctgcctgatgaagatctggcttcctttcattggagtttacttggtccagaacatccactagcctcactaaaggtccgggcccaccagctggtcttgccaccttgcgacgtagtgatcaaagccgttgctgactatgtacgcaacattcaggacacctctgacttggatgccatagctaaagatgttttccagcattcacagtctagaacagatgacaaagttattcgatttaagagagcaattggatattattcagcgactagtaagcctatgtcatttcatccaccacattacttagcagccagacccggtccgtttggaatgcctgggatggtgccgccgcatgttcctcctcagatgctcaacattccgcagacctctctgcaagcaaagcccgtggccccacaggtgcccagcccagggggcgccccgggccagggtccatacccgtacagcctctctgagccagcacctctcactttggacacgagcgggaagaatctgacggagcagaacagctacagcaacattcctcacgaagggaagcacacgccgctgtatgagcggtcctcgcccatcaacccggcccagagcggcagccccaaccacgtggattccgcctacttccctggctcttctacatcgtcatcttccgacaacgacgagggcagcggaggggcgacaaaccatatcagcgggaacaagattggctgggagaagacgggaagccactcagagcctcaggcacgaggagacccaggagaccaaacaaaggcagaaggctcgtccactgcctcttcaggaagccaactagccgaaggcaagggaagccagatgggcactgtccagccaatcccgtgcctcctgtcgatgcccaccaggaaccacatggacatcaccacacctcccctgccccccgtcgcacctgaggtgctgagagtggccgagcacaggcacaagaaggggctgatgtacccctacatcttccatgtcctgacgaagggtgaaatcaaaattgctgtttctattgaagatgaagccaacaaggacctgcctccggccgctctgctctataggccagttcgtcagtatgtttacggagtcctgtttagtttggcagaaagcagaaagaaaactgagagacttgcttttagaaagaacagacttccaccagaattttcaccagtgatcattaaagaatgggcagcttacaaaggaaagtctcctcaaaccccggaactggttgaagctcttgccttcagggagtggacctgccccaacctgaagaggctgtggttgggtaaggcggtagaggacaagaaccgcaggatgagggccttcctggcctgcatgaggtcggacaccccagccatgctcaaccctgccaacgtgcccactcacctcatggtgctctgctgcgtcttacggtacatggtgcagtggccgggagcacgcatccttcggcgtcaggagctagatgccttcctggctcaggcgctgtcccccaaactctacgagcctgatcagctccaggagctcaagattgagaacctagatccccgaggaattcagctatcagctctcttcatgagtggagtagacatggccttgtttgcaaatgatgcatgcggacagccaatcccctgggaacactgttgtccttggatgtattttgatgggaagctcttccaatccaaactcctcaaagccagccgggaaaagaccccactcattgacctctgtgatggtcaggctgatcaggctgccaaggtagagaagatgcgccagagcgtcctcgaggggctcagcttctccaggcagagccacacgctccctttcccgccgccacctgccctgcccttctaccctgcctctgcgtacccccggcactttgggcctgtcccaccctctcagggcaggggcagaggctttgcaggcgtctgtggctttggaggcccctatggggaaacggtagcaacaggcccttaccgtgccttccgtgtggcggcagcatcgggacactgcggagccttctcaggcagtgacagcagcaggactagcaagtcccagggcggagtccaacctataccttctcagggaggcaaactagaaatagctggcactgtggttggccattgggctgggagcaggcggggccgtgggggccgggggcctttccccctgcaggtggtttctgtcggaggaccagctagagggcgtccaagaggagttatttccaccccagtgattagaacatttggaagaggtggaaggtactatggcagaggttacaaaaaccaggcagcaattcagggcagacctccttatgctgcttcagcagaagaagtggccaaagaacttaagtcaaaatctggggaatcgaagtcctctgctatgtcttcagacgggtccctggctgaaaacggagtgatggccgaggagaagccggctccccagatgaacgggagcacgggtgacgccagggcccccagccactctgaaagtgccttgaataatgactctaaaacgtgcaatacaaatcctcatttaaatgcactaagtacagacagcgcttgccgcagagaagctgctctggaggcagctgtcttaaataaagaagagtaaacttattttttatagagggtgaaggatgctggaagggtaaggatttaggaatatctggagagaaagagagcctgcagttatgtacattttgtcctttccgtaagagaaaaatgaggactttggaaattcagatccctctttgatatcagagatttaaacaacacatttttagttttaaccagttgtagtcaaaatgctacaataaaacaaaaaagagaaagaaaatgaagagcatttgactcccgcacttaaaatgaagtacacataaagtttaaactggttatgacaaaagcctatagttgtgtttcttgaactataaagaaaacaaattttggcagtctttaagtatatatagcttaaaatataatttttagcatttggcaccatatgtatgccattatatttgattttgcattactgtttcacaatgaagctttctttaaggctttgatttttatgattatgaaagaaataaggcacaaccacagtttttctttcttaaatttcatcactgttgatgtggttcttttgtgttaaaaaaaaaaagtgcaactatcaaaactaaaaaattatagagtaatattgccgttctgctgattttaaatatacaatacatcatacatactttacaagcaagttaaatggagataaagttgaaatcatagaagatgcaaatgacctttcaaaatcaacacaatgtgttctgaaactttcgtgactaataccatgcatctgtgatcaatgaactatgtggttttgaatcggatgtagaccattagtactactacttgagctaaacttctgcatggttcataatttttaaagtgtgtagttaatatgcatgttatcgtcctttcttccattcttaacagtatgtgcccatttgcaaaacaaaaatgctaataatcagtaatagtcctataaaagatgttaactctgtttagtcattgactgatcttgctctaaccttaaaattttgtgattattgacctctgttgcatttattctaaagccccccaaaaattatctagccgtttcgaatatcaacattaccctggtgtattcactgctgtatgcattattgttctttgttgctgttttatgccttcatattagcaaatatgaaattctgtgaaaaaaaaccctttgatcttaaaaaaaaaaaaaccaccccccccttctgtagcaggaaacaaattgcttgttcttgagaactttcccatcaagaatttagtagaagcaggtatacttctatcattttgatgtttttgttaatgtttccaaacaatgtactttgaaatcagaatcacttcttatcgttttcatatacttctgatgctcttcatcacattagtgatcagaaatgaggtgtaattccccaacccctgcccgcaagagctaagtaggatcttactgtaagttgaagggagttttgccctaactcatggattgtgcaagaatgaactgctgttgggtttgattgactgtcgatggattgtggtgtggtgtatctgaaggctattgaatgcaacttacaatgcttaataaaaatctttattcttttaggtataaaaaaaaaaaaaaaaaaaaaaaaaaaaagaagaaagcagaaaagaagcagaaaaagcaaagaggaaaaagaaaaagaaaaagagcagaaagaatgaaacaggaagaaacagagaaggaaagaaaaggaggcaagcagaagaacaagaacaagaagacacaatgt

SEQ ID NO: 306949 - DNA, 7774 bp, Homo sapiens
atttgttcgttcttctgttttcctctttttgttcgttctttttgtttcttcttgctgtcgcgtgtctgcttctcgtcctgttcttctcctgcgtctgctcgggcttattttataatccttgtctctcctttgtccctccggttgtgtatactgtcccgctgtttgttctctcccgtggttcccttctttcgagattttggtttctcacaatcctgctcttgtgttttctctctcccccgcttttttttatttgtgtggatattcccctccgttatttgtgtgccgcggtgcttctcctgggtatctctttttgtctactgttctaccttgacccttgtggtgccccctcgtcgtcactactcttgttttctataaacctttttctcggtcccctctttctcgccaaacaattttttttttttttctttttttttttttttttttcacattgtaaaatatagtttacttcaaaagatgatcctgaagatcccatcacagagtgtttaagggatgattataaacttttagcccttaagagagaatatatatactcaactgagtactgtctttcaaagcagtccctgtcagtttgtccattgattccatagcagctctcactgcccaccctgcttgagaagcctcttggagttgcctagagagtctatagcactcatctgaaggccctccatgagaacaactcttctcttccacatagatatttttgcatcagcccaaagctatttggacacaagtttggtgaacacggtaagaaaaaaacaaaccaagcaacaaaaacaaaaagcaggcagtgctgtgttagactgaaagtaaaagataaaaactctaagaacctatgaagcgccagggcagtgctggttgctttcacccatatggtctcctttggtgttctgctggtgcttatgaagcagtatccctactgacaatgaccctagcttaagagggctgagaactgctgaaagtgaagctgtttataaatggtacagtcaggaccgacagacacatgggtgtggtatgactgcaaagtacctgtggaattcagatgggattaccatccccactataaagggcaatatgatctgttgcaggagggtttatagggtacttagttacacaggtcacactgatccccttttcctctttttttctatgcaagtatctatttgtctatatgtctgtctaccttggtaggttgggctccttgaagaagggttatgttttcttcatctccatatccccagtagctggccaatgcccagtatacaccaggggctcagtcgctgtttgtcttattttcttgttgactctactctgacttaggacatatcactttcctctcttgaccttcacattcagatgtgttaataaaagtggataaagaccactctagctttaaaacaccctccaatatagagagaactctgaaaccagaagcagaagctgaggaatggtgaatagagcattttccctcacacgatgggtatcagggtggtttcttgtcctttcaatgcctctgcagaacttgaccctagtttttcaaattggactcaagaatgatcttagtgttggtggttttgtggttttctttgagactttgttattgacagaacagcttctggaaatctttttcaccgggagtatgggggcttctttggccaaaccgtgcgcgtgcaggctccatgtgctgggcagcagctgtccggccacagcctgtcggttgcatcctgctcctctacagaggtttctggcggcgctggccaaggcctgcttcggcggcaacatcgagctcttcgtcttcttcaacggcgcgctcgagaaggcccggctgcacgagtgggtcaagcggcagggcaacgagcgccagacggcacagcagatcgtcagccatgtccagaacaagggcaccccgccgccaaaggtctggttcctgccgcccgtctgcatggcccactgcatccgcctggcgctcatccgcttccacgtcaaggttgcacagagcattgaggatcaccatcaggaagtgattggtttctgcagagagaatggtttccatggcttggttgcgtatgactctgattatgcactgtgcaacatcccctactatttcagtgcccatgccctaaaactgagccggaacgggaaaagtctcaccacaagccaatatctgatgcatgaagttgccaagcaactggacctgaatccaaatcgttttcctatttttgctgctctcttaggaaatcacattctgcctgatgaagatctggcttcctttcattggagtttacttggtccagaacatccactagcctcactaaaggtccgggcccaccagctggtcttgccaccttgcgacgtagtgatcaaagccgttgctgactatgtacgcaacattcaggacacctctgacttggatgccatagctaaagatgttttccagcattcacagtctagaacagatgacaaagttattcgatttaagagagcaattggatattattcagcgactagtaagcctatgtcatttcatccaccacattacttagcagccagacccggtccgtttggaatgcctgggatggtgccgccgcatgttcctcctcagatgctcaacattccgcagacctctctgcaagcaaagcccgtggccccacaggtgcccagcccagggggcgccccgggccagggtccatacccgtacagcctctctgagccagcacctctcactttggacacgagcgggaagaatctgacggagcagaacagctacagcaacattcctcacgaagggaagcacacgccgctgtatgagcggtcctcgcccatcaacccggcccagagcggcagccccaaccacgtggattccgcctacttccctggctcttctacatcgtcatcttccgacaacgacgagggcagcggaggggcgacaaaccatatcagcgggaacaagattggctgggagaagacgggaagccactcagagcctcaggcacgaggagacccaggagaccaaacaaaggcagaaggctcgtccactgcctcttcaggaagccaactagccgaaggcaagggaagccagatgggcactgtccagccaatcccgtgcctcctgtcgatgcccaccaggaaccacatggacatcaccacacctcccctgccccccgtcgcacctgaggtgctgagagtggccgagcacaggcacaagaaggggctgatgtacccctacatcttccatgtcctgacgaaggtattatcaaaggggccctggagtggcttctgttatttgatgagtggccattcctatgggtgttttgtccttttgtccttttttgaaccatttttctgtcttactaatctacttgaaacaaagttcactttcccctttctaaacattgaatgaaagatgaacatttataactgtaaatagttttaaaataactcgtgaaaagtctcacttttttccttcaacttagtatagaatattttatacttctaatgaaataatgcatcacattattttatgacttgtaattttattctttttacttcaatttcagaattttcttaaaccatatttgtgctgtaatgtcaggtttaattctgatgtcagatacaatatctggttcctttatcatttgtgcttagaaaataatgtttccccctttgaatggctcatagtgcttcatgtgttttgacttgttcatgacctcattgagtgcagttttaatagtgctaagaacaaaaaatataatacaggattttgttaacatacgcatagtcagaaaatgaaactatcattttatacagtgtcataatttcactttattagtgtcttaatgtatgcttaaatatatacatatagtgtggcatcaattattttttaatcttggtgtctcaaatgtatctatgtgtatttaaatttcctcagtgatttgtagtctttatgttggcacttttaatcttagccccacaatttaacaagttacctcagttactagattaatcctgcagaactggtttattgctatcatgtattattaacatgaatacctatatgaccatatataaccagacttttctgtctattctctacaacccatctgtggtttgtaaaatggagtcaataaatgcaataatgaactcctgttctcaaatactcctgaggtggacttcaactgttaactgactaatccaaatattgcttacttttattaattaaaggacatggaaaacatgtagccagtactatttgctcagatcctttaatttattttttagttgtaatgcctccaaatctcatctattatttgatatgggtatgcatttatagtatcacttttcagattatggttgtaaggtgaacattttatttttcaggttcaacataaattataaaggggtgaaatcaaaattgctgtttctattgaagatgaagccaacaaggacctgcctccggccgctctgctctataggccagttcgtcagtatgtttacggagtcctgtttagtttggcagaaagcagaaagaaaactgagagacttgcttttagaaagaacagacttccaccagaattttcaccagtgatcattaaagaatgggcagcttacaaaggaaagtctcctcaaaccccggaactggttgaagctcttgccttcagggagtggacctgccccaacctgaagaggctgtggttgggtaaggcggtagaggacaagaaccgcaggatgagggccttcctggcctgcatgaggtcggacaccccagccatgctcaaccctgccaacgtgcccactcacctcatggtgctctgctgcgtcttacggtacatggtgcagtggccgggagcacgcatccttcggcgtcaggagctagatgccttcctggctcaggcgctgtcccccaaactctacgagcctgatcagctccaggagctcaagattgagaacctagatccccgaggaattcagctatcagctctcttcatgagtggagtagacatggccttgtttgcaaatgatgcatgcggacagccaatcccctgggaacactgttgtccttggatgtattttgatgggaagctcttccaatccaaactcctcaaagccagccgggaaaagaccccactcattgacctctgtgatggtcaggctgatcaggctgccaaggtagagaagatgcgccagagcgtcctcgaggggctcagcttctccaggcagagccacacgctccctttcccgccgccacctgccctgcccttctaccctgcctctgcgtacccccggcactttgggcctgtcccaccctctcagggcaggggcagaggctttgcaggcgtctgtggctttggaggcccctatggggaaacggtagcaacaggcccttaccgtgccttccgtgtggcggcagcatcgggacactgcggagccttctcaggcagtgacagcagcaggactagcaagtcccagggcggagtccaacctataccttctcagggaggcaaactagaaatagctggcactgtggttggccattgggctgggagcaggcggggccgtgggggccgggggcctttccccctgcaggtggtttctgtcggaggaccagctagagggcgtccaagaggagttatttccaccccagtgattagaacatttggaagaggtggaaggtactatggcagaggttacaaaaaccaggcagcaattcagggcagacctccttatgctgcttcagcagaagaagtggccaaagaacttaagtcaaaatctggggaatcgaagtcctctgctatgtcttcagacgggtccctggctgaaaacggagtgatggccgaggagaagccggctccccagatgaacgggagcacgggtgacgccagggcccccagccactctgaaagtgccttgaataatgactctaaaacgtgcaatacaaatcctcatttaaatgcactaagtacagacagcgcttgccgcagagaagctgctctggaggcagctgtcttaaataaagaagagtaaacttattttttatagagggtgaaggatgctggaagggtaaggatttaggaatatctggagagaaagagagcctgcagttatgtacattttgtcctttccgtaagagaaaaatgaggactttggaaattcagatccctctttgatatcagagatttaaacaacacatttttagttttaaccagttgtagtcaaaatgctacaataaaacaaaaaagagaaagaaaatgaagagcatttgactcccgcacttaaaatgaagtacacataaagtttaaactggttatgacaaaagcctatagttgtgtttcttgaactataaagaaaacaaattttggcagtctttaagtatatatagcttaaaatataatttttagcatttggcaccatatgtatgccattatatttgattttgcattactgtttcacaatgaagctttctttaaggctttgatttttatgattatgaaagaaataaggcacaaccacagtttttctttcttaaatttcatcactgttgatgtggttcttttgtgttaaaaaaaaaaagtgcaactatcaaaactaaaaaattatagagtaatattgccgttctgctgattttaaatatacaatacatcatacatactttacaagcaagttaaatggagataaagttgaaatcatagaagatgcaaatgacctttcaaaatcaacacaatgtgttctgaaactttcgtgactaataccatgcatctgtgatcaatgaactatgtggttttgaatcggatgtagaccattagtactactacttgagctaaacttctgcatggttcataatttttaaagtgtgtagttaatatgcatgttatcgtcctttcttccattcttaacagtatgtgcccatttgcaaaacaaaaatgctaataatcagtaatagtcctataaaagatgttaactctgtttagtcattgactgatcttgctctaaccttaaaattttgtgattattgacctctgttgcatttattctaaagccccccaaaaattatctagccgtttcgaatatcaacattaccctggtgtattcactgctgtatgcattattgttctttgttgctgttttatgccttcatattagcaaatatgaaattctgtgaaaaaaaaccctttgatcttaaaaaaaaaaaaaccaccccccccttctgtagcaggaaacaaattgcttgttcttgagaactttcccatcaagaatttagtagaagcaggtatacttctatcattttgatgtttttgttaatgtttccaaacaatgtactttgaaatcagaatcacttcttatcgttttcatatacttctgatgctcttcatcacattagtgatcagaaatgaggtgtaattccccaacccctgcccgcaagagctaagtaggatcttactgtaagttgaagggagttttgccctaactcatggattgtgcaagaatgaactgctgttgggtttgattgactgtcgatggattgtggtgtggtgtatctgaaggctattgaatgcaacttacaatgcttaataaaaatctttattcttttaggtataaaaaaaaaaaaaaaaaaaaaaaaaaaaagaagaaagcagaaaagaagcagaaaaagcaaagaggaaaaagaaaaagaaaaagagcagaaagaatgaaacaggaagaaacagagaaggaaagaaaaggaggcaagcagaagaacaagaacaagaagacacaatgt

SEQ ID NO: 306950 - DNA, 6644 bp, Homo sapiens
atttgttcgttcttctgttttcctctttttgttcgttctttttgtttcttcttgctgtcgcgtgtctgcttctcgtcctgttcttctcctgcgtctgctcgggcttattttataatccttgtctctcctttgtccctccggttgtgtatactgtcccgctgtttgttctctcccgtggttcccttctttcgagattttggtttctcacaatcctgctcttgtgttttctctctcccccgcttttttttatttgtgtggatattcccctccgttatttgtgtgccgcggtgcttctcctgggtatctctttttgtctactgttctaccttgacccttgtggtgccccctcgtcgtcactactcttgttttctataaacctttttctcggtcccctctttctcgccaaacaattttttttttttttctttttttttttttttttttcacattgtaaaatatagtttacttcaaaagatgatcctgaagatcccatcacagagtgtttaagggatgattataaacttttagcccttaagagagaatatatatactcaactgagtactgtctttcaaagcagtccctgtcagtttgtccattgattccatagcagctctcactgcccaccctgcttgagaagcctcttggagttgcctagagagtctatagcactcatctgaaggccctccatgagaacaactcttctcttccacatagatatttttgcatcagcccaaagctatttggacacaagtttggtgaacacggtaagaaaaaaacaaaccaagcaacaaaaacaaaaagcaggcagtgctgtgttagactgaaagtaaaagataaaaactctaagaacctatgaagcgccagggcagtgctggttgctttcacccatatggtctcctttggtgttctgctggtgcttatgaagcagtatccctactgacaatgaccctagcttaagagggctgagaactgctgaaagtgaagctgtttataaatggtacagtcaggaccgacagacacatgggtgtggtatgactgcaaagtacctgtggaattcagatgggattaccatccccactataaagggcaatatgatctgttgcaggagggtttatagggtacttagttacacaggtcacactgatccccttttcctctttttttctatgcaagtatctatttgtctatatgtctgtctaccttggtaggttgggctccttgaagaagggttatgttttcttcatctccatatccccagtagctggccaatgcccagtatacaccaggggctcagtcgctgtttgtcttattttcttgttgactctactctgacttaggacatatcactttcctctcttgaccttcacattcagatgtgttaataaaagtggataaagaccactctagctttaaaacaccctccaatatagagagaactctgaaaccagaagcagaagctgaggaatggtgaatagagcattttccctcacacgatgggtatcagggtggtttcttgtcctttcaatgcctctgcagaacttgaccctagtttttcaaattggactcaagaatgatcttagtgttggtggttttgtggttttctttgagactttgttattgacagaacagcttctggaaatctttttcaccgggagtatgggggcttctttggccaaaccgtgcgcgtgcaggctccatgtgctgggcagcagctgtccggccacagcctgtcggttgcatcctgctcctctacagaggtttctggcggcgctggccaaggcctgcttcggcggcaacatcgagctcttcgtcttcttcaacggcgcgctcgagaaggcccggctgcacgagtgggtcaagcggcagggcaacgagcgccagacggcacagcagatcgtcagccatgtccagaacaagggcaccccgccgccaaaggtctggttcctgccgcccgtctgcatggcccactgcatccgcctggcgctcatccgcttccacgtcaaggttgcacagagcattgaggatcaccatcaggaagtgattggtttctgcagagagaatggtttccatggcttggttgcgtatgactctgattatgcactgtgcaacatcccctactatttcagtgcccatgccctaaaactgagccggaacgggaaaagtctcaccacaagccaatatctgatgcatgaagttgccaagcaactggacctgaatccaaatcgttttcctatttttgctgctctcttaggaaatcacattctgcctgatgaagatctggcttcctttcattggagtttacttggtccagaacatccactagcctcactaaaggtccgggcccaccagctggtcttgccaccttgcgacgtagtgatcaaagccgttgctgactatgtacgcaacattcaggacacctctgacttggatgccatagctaaagatgttttccagcattcacagtctagaacagatgacaaagttattcgatttaagagagcaattggatattattcagcgactagtaagcctatgtcatttcatccaccacattacttagcagccagacccggtccgtttggaatgcctgggatggtgccgccgcatgttcctcctcagatgctcaacattccgcagacctctctgcaagcaaagcccgtggccccacaggtgcccagcccagggggcgccccgggccagggtccatacccgtacagcctctctgagccagcacctctcactttggacacgagcgggaagaatctgacggagcagaacagctacagcaacattcctcacgaagggaagcacacgccgctgtatgagcggtcctcgcccatcaacccggcccagagcggcagccccaaccacgtggattccgcctacttccctggctcttctacatcgtcatcttccgacaacgacgagggcagcggaggggcgacaaaccatatcagcgggaacaagattggctgggagaagacgggaagccactcagagcctcaggcacgaggagacccaggagaccaaacaaaggcagaaggctcgtccactgcctcttcaggaagccaactagccgaaggcaagggaagccagatgggcactgtccagccaatcccgtgcctcctgtcgatgcccaccaggaaccacatggacatcaccacacctcccctgccccccgtcgcacctgaggtgctgagagtggccgagcacaggcacaagaaggggctgatgtacccctacatcttccatgtcctgacgaaggttcaacataaattataaaggggtgaaatcaaaattgctgtttctattgaagatgaagccaacaaggacctgcctccggccgctctgctctataggccagttcgtcagtatgtttacggagtcctgtttagtttggcagaaagcagaaagaaaactgagagacttgcttttagaaagaacagacttccaccagaattttcaccagtgatcattaaagaatgggcagcttacaaaggaaagtctcctcaaaccccggaactggttgaagctcttgccttcagggagtggacctgccccaacctgaagaggctgtggttgggtaaggcggtagaggacaagaaccgcaggatgagggccttcctggcctgcatgaggtcggacaccccagccatgctcaaccctgccaacgtgcccactcacctcatggtgctctgctgcgtcttacggtacatggtgcagtggccgggagcacgcatccttcggcgtcaggagctagatgccttcctggctcaggcgctgtcccccaaactctacgagcctgatcagctccaggagctcaagattgagaacctagatccccgaggaattcagctatcagctctcttcatgagtggagtagacatggccttgtttgcaaatgatgcatgcggacagccaatcccctgggaacactgttgtccttggatgtattttgatgggaagctcttccaatccaaactcctcaaagccagccgggaaaagaccccactcattgacctctgtgatggtcaggctgatcaggctgccaaggtagagaagatgcgccagagcgtcctcgaggggctcagcttctccaggcagagccacacgctccctttcccgccgccacctgccctgcccttctaccctgcctctgcgtacccccggcactttgggcctgtcccaccctctcagggcaggggcagaggctttgcaggcgtctgtggctttggaggcccctatggggaaacggtagcaacaggcccttaccgtgccttccgtgtggcggcagcatcgggacactgcggagccttctcaggcagtgacagcagcaggactagcaagtcccagggcggagtccaacctataccttctcagggaggcaaactagaaatagctggcactgtggttggccattgggctgggagcaggcggggccgtgggggccgggggcctttccccctgcaggtggtttctgtcggaggaccagctagagggcgtccaagaggagttatttccaccccagtgattagaacatttggaagaggtggaaggtactatggcagaggttacaaaaaccaggcagcaattcagggcagacctccttatgctgcttcagcagaagaagtggccaaagaacttaagtcaaaatctggggaatcgaagtcctctgctatgtcttcagacgggtccctggctgaaaacggagtgatggccgaggagaagccggctccccagatgaacgggagcacgggtgacgccagggcccccagccactctgaaagtgccttgaataatgactctaaaacgtgcaatacaaatcctcatttaaatgcactaagtacagacagcgcttgccgcagagaagctgctctggaggcagctgtcttaaataaagaagagtaaacttattttttatagagggtgaaggatgctggaagggtaaggatttaggaatatctggagagaaagagagcctgcagttatgtacattttgtcctttccgtaagagaaaaatgaggactttggaaattcagatccctctttgatatcagagatttaaacaacacatttttagttttaaccagttgtagtcaaaatgctacaataaaacaaaaaagagaaagaaaatgaagagcatttgactcccgcacttaaaatgaagtacacataaagtttaaactggttatgacaaaagcctatagttgtgtttcttgaactataaagaaaacaaattttggcagtctttaagtatatatagcttaaaatataatttttagcatttggcaccatatgtatgccattatatttgattttgcattactgtttcacaatgaagctttctttaaggctttgatttttatgattatgaaagaaataaggcacaaccacagtttttctttcttaaatttcatcactgttgatgtggttcttttgtgttaaaaaaaaaaagtgcaactatcaaaactaaaaaattatagagtaatattgccgttctgctgattttaaatatacaatacatcatacatactttacaagcaagttaaatggagataaagttgaaatcatagaagatgcaaatgacctttcaaaatcaacacaatgtgttctgaaactttcgtgactaataccatgcatctgtgatcaatgaactatgtggttttgaatcggatgtagaccattagtactactacttgagctaaacttctgcatggttcataatttttaaagtgtgtagttaatatgcatgttatcgtcctttcttccattcttaacagtatgtgcccatttgcaaaacaaaaatgctaataatcagtaatagtcctataaaagatgttaactctgtttagtcattgactgatcttgctctaaccttaaaattttgtgattattgacctctgttgcatttattctaaagccccccaaaaattatctagccgtttcgaatatcaacattaccctggtgtattcactgctgtatgcattattgttctttgttgctgttttatgccttcatattagcaaatatgaaattctgtgaaaaaaaaccctttgatcttaaaaaaaaaaaaaccaccccccccttctgtagcaggaaacaaattgcttgttcttgagaactttcccatcaagaatttagtagaagcaggtatacttctatcattttgatgtttttgttaatgtttccaaacaatgtactttgaaatcagaatcacttcttatcgttttcatatacttctgatgctcttcatcacattagtgatcagaaatgaggtgtaattccccaacccctgcccgcaagagctaagtaggatcttactgtaagttgaagggagttttgccctaactcatggattgtgcaagaatgaactgctgttgggtttgattgactgtcgatggattgtggtgtggtgtatctgaaggctattgaatgcaacttacaatgcttaataaaaatctttattcttttaggtataaaaaaaaaaaaaaaaaaaaaaaaaaaaagaagaaagcagaaaagaagcagaaaaagcaaagaggaaaaagaaaaagaaaaagagcagaaagaatgaaacaggaagaaacagagaaggaaagaaaaggaggcaagcagaagaacaagaacaagaagacacaatgt

SEQ ID NO: 306951 - DNA, 6744 bp, Homo sapiens
atttgttcgttcttctgttttcctctttttgttcgttctttttgtttcttcttgctgtcgcgtgtctgcttctcgtcctgttcttctcctgcgtctgctcgggcttattttataatccttgtctctcctttgtccctccggttgtgtatactgtcccgctgtttgttctctcccgtggttcccttctttcgagattttggtttctcacaatcctgctcttgtgttttctctctcccccgcttttttttatttgtgtggatattcccctccgttatttgtgtgccgcggtgcttctcctgggtatctctttttgtctactgttctaccttgacccttgtggtgccccctcgtcgtcactactcttgttttctataaacctttttctcggtcccctctttctcgccaaacaattttttttttttttctttttttttttttttttttcacattgtaaaatatagtttacttcaaaagatgatcctgaagatcccatcacagagtgtttaagggatgattataaacttttagcccttaagagagaatatatatactcaactgagtactgtctttcaaagcagtccctgtcagtttgtccattgattccatagcagctctcactgcccaccctgcttgagaagcctcttggagttgcctagagagtctatagcactcatctgaaggccctccatgagaacaactcttctcttccacatagatatttttgcatcagcccaaagctatttggacacaagtttggtgaacacggtaagaaaaaaacaaaccaagcaacaaaaacaaaaagcaggcagtgctgtgttagactgaaagtaaaagataaaaactctaagaacctatgaagcgccagggcagtgctggttgctttcacccatatggtctcctttggtgttctgctggtgcttatgaagcagtatccctactgacaatgaccctagcttaagagggctgagaactgctgaaagtgaagctgtttataaatggtacagtcaggaccgacagacacatgggtgtggtatgactgcaaagtacctgtggaattcagatgggattaccatccccactataaagggcaatatgatctgttgcaggagggtttatagggtacttagttacacaggtcacactgatccccttttcctctttttttctatgcaagtatctatttgtctatatgtctgtctaccttggtaggttgggctccttgaagaagggttatgttttcttcatctccatatccccagtagctggccaatgcccagtatacaccaggggctcagtcgctgtttgtcttattttcttgttgactctactctgacttaggacatatcactttcctctcttgaccttcacattcagatgtgttaataaaagtggataaagaccactctagctttaaaacaccctccaatatagagagaactctgaaaccagaagcagaagctgaggaatggtgaatagagcattttccctcacacgatgggtatcagggtggtttcttgtcctttcaatgcctctgcagaacttgaccctagtttttcaaattggactcaagaatgatcttagtgttggtggttttgtggttttctttgagactttgttattgacagaacagcttctggaaatctgtaatcccagctactccagaggctgaggcaggagatcacttgaacctgggagagggaggttgcagtgagctgagaacacatcattgtactccagcctgggcaacagagcaagactccatctttttcaccgggagtatgggggcttctttggccaaaccgtgcgcgtgcaggctccatgtgctgggcagcagctgtccggccacagcctgtcggttgcatcctgctcctctacagaggtttctggcggcgctggccaaggcctgcttcggcggcaacatcgagctcttcgtcttcttcaacggcgcgctcgagaaggcccggctgcacgagtgggtcaagcggcagggcaacgagcgccagacggcacagcagatcgtcagccatgtccagaacaagggcaccccgccgccaaaggtctggttcctgccgcccgtctgcatggcccactgcatccgcctggcgctcatccgcttccacgtcaaggttgcacagagcattgaggatcaccatcaggaagtgattggtttctgcagagagaatggtttccatggcttggttgcgtatgactctgattatgcactgtgcaacatcccctactatttcagtgcccatgccctaaaactgagccggaacgggaaaagtctcaccacaagccaatatctgatgcatgaagttgccaagcaactggacctgaatccaaatcgttttcctatttttgctgctctcttaggaaatcacattctgcctgatgaagatctggcttcctttcattggagtttacttggtccagaacatccactagcctcactaaaggtccgggcccaccagctggtcttgccaccttgcgacgtagtgatcaaagccgttgctgactatgtacgcaacattcaggacacctctgacttggatgccatagctaaagatgttttccagcattcacagtctagaacagatgacaaagttattcgatttaagagagcaattggatattattcagcgactagtaagcctatgtcatttcatccaccacattacttagcagccagacccggtccgtttggaatgcctgggatggtgccgccgcatgttcctcctcagatgctcaacattccgcagacctctctgcaagcaaagcccgtggccccacaggtgcccagcccagggggcgccccgggccagggtccatacccgtacagcctctctgagccagcacctctcactttggacacgagcgggaagaatctgacggagcagaacagctacagcaacattcctcacgaagggaagcacacgccgctgtatgagcggtcctcgcccatcaacccggcccagagcggcagccccaaccacgtggattccgcctacttccctggctcttctacatcgtcatcttccgacaacgacgagggcagcggaggggcgacaaaccatatcagcgggaacaagattggctgggagaagacgggaagccactcagagcctcaggcacgaggagacccaggagaccaaacaaaggcagaaggctcgtccactgcctcttcaggaagccaactagccgaaggcaagggaagccagatgggcactgtccagccaatcccgtgcctcctgtcgatgcccaccaggaaccacatggacatcaccacacctcccctgccccccgtcgcacctgaggtgctgagagtggccgagcacaggcacaagaaggggctgatgtacccctacatcttccatgtcctgacgaagggtgaaatcaaaattgctgtttctattgaagatgaagccaacaaggacctgcctccggccgctctgctctataggccagttcgtcagtatgtttacggagtcctgtttagtttggcagaaagcagaaagaaaactgagagacttgcttttagaaagaacagacttccaccagaattttcaccagtgatcattaaagaatgggcagcttacaaaggaaagtctcctcaaaccccggaactggttgaagctcttgccttcagggagtggacctgccccaacctgaagaggctgtggttgggtaaggcggtagaggacaagaaccgcaggatgagggccttcctggcctgcatgaggtcggacaccccagccatgctcaaccctgccaacgtgcccactcacctcatggtgctctgctgcgtcttacggtacatggtgcagtggccgggagcacgcatccttcggcgtcaggagctagatgccttcctggctcaggcgctgtcccccaaactctacgagcctgatcagctccaggagctcaagattgagaacctagatccccgaggaattcagctatcagctctcttcatgagtggagtagacatggccttgtttgcaaatgatgcatgcggacagccaatcccctgggaacactgttgtccttggatgtattttgatgggaagctcttccaatccaaactcctcaaagccagccgggaaaagaccccactcattgacctctgtgatggtcaggctgatcaggctgccaaggtagagaagatgcgccagagcgtcctcgaggggctcagcttctccaggcagagccacacgctccctttcccgccgccacctgccctgcccttctaccctgcctctgcgtacccccggcactttgggcctgtcccaccctctcagggcaggggcagaggctttgcaggcgtctgtggctttggaggcccctatggggaaacggtagcaacaggcccttaccgtgccttccgtgtggcggcagcatcgggacactgcggagccttctcaggcagtgacagcagcaggactagcaagtcccagggcggagtccaacctataccttctcagggaggcaaactagaaatagctggcactgtggttggccattgggctgggagcaggcggggccgtgggggccgggggcctttccccctgcaggtggtttctgtcggaggaccagctagagggcgtccaagaggagttatttccaccccagtgattagaacatttggaagaggtggaaggtactatggcagaggttacaaaaaccaggcagcaattcagggcagacctccttatgctgcttcagcagaagaagtggccaaagaacttaagtcaaaatctggggaatcgaagtcctctgctatgtcttcagacgggtccctggctgaaaacggagtgatggccgaggagaagccggctccccagatgaacgggagcacgggtgacgccagggcccccagccactctgaaagtgccttgaataatgactctaaaacgtgcaatacaaatcctcatttaaatgcactaagtacagacagcgcttgccgcagagaagctgctctggaggcagctgtcttaaataaagaagagtaaacttattttttatagagggtgaaggatgctggaagggtaaggatttaggaatatctggagagaaagagagcctgcagttatgtacattttgtcctttccgtaagagaaaaatgaggactttggaaattcagatccctctttgatatcagagatttaaacaacacatttttagttttaaccagttgtagtcaaaatgctacaataaaacaaaaaagagaaagaaaatgaagagcatttgactcccgcacttaaaatgaagtacacataaagtttaaactggttatgacaaaagcctatagttgtgtttcttgaactataaagaaaacaaattttggcagtctttaagtatatatagcttaaaatataatttttagcatttggcaccatatgtatgccattatatttgattttgcattactgtttcacaatgaagctttctttaaggctttgatttttatgattatgaaagaaataaggcacaaccacagtttttctttcttaaatttcatcactgttgatgtggttcttttgtgttaaaaaaaaaaagtgcaactatcaaaactaaaaaattatagagtaatattgccgttctgctgattttaaatatacaatacatcatacatactttacaagcaagttaaatggagataaagttgaaatcatagaagatgcaaatgacctttcaaaatcaacacaatgtgttctgaaactttcgtgactaataccatgcatctgtgatcaatgaactatgtggttttgaatcggatgtagaccattagtactactacttgagctaaacttctgcatggttcataatttttaaagtgtgtagttaatatgcatgttatcgtcctttcttccattcttaacagtatgtgcccatttgcaaaacaaaaatgctaataatcagtaatagtcctataaaagatgttaactctgtttagtcattgactgatcttgctctaaccttaaaattttgtgattattgacctctgttgcatttattctaaagccccccaaaaattatctagccgtttcgaatatcaacattaccctggtgtattcactgctgtatgcattattgttctttgttgctgttttatgccttcatattagcaaatatgaaattctgtgaaaaaaaaccctttgatcttaaaaaaaaaaaaaccaccccccccttctgtagcaggaaacaaattgcttgttcttgagaactttcccatcaagaatttagtagaagcaggtatacttctatcattttgatgtttttgttaatgtttccaaacaatgtactttgaaatcagaatcacttcttatcgttttcatatacttctgatgctcttcatcacattagtgatcagaaatgaggtgtaattccccaacccctgcccgcaagagctaagtaggatcttactgtaagttgaagggagttttgccctaactcatggattgtgcaagaatgaactgctgttgggtttgattgactgtcgatggattgtggtgtggtgtatctgaaggctattgaatgcaacttacaatgcttaataaaaatctttattcttttaggtataaaaaaaaaaaaaaaaaaaaaaaaaaaaagaagaaagcagaaaagaagcagaaaaagcaaagaggaaaaagaaaaagaaaaagagcagaaagaatgaaacaggaagaaacagagaaggaaagaaaaggaggcaagcagaagaacaagaacaagaagacacaatgt

SEQ ID NO: 306952 - DNA, 6485 bp, Homo sapiens
atttgttcgttcttctgttttcctctttttgttcgttctttttgtttcttcttgctgtcgcgtgtctgcttctcgtcctgttcttctcctgcgtctgctcgggcttattttataatccttgtctctcctttgtccctccggttgtgtatactgtcccgctgtttgttctctcccgtggttcccttctttcgagattttggtttctcacaatcctgctcttgtgttttctctctcccccgcttttttttatttgtgtggatattcccctccgttatttgtgtgccgcggtgcttctcctgggtatctctttttgtctactgttctaccttgacccttgtggtgccccctcgtcgtcactactcttgttttctataaacctttttctcggtcccctctttctcgccaaacaattttttttttttttctttttttttttttttttttcacattgtaaaatatagtttacttcaaaagatgatcctgaagatcccatcacagagtgtttaagggatgattataaacttttagcccttaagagagaatatatatactcaactgagtactgtctttcaaagcagtccctgtcagtttgtccattgattccatagcagctctcactgcccaccctgcttgagaagcctcttggagttgcctagagagtctatagcactcatctgaaggccctccatgagaacaactcttctcttccacatagatatttttgcatcagcccaaagctatttggacacaagtttggtgaacacggtaagaaaaaaacaaaccaagcaacaaaaacaaaaagcaggcagtgctgtgttagactgaaagtaaaagataaaaactctaagaacctatgaagcgccagggcagtgctggttgctttcacccatatggtctcctttggtgttctgctggtgcttatgaagcagtatccctactgacaatgaccctagcttaagagggctgagaactgctgaaagtgaagctgtttataaatggtacagtcaggaccgacagacacatgggtgtggtatgactgcaaagtacctgtggaattcagatgggattaccatccccactataaagggcaatatgatctgttgcaggagggtttatagggtacttagttacacaggtcacactgatccccttttcctctttttttctatgcaagtatctatttgtctatatgtctgtctaccttggtaggttgggctccttgaagaagggttatgttttcttcatctccatatccccagtagctggccaatgcccagtatacaccaggggctcagtcgctgtttgtcttattttcttgttgactctactctgacttaggacatatcactttcctctcttgaccttcacattcagatgtgttaataaaagtggataaagaccactctagctttaaaacaccctccaatatagagagaactctgaaaccagaagcagaagctgaggaatggtgaatagagcattttccctcacacgatgggtatcagggtggtttcttgtcctttcaatgcctctgcagaacttgaccctagtttttcaaattggactcaagaatgatcttagtgttggtggttttgtggttttctttgagactttgttattgacagaacagcttctggaaatctttttcaccgggagtatgggggcttctttggccaaaccgtgcgcgtgcaggctccatgtgctgggcagcagctgtccggccacagcctgtcggttgcatcctgctcctctacagaggtttctggcggcgctggccaaggcctgcttcggcggcaacatcgagctcttcgtcttcttcaacggcgcgctcgagaaggcccggctgcacgagtgggtcaagcggcagggcaacgagcgccagacggcacagcagatcgtcagccatgtccagaacaagggcaccccgccgccaaaggtctggttcctgccgcccgtctgcatggcccactgcatccgcctggcgctcatccgcttccacgtcaaggttgcacagagcattgaggatcaccatcaggaagtgattggtttctgcagagagaatggtttccatggcttggttgcgtatgactctgattatgcactgtgcaacatcccctactatttcagtgcccatgccctaaaactgagccggaacgggaaaagtctcaccacaagccaatatctgatgcatgaagttgccaagcaactggacctgaatccaaatcgttttcctatttttgctgctctcttaggaaatcacattctgcctgatgaagatctggcttcctttcattggagtttacttggtccagaacatccactagcctcactaaaggtccgggcccaccagctggtcttgccaccttgcgacgtagtgatcaaagccgttgctgactatgtacgcaacattcaggacacctctgacttggatgccatagctaaagatgttttccagcattcacagtctagaacagatgacaaagttattcgatttaagagagcaattggatattattcagcgactagtaagcctatgtcatttcatccaccacattacttagcagccagacccggtccgtttggaatgcctgggatggtgccgccgcatgttcctcctcagatgctcaacattccgcagacctctctgcaagcaaagcccgtggccccacaggtgcccagcccagggggcgccccgggccagggtccatacccgtacagcctctctgagccagcacctctcactttggacacgagcgggaagaatctgacggagcagaacagctacagcaacattcctcacgaagggaagcacacgccgctgtatgagcggtcctcgcccatcaacccggcccagagcggcagccccaaccacgtggattccgcctacttccctggctcttctacatcgtcatcttccgacaacgacgagggcagcggaggggcgacaaaccatatcagcgggaacaagattggctgggagaagacgggaagccactcagagcctcaggcacgaggagacccaggagaccaaacaaaggcagaaggctcgtccactgcctcttcaggaagccaactagccgaaggcaagggaagccagatgggcactgtccagccaatcccgtgcctcctgtcgatgcccaccaggaaccacatggacatcaccacacctcccctgccccccgtcgcacctgaggtgctgagagtggccgagcacaggcacaagaaggggctgatgtacccctacatcttccatgtcctgacgaagggtgaaatcaaaattgctgtttctattgaagatgaagccaacaaggacctgcctccggccgctctgctctataggccagttcgtcagtatgtttacggagtcctgtttagtttggcagaaagcagaaagaaaactgagagacttgcttttagaaagaacagacttccaccagaattttcaccagtgatcattaaagaatgggcagcttacaaaggaaagtctcctcaaaccccggaactggttgaagctcttgccttcagggagtggacctgccccaacctgaagaggctgtggttgggtaaggcggtagaggacaagaaccgcaggatgagggccttcctggcctgcatgaggtcggacaccccagccatgctcaaccctgccaacgtgcccactcacctcatggtgctctgctgcgtcttacggtacatggtgcagtggccgggagcacgcatccttcggcgtcaggagctagatgccttcctggctcaggcgctgtcccccaaactctacgagcctgatcagctccaggagctcaagattgagaacctagatccccgaggaattcagctatcagctctcttcatgagtggagtagacatggccttgtttgcaaatgatgcatgcggacagccaatcccctgggaacactgttgtccttggatgtattttgatgggaagctcttccaatccaaactcctcaaagccagccgggaaaagaccccactcattgacctctgtgatggtcaggctgatcaggctgccaaggtagagaagatgcgccagagcgtcctcgaggggctcagcttctccaggcagagccacacgctccctttcccgccgccacctgccctgcccttctaccctgcctctgcgtacccccggcactttgggcctgtcccaccctctcagggcaggggcagaggctttgcaggagtccaacctataccttctcagggaggcaaactagaaatagctggcactgtggttggccattgggctgggagcaggcggggccgtgggggccgggggcctttccccctgcaggtggtttctgtcggaggaccagctagagggcgtccaagaggagttatttccaccccagtgattagaacatttggaagaggtggaaggtactatggcagaggttacaaaaaccaggcagcaattcagggcagacctccttatgctgcttcagcagaagaagtggccaaagaacttaagtcaaaatctggggaatcgaagtcctctgctatgtcttcagacgggtccctggctgaaaacggagtgatggccgaggagaagccggctccccagatgaacgggagcacgggtgacgccagggcccccagccactctgaaagtgccttgaataatgactctaaaacgtgcaatacaaatcctcatttaaatgcactaagtacagacagcgcttgccgcagagaagctgctctggaggcagctgtcttaaataaagaagagtaaacttattttttatagagggtgaaggatgctggaagggtaaggatttaggaatatctggagagaaagagagcctgcagttatgtacattttgtcctttccgtaagagaaaaatgaggactttggaaattcagatccctctttgatatcagagatttaaacaacacatttttagttttaaccagttgtagtcaaaatgctacaataaaacaaaaaagagaaagaaaatgaagagcatttgactcccgcacttaaaatgaagtacacataaagtttaaactggttatgacaaaagcctatagttgtgtttcttgaactataaagaaaacaaattttggcagtctttaagtatatatagcttaaaatataatttttagcatttggcaccatatgtatgccattatatttgattttgcattactgtttcacaatgaagctttctttaaggctttgatttttatgattatgaaagaaataaggcacaaccacagtttttctttcttaaatttcatcactgttgatgtggttcttttgtgttaaaaaaaaaaagtgcaactatcaaaactaaaaaattatagagtaatattgccgttctgctgattttaaatatacaatacatcatacatactttacaagcaagttaaatggagataaagttgaaatcatagaagatgcaaatgacctttcaaaatcaacacaatgtgttctgaaactttcgtgactaataccatgcatctgtgatcaatgaactatgtggttttgaatcggatgtagaccattagtactactacttgagctaaacttctgcatggttcataatttttaaagtgtgtagttaatatgcatgttatcgtcctttcttccattcttaacagtatgtgcccatttgcaaaacaaaaatgctaataatcagtaatagtcctataaaagatgttaactctgtttagtcattgactgatcttgctctaaccttaaaattttgtgattattgacctctgttgcatttattctaaagccccccaaaaattatctagccgtttcgaatatcaacattaccctggtgtattcactgctgtatgcattattgttctttgttgctgttttatgccttcatattagcaaatatgaaattctgtgaaaaaaaaccctttgatcttaaaaaaaaaaaaaccaccccccccttctgtagcaggaaacaaattgcttgttcttgagaactttcccatcaagaatttagtagaagcaggtatacttctatcattttgatgtttttgttaatgtttccaaacaatgtactttgaaatcagaatcacttcttatcgttttcatatacttctgatgctcttcatcacattagtgatcagaaatgaggtgtaattccccaacccctgcccgcaagagctaagtaggatcttactgtaagttgaagggagttttgccctaactcatggattgtgcaagaatgaactgctgttgggtttgattgactgtcgatggattgtggtgtggtgtatctgaaggctattgaatgcaacttacaatgcttaataaaaatctttattcttttaggtataaaaaaaaaaaaaaaaaaaaaaaaaaaaagaagaaagcagaaaagaagcagaaaaagcaaagaggaaaaagaaaaagaaaaagagcagaaagaatgaaacaggaagaaacagagaaggaaagaaaaggaggcaagcagaagaacaagaacaagaagacacaatgt

SEQ ID NO: 306953 - DNA, 7073 bp, Homo sapiens
tgagacaaggcctcactctgttgcccaggctggagtgcaagtggtgtaatctgggctcactccaacctccaccaccttggctcaagtagtcttcccacctcagcctcctgagaagatgggactacaggtgcacacctcacctggctaatttttggattttttgtagacaatgggtttcatcatgttgcctcaagaaaaataacatcatggtaatactaagtcttttatcagtgacatgtaactgattttaaaatattatatagtgcttcctagtttaaccaaactggaggcatgttttatatgatgggctgatgtctcatgaataactgtgccaaaatcctcacttctgagtgcactgatgcagtagatggatgtctcagatccctcagctcccagattgggccaactctccttataccaccacacctgggacctgggaggaatggggaaggggactttatagggcagagctttcccagactcttgttccaccctaaggataaagtattacagtaactttcttcctgccttccagaggcactttcattcttcctggagctctcgtcaaccctgacctcttcctttgtcagcaaggtcaaacgcctgagccacaagtcttagctgtttccagaagggtgattgtgtgctcccacctatatctgaggtcctagactcctcagaggaagtcagcttcatgtgatctaggttactcaagcctggggctagtgttttcatattctggtatgagagacttgcttcctctggaaagatctttatggtttacacaaatgtaacagaccacttaacaatagctagtctctaaaatgtacatcttaaaatggctttatacttacgggaattcctaattaaaaaaaaaactcacttgatttatatcacattgtaaaatatagtttacttcaaaagatgatcctgaagatcccatcacagagtgtttaagggatgattataaacttttagcccttaagagagaatatatatactcaactgagtactgtctttcaaagcagtccctgtcagtttgtccattgattccatagcagctctcactgcccaccctgcttgagaagcctcttggagttgcctagagagtctatagcactcatctgaaggccctccatgagaacaactcttctcttccacatagatatttttgcatcagcccaaagctatttggacacaagtttggtgaacacggtaagaaaaaaacaaaccaagcaacaaaaacaaaaagcaggcagtgctgtgttagactgaaagtaaaagataaaaactctaagaacctatgaagcgccagggcagtgctggttgctttcacccatatggtctcctttggtgttctgctggtgcttatgaagcagtatccctactgacaatgaccctagcttaagagggctgagaactgctgaaagtgaagctgtttataaatggtacagtcaggaccgacagacacatgggtgtggtatgactgcaaagtacctgtggaattcagatgggattaccatccccactataaagggcaatatgatctgttgcaggagggtttatagggtacttagttacacaggtcacactgatccccttttcctctttttttctatgcaagtatctatttgtctatatgtctgtctaccttggtaggttgggctccttgaagaagggttatgttttcttcatctccatatccccagtagctggccaatgcccagtatacaccaggggctcagtcgctgtttgtcttattttcttgttgactctactctgacttaggacatatcactttcctctcttgaccttcacattcagatgtgttaataaaagtggataaagaccactctagctttaaaacaccctccaatatagagagaactctgaaaccagaagcagaagctgaggaatggtgaatagagcattttccctcacacgatgggtatcagggtggtttcttgtcctttcaatgcctctgcagaacttgaccctagtttttcaaattggactcaagaatgatcttagtgttggtggttttgtggttttctttgagactttgttattgacagaacagcttctggaaatctttttcaccgggagtatgggggcttctttggccaaaccgtgcgcgtgcaggctccatgtgctgggcagcagctgtccggccacagcctgtcggttgcatcctgctcctctacagaggtttctggcggcgctggccaaggcctgcttcggcggcaacatcgagctcttcgtcttcttcaacggcgcgctcgagaaggcccggctgcacgagtgggtcaagcggcagggcaacgagcgccagacggcacagcagatcgtcagccatgtccagaacaagggcaccccgccgccaaaggtctggttcctgccgcccgtctgcatggcccactgcatccgcctggcgctcatccgcttccacgtcaaggttgcacagagcattgaggatcaccatcaggaagtgattggtttctgcagagagaatggtttccatggcttggttgcgtatgactctgattatgcactgtgcaacatcccctactatttcagtgcccatgccctaaaactgagccggaacgggaaaagtctcaccacaagccaatatctgatgcatgaagttgccaagcaactggacctgaatccaaatcgttttcctatttttgctgctctcttaggaaatcacattctgcctgatgaagatctggcttcctttcattggagtttacttggtccagaacatccactagcctcactaaaggtccgggcccaccagctggtcttgccaccttgcgacgtagtgatcaaagccgttgctgactatgtacgcaacattcaggacacctctgacttggatgccatagctaaagatgttttccagcattcacagtctagaacagatgacaaagttattcgatttaagagagcaattggatattattcagcgactagtaagcctatgtcatttcatccaccacattacttagcagccagacccggtccgtttggaatgcctgggatggtgccgccgcatgttcctcctcagatgctcaacattccgcagacctctctgcaagcaaagcccgtggccccacaggtgcccagcccagggggcgccccgggccagggtccatacccgtacagcctctctgagccagcacctctcactttggacacgagcgggaagaatctgacggagcagaacagctacagcaacattcctcacgaagggaagcacacgccgctgtatgagcggtcctcgcccatcaacccggcccagagcggcagccccaaccacgtggattccgcctacttccctggctcttctacatcgtcatcttccgacaacgacgagggcagcggaggggcgacaaaccatatcagcgggaacaagattggctgggagaagacgggaagccactcagagcctcaggcacgaggagacccaggagaccaaacaaaggcagaaggctcgtccactgcctcttcaggaagccaactagccgaaggcaagggaagccagatgggcactgtccagccaatcccgtgcctcctgtcgatgcccaccaggaaccacatggacatcaccacacctcccctgccccccgtcgcacctgaggtgctgagagtggccgagcacaggcacaagaaggggctgatgtacccctacatcttccatgtcctgacgaagggtgaaatcaaaattgctgtttctattgaagatgaagccaacaaggacctgcctccggccgctctgctctataggccagttcgtcagtatgtttacggagtcctgtttagtttggcagaaagcagaaagaaaactgagagacttgcttttagaaagaacagacttccaccagaattttcaccagtgatcattaaagaatgggcagcttacaaaggaaagtctcctcaaaccccggaactggttgaagctcttgccttcagggagtggacctgccccaacctgaagaggctgtggttgggtaaggcggtagaggacaagaaccgcaggatgagggccttcctggcctgcatgaggtcggacaccccagccatgctcaaccctgccaacgtgcccactcacctcatggtgctctgctgcgtcttacggtacatggtgcagtggccgggagcacgcatccttcggcgtcaggagctagatgccttcctggctcaggcgctgtcccccaaactctacgagcctgatcagctccaggagctcaagattgagaacctagatccccgaggaattcagctatcagctctcttcatgagtggagtagacatggccttgtttgcaaatgatgcatgcggacagccaatcccctgggaacactgttgtccttggatgtattttgatgggaagctcttccaatccaaactcctcaaagccagccgggaaaagaccccactcattgacctctgtgatggtcaggctgatcaggctgccaaggtagagaagatgcgccagagcgtcctcgaggggctcagcttctccaggcagagccacacgctccctttcccgccgccacctgccctgcccttctaccctgcctctgcgtacccccggcactttgggcctgtcccaccctctcagggcaggggcagaggctttgcaggcgtctgtggctttggaggcccctatggggaaacggtagcaacaggcccttaccgtgccttccgtgtggcggcagcatcgggacactgcggagccttctcaggcagtgacagcagcaggactagcaagtcccagggcggagtccaacctataccttctcagggaggcaaactagaaatagctggcactgtggttggccattgggctgggagcaggcggggccgtgggggccgggggcctttccccctgcaggtggtttctgtcggaggaccagctagagggcgtccaagaggagttatttccaccccagtgattagaacatttggaagaggtggaaggtactatggcagaggttacaaaaaccaggcagcaattcagggcagacctccttatgctgcttcagcagaagaagtggccaaagaacttaagtcaaaatctggggaatcgaagtcctctgctatgtcttcagacgggtccctggctgaaaacggagtgatggccgaggagaagccggctccccagatgaacgggagcacgggtgacgccagggcccccagccactctgaaagtgccttgaataatgactctaaaacgtgcaatacaaatcctcatttaaatgcactaagtacagacagcgcttgccgcagagaagctgctctggaggcagctgtcttaaataaagaagagtaaacttattttttatagagggtgaaggatgctggaagggtaaggatttaggaatatctggagagaaagagagcctgcagttatgtacattttgtcctttccgtaagagaaaaatgaggactttggaaattcagatccctctttgatatcagagatttaaacaacacatttttagttttaaccagttgtagtcaaaatgctacaataaaacaaaaaagagaaagaaaatgaagagcatttgactcccgcacttaaaatgaagtacacataaagtttaaactggttatgacaaaagcctatagttgtgtttcttgaactataaagaaaacaaattttggcagtctttaagtatatatagcttaaaatataatttttagcatttggcaccatatgtatgccattatatttgattttgcattactgtttcacaatgaagctttctttaaggctttgatttttatgattatgaaagaaataaggcacaaccacagtttttctttcttaaatttcatcactgttgatgtggttcttttgtgttaaaaaaaaaaagtgcaactatcaaaactaaaaaattatagagtaatattgccgttctgctgattttaaatatacaatacatcatacatactttacaagcaagttaaatggagataaagttgaaatcatagaagatgcaaatgacctttcaaaatcaacacaatgtgttctgaaactttcgtgactaataccatgcatctgtgatcaatgaactatgtggttttgaatcggatgtagaccattagtactactacttgagctaaacttctgcatggttcataatttttaaagtgtgtagttaatatgcatgttatcgtcctttcttccattcttaacagtatgtgcccatttgcaaaacaaaaatgctaataatcagtaatagtcctataaaagatgttaactctgtttagtcattgactgatcttgctctaaccttaaaattttgtgattattgacctctgttgcatttattctaaagccccccaaaaattatctagccgtttcgaatatcaacattaccctggtgtattcactgctgtatgcattattgttctttgttgctgttttatgccttcatattagcaaatatgaaattctgtgaaaaaaaaccctttgatcttaaaaaaaaaaaaaccaccccccccttctgtagcaggaaacaaattgcttgttcttgagaactttcccatcaagaatttagtagaagcaggtatacttctatcattttgatgtttttgttaatgtttccaaacaatgtactttgaaatcagaatcacttcttatcgttttcatatacttctgatgctcttcatcacattagtgatcagaaatgaggtgtaattccccaacccctgcccgcaagagctaagtaggatcttactgtaagttgaagggagttttgccctaactcatggattgtgcaagaatgaactgctgttgggtttgattgactgtcgatggattgtggtgtggtgtatctgaaggctattgaatgcaacttacaatgcttaataaaaatctttattcttttaggtataaaaaaaaaaaaaaaaaaaaaaaaaaaaagaagaaagcagaaaagaagcagaaaaagcaaagaggaaaaagaaaaagaaaaagagcagaaagaatgaaacaggaagaaacagagaaggaaagaaaaggaggcaagcagaagaacaagaacaagaagacacaatgt

SEQ ID NO: 306954 - DNA, 5155 bp, Homo sapiens
ccgcgcccgcgcccccgccgcccccatgggcgtgcagggcttccaggactacatcgagaagcactgcccgagcgccgtggtgccggtggagctgcagaagctggcccggggcagcctggtgggcggcgggcggcagcggcccccgcagaccccgctgcgcctgctggtggacgccgacaactgcctgcaccgcctctacggcggcttctacaccgactgggtcagcggcggccagtggaaccacatgcttggctacctggcggcgctggccaaggcctgcttcggcggcaacatcgagctcttcgtcttcttcaacggcgcgctcgagaaggcccggctgcacgagtgggtcaagcggcagggcaacgagcgccagacggcacagcagatcgtcagccatgtccagaacaagggcaccccgccgccaaaggtctggttcctgccgcccgtctgcatggcccactgcatccgcctggcgctcatccgcttccacgtcaaggttgcacagagcattgaggatcaccatcaggaagtgattggtttctgcagagagaatggtttccatggcttggttgcgtatgactctgattatgcactgtgcaacatcccctactatttcagtgcccatgccctaaaactgagccggaacgggaaaagtctcaccacaagccaatatctgatgcatgaagttgccaagcaactggacctgaatccaaatcgttttcctatttttgctgctctcttaggaaatcacattctgcctgatgaagatctggcttcctttcattggagtttacttggtccagaacatccactagcctcactaaaggtccgggcccaccagctggtcttgccaccttgcgacgtagtgatcaaagccgttgctgactatgtacgcaacattcaggacacctctgacttggatgccatagctaaagatgttttccagcattcacagtctagaacagatgacaaagttattcgatttaagagagcaattggatattattcagcgactagtaagcctatgtcatttcatccaccacattacttagcagccagacccggtccgtttggaatgcctgggatggtgccgccgcatgttcctcctcagatgctcaacattccgcagacctctctgcaagcaaagcccgtggccccacaggtgcccagcccagggggcgccccgggccagggtccatacccgtacagcctctctgagccagcacctctcactttggacacgagcgggaagaatctgacggagcagaacagctacagcaacattcctcacgaagggaagcacacgccgctgtatgagcggtcctcgcccatcaacccggcccagagcggcagccccaaccacgtggattccgcctacttccctggctcttctacatcgtcatcttccgacaacgacgagggcagcggaggggcgacaaaccatatcagcgggaacaagattggctgggagaagacgggaagccactcagagcctcaggcacgaggagacccaggagaccaaacaaaggcagaaggctcgtccactgcctcttcaggaagccaactagccgaaggcaagggaagccagatgggcactgtccagccaatcccgtgcctcctgtcgatgcccaccaggaaccacatggacatcaccacacctcccctgccccccgtcgcacctgaggtgctgagagtggccgagcacaggcacaagaaggggctgatgtacccctacatcttccatgtcctgacgaagggtgaaatcaaaattgctgtttctattgaagatgaagccaacaaggacctgcctccggccgctctgctctataggccagttcgtcagtatgtttacggagtcctgtttagtttggcagaaagcagaaagaaaactgagagacttgcttttagaaagaacagacttccaccagaattttcaccagtgatcattaaagaatgggcagcttacaaaggaaagtctcctcaaaccccggaactggttgaagctcttgccttcagggagtggacctgccccaacctgaagaggctgtggttgggtaaggcggtagaggacaagaaccgcaggatgagggccttcctggcctgcatgaggtcggacaccccagccatgctcaaccctgccaacgtgcccactcacctcatggtgctctgctgcgtcttacggtacatggtgcagtggccgggagcacgcatccttcggcgtcaggagctagatgccttcctggctcaggcgctgtcccccaaactctacgagcctgatcagctccaggagctcaagattgagaacctagatccccgaggaattcagctatcagctctcttcatgagtggagtagacatggccttgtttgcaaatgatgcatgcggacagccaatcccctgggaacactgttgtccttggatgtattttgatgggaagctcttccaatccaaactcctcaaagccagccgggaaaagaccccactcattgacctctgtgatggtcaggctgatcaggctgccaaggtagagaagatgcgccagagcgtcctcgaggggctcagcttctccaggcagagccacacgctccctttcccgccgccacctgccctgcccttctaccctgcctctgcgtacccccggcactttgggcctgtcccaccctctcagggcaggggcagaggctttgcaggcgtctgtggctttggaggcccctatggggaaacggtagcaacaggcccttaccgtgccttccgtgtggcggcagcatcgggacactgcggagccttctcaggcagtgacagcagcaggactagcaagtcccagggcggagtccaacctataccttctcagggaggcaaactagaaatagctggcactgtggttggccattgggctgggagcaggcggggccgtgggggccgggggcctttccccctgcaggtggtttctgtcggaggaccagctagagggcgtccaagaggagttatttccaccccagtgattagaacatttggaagaggtggaaggtactatggcagaggttacaaaaaccaggcagcaattcagggcagacctccttatgctgcttcagcagaagaagtggccaaagaacttaagtcaaaatctggggaatcgaagtcctctgctatgtcttcagacgggtccctggctgaaaacggagtgatggccgaggagaagccggctccccagatgaacgggagcacgggtgacgccagggcccccagccactctgaaagtgccttgaataatgactctaaaacgtgcaatacaaatcctcatttaaatgcactaagtacagacagcgcttgccgcagagaagctgctctggaggcagctgtcttaaataaagaagagtaaacttattttttatagagggtgaaggatgctggaagggtaaggatttaggaatatctggagagaaagagagcctgcagttatgtacattttgtcctttccgtaagagaaaaatgaggactttggaaattcagatccctctttgatatcagagatttaaacaacacatttttagttttaaccagttgtagtcaaaatgctacaataaaacaaaaaagagaaagaaaatgaagagcatttgactcccgcacttaaaatgaagtacacataaagtttaaactggttatgacaaaagcctatagttgtgtttcttgaactataaagaaaacaaattttggcagtctttaagtatatatagcttaaaatataatttttagcatttggcaccatatgtatgccattatatttgattttgcattactgtttcacaatgaagctttctttaaggctttgatttttatgattatgaaagaaataaggcacaaccacagtttttctttcttaaatttcatcactgttgatgtggttcttttgtgttaaaaaaaaaaagtgcaactatcaaaactaaaaaattatagagtaatattgccgttctgctgattttaaatatacaatacatcatacatactttacaagcaagttaaatggagataaagttgaaatcatagaagatgcaaatgacctttcaaaatcaacacaatgtgttctgaaactttcgtgactaataccatgcatctgtgatcaatgaactatgtggttttgaatcggatgtagaccattagtactactacttgagctaaacttctgcatggttcataatttttaaagtgtgtagttaatatgcatgttatcgtcctttcttccattcttaacagtatgtgcccatttgcaaaacaaaaatgctaataatcagtaatagtcctataaaagatgttaactctgtttagtcattgactgatcttgctctaaccttaaaattttgtgattattgacctctgttgcatttattctaaagccccccaaaaattatctagccgtttcgaatatcaacattaccctggtgtattcactgctgtatgcattattgttctttgttgctgttttatgccttcatattagcaaatatgaaattctgtgaaaaaaaaccctttgatcttaaaaaaaaaaaaaccaccccccccttctgtagcaggaaacaaattgcttgttcttgagaactttcccatcaagaatttagtagaagcaggtatacttctatcattttgatgtttttgttaatgtttccaaacaatgtactttgaaatcagaatcacttcttatcgttttcatatacttctgatgctcttcatcacattagtgatcagaaatgaggtgtaattccccaacccctgcccgcaagagctaagtaggatcttactgtaagttgaagggagttttgccctaactcatggattgtgcaagaatgaactgctgttgggtttgattgactgtcgatggattgtggtgtggtgtatctgaaggctattgaatgcaacttacaatgcttaataaaaatctaaactcctctttagtaaacacacaaaaaaacaaaaaaaaacaaaacacaacccaccacccacacaccaacacaacacaacacacaacaacacaagaaggagaacaggaagcggcgccgaggggaagggaacgacagaagggcggcaaagcgggaaccagagagcagagacgagggggggggggaggggcgtgagaggaggaggcgcggcacggacgggg

SEQ ID NO: 306955 - DNA, 4424 bp, Homo sapiens
ttctagagtatcccccgccgaagcattcactggctatttgagcatgcctcttagaaatcacattctgcctgatgaagatctggcttcctttcattggagtttacttggtccagaacatccactagcctcactaaaggtccgggcccaccagctggtcttgccaccttgcgacgtagtgatcaaagccgttgctgactatgtacgcaacattcaggacacctctgacttggatgccatagctaaagatgttttccagcattcacagtctagaacagatgacaaagttattcgatttaagagagcaattggatattattcagcgactagtaagcctatgtcatttcatccaccacattacttagcagccagacccggtccgtttggaatgcctgggatggtgccgccgcatgttcctcctcagatgctcaacattccgcagacctctctgcaagcaaagcccgtggccccacaggtgcccagcccagggggcgccccgggccagggtccatacccgtacagcctctctgagccagcacctctcactttggacacgagcgggaagaatctgacggagcagaacagctacagcaacattcctcacgaagggaagcacacgccgctgtatgagcggtcctcgcccatcaacccggcccagagcggcagccccaaccacgtggattccgcctacttccctggctcttctacatcgtcatcttccgacaacgacgagggcagcggaggggcgacaaaccatatcagcgggaacaagattggctgggagaagacgggaagccactcagagcctcaggcacgaggagacccaggagaccaaacaaaggcagaaggctcgtccactgcctcttcaggaagccaactagccgaaggcaagggaagccagatgggcactgtccagccaatcccgtgcctcctgtcgatgcccaccaggaaccacatggacatcaccacacctcccctgccccccgtcgcacctgaggtgctgagagtggccgagcacaggcacaagaaggggctgatgtacccctacatcttccatgtcctgacgaagggtgaaatcaaaattgctgtttctattgaagatgaagccaacaaggacctgcctccggccgctctgctctataggccagttcgtcagtatgtttacggagtcctgtttagtttggcagaaagcagaaagaaaactgagagacttgcttttagaaagaacagacttccaccagaattttcaccagtgatcattaaagaatgggcagcttacaaaggaaagtctcctcaaaccccggaactggttgaagctcttgccttcagggagtggacctgccccaacctgaagaggctgtggttgggtaaggcggtagaggacaagaaccgcaggatgagggccttcctggcctgcatgaggtcggacaccccagccatgctcaaccctgccaacgtgcccactcacctcatggtgctctgctgcgtcttacggtacatggtgcagtggccgggagcacgcatccttcggcgtcaggagctagatgccttcctggctcaggcgctgtcccccaaactctacgagcctgatcagctccaggagctcaagattgagaacctagatccccgaggaattcagctatcagctctcttcatgagtggagtagacatggccttgtttgcaaatgatgcatgcggacagccaatcccctgggaacactgttgtccttggatgtattttgatgggaagctcttccaatccaaactcctcaaagccagccgggaaaagaccccactcattgacctctgtgatggtcaggctgatcaggctgccaaggtagagaagatgcgccagagcgtcctcgaggggctcagcttctccaggcagagccacacgctccctttcccgccgccacctgccctgcccttctaccctgcctctgcgtacccccggcactttgggcctgtcccaccctctcagggcaggggcagaggctttgcaggcgtctgtggctttggaggcccctatggggaaacggtagcaacaggcccttaccgtgccttccgtgtggcggcagcatcgggacactgcggagccttctcaggcagtgacagcagcaggactagcaagtcccagggcggagtccaacctataccttctcagggaggcaaactagaaatagctggcactgtggttggccattgggctgggagcaggcggggccgtgggggccgggggcctttccccctgcaggtggtttctgtcggaggaccagctagagggcgtccaagaggagttatttccaccccagtgattagaacatttggaagaggtggaaggtactatggcagaggttacaaaaaccaggcagcaattcagggcagacctccttatgctgcttcagcagaagaagtggccaaagaacttaagtcaaaatctggggaatcgaagtcctctgctatgtcttcagacgggtccctggctgaaaacggagtgatggccgaggagaagccggctccccagatgaacgggagcacgggtgacgccagggcccccagccactctgaaagtgccttgaataatgactctaaaacgtgcaatacaaatcctcatttaaatgcactaagtacagacagcgcttgccgcagagaagctgctctggaggcagctgtcttaaataaagaagagtaaacttattttttatagagggtgaaggatgctggaagggtaaggatttaggaatatctggagagaaagagagcctgcagttatgtacattttgtcctttccgtaagagaaaaatgaggactttggaaattcagatccctctttgatatcagagatttaaacaacacatttttagttttaaccagttgtagtcaaaatgctacaataaaacaaaaaagagaaagaaaatgaagagcatttgactcccgcacttaaaatgaagtacacataaagtttaaactggttatgacaaaagcctatagttgtgtttcttgaactataaagaaaacaaattttggcagtctttaagtatatatagcttaaaatataatttttagcatttggcaccatatgtatgccattatatttgattttgcattactgtttcacaatgaagctttctttaaggctttgatttttatgattatgaaagaaataaggcacaaccacagtttttctttcttaaatttcatcactgttgatgtggttcttttgtgttaaaaaaaaaaagtgcaactatcaaaactaaaaaattatagagtaatattgccgttctgctgattttaaatatacaatacatcatacatactttacaagcaagttaaatggagataaagttgaaatcatagaagatgcaaatgacctttcaaaatcaacacaatgtgttctgaaactttcgtgactaataccatgcatctgtgatcaatgaactatgtggttttgaatcggatgtagaccattagtactactacttgagctaaacttctgcatggttcataatttttaaagtgtgtagttaatatgcatgttatcgtcctttcttccattcttaacagtatgtgcccatttgcaaaacaaaaatgctaataatcagtaatagtcctataaaagatgttaactctgtttagtcattgactgatcttgctctaaccttaaaattttgtgattattgacctctgttgcatttattctaaagccccccaaaaattatctagccgtttcgaatatcaacattaccctggtgtattcactgctgtatgcattattgttctttgttgctgttttatgccttcatattagcaaatatgaaattctgtgaaaaaaaaccctttgatcttaaaaaaaaaaaaaccaccccccccttctgtagcaggaaacaaattgcttgttcttgagaactttcccatcaagaatttagtagaagcaggtatacttctatcattttgatgtttttgttaatgtttccaaacaatgtactttgaaatcagaatcacttcttatcgttttcatatacttctgatgctcttcatcacattagtgatcagaaatgaggtgtaattccccaacccctgcccgcaagagctaagtaggatcttactgtaagttgaagggagttttgccctaactcatggattgtgcaagaatgaactgctgttgggtttgattgactgtcgatggattgtggtgtggtgtatctgaaggctattgaatgcaacttacaatgcttaataaaaatctttattcttttaggtataaaaaaaaaaaaaaaaaaaaaaaaaaaaagaagaaagcagaaaagaagcagaaaaagcaaagaggaaaaagaaaaagaaaaagagcagaaagaatgaaacaggaagaaacagagaaggaaagaaaaggaggcaagcagaagaacaagaacaagaagacacaatgt

SEQ ID NO: 306956 - DNA, 6565 bp, Homo sapiens
atttgttcgttcttctgttttcctctttttgttcgttctttttgtttcttcttgctgtcgcgtgtctgcttctcgtcctgttcttctcctgcgtctgctcgggcttattttataatccttgtctctcctttgtccctccggttgtgtatactgtcccgctgtttgttctctcccgtggttcccttctttcgagattttggtttctcacaatcctgctcttgtgttttctctctcccccgcttttttttatttgtgtggatattcccctccgttatttgtgtgccgcggtgcttctcctgggtatctctttttgtctactgttctaccttgacccttgtggtgccccctcgtcgtcactactcttgttttctataaacctttttctcggtcccctctttctcgccaaacaattttttttttttttctttttttttttttttttttcacattgtaaaatatagtttacttcaaaagatgatcctgaagatcccatcacagagtgtttaagggatgattataaacttttagcccttaagagagaatatatatactcaactgagtactgtctttcaaagcagtccctgtcagtttgtccattgattccatagcagctctcactgcccaccctgcttgagaagcctcttggagttgcctagagagtctatagcactcatctgaaggccctccatgagaacaactcttctcttccacatagatatttttgcatcagcccaaagctatttggacacaagtttggtgaacacggtaagaaaaaaacaaaccaagcaacaaaaacaaaaagcaggcagtgctgtgttagactgaaagtaaaagataaaaactctaagaacctatgaagcgccagggcagtgctggttgctttcacccatatggtctcctttggtgttctgctggtgcttatgaagcagtatccctactgacaatgaccctagcttaagagggctgagaactgctgaaagtgaagctgtttataaatggtacagtcaggaccgacagacacatgggtgtggtatgactgcaaagtacctgtggaattcagatgggattaccatccccactataaagggcaatatgatctgttgcaggagggtttatagggtacttagttacacaggtcacactgatccccttttcctctttttttctatgcaagtatctatttgtctatatgtctgtctaccttggtaggttgggctccttgaagaagggttatgttttcttcatctccatatccccagtagctggccaatgcccagtatacaccaggggctcagtcgctgtttgtcttattttcttgttgactctactctgacttaggacatatcactttcctctcttgaccttcacattcagatgtgttaataaaagtggataaagaccactctagctttaaaacaccctccaatatagagagaactctgaaaccagaagcagaagctgaggaatggtgaatagagcattttccctcacacgatgggtatcagggtggtttcttgtcctttcaatgcctctgcagaacttgaccctagtttttcaaattggactcaagaatgatcttagtgttggtggttttgtggttttctttgagactttgttattgacagaacagcttctggaaatctttttcaccgggagtatgggggcttctttggccaaaccgtgcgcgtgcaggctccatgtgctgggcagcagctgtccggccacagcctgtcggttgcatcctgctcctctacagaggtttctggcggcgctggccaaggcctgcttcggcggcaacatcgagctcttcgtcttcttcaacggcgcgctcgagaaggcccggctgcacgagtgggtcaagcggcagggcaacgagcgccagacggcacagcagatcgtcagccatgtccagaacaagggcaccccgccgccaaaggtctggttcctgccgcccgtctgcatggcccactgcatccgcctggcgctcatccgcttccacgtcaaggttgcacagagcattgaggatcaccatcaggaagtgattggtttctgcagagagaatggtttccatggcttggttgcgtatgactctgattatgcactgtgcaacatcccctactatttcagtgcccatgccctaaaactgagccggaacgggaaaagtctcaccacaagccaatatctgatgcatgaagttgccaagcaactggacctgaatccaaatcgttttcctatttttgctgctctcttaggaaatcacattctgcctgatgaagatctggcttcctttcattggagtttacttggtccagaacatccactagcctcactaaaggtccgggcccaccagctggtcttgccaccttgcgacgtagtgatcaaagccgttgctgactatgtacgcaacattcaggacacctctgacttggatgccatagctaaagatgttttccagcattcacagtctagaacagatgacaaagttattcgatttaagagagcaattggatattattcagcgactagtaagcctatgtcatttcatccaccacattacttagcagccagacccggtccgtttggaatgcctgggatggtgccgccgcatgttcctcctcagatgctcaacattccgcagacctctctgcaagcaaagcccgtggccccacaggtgcccagcccagggggcgccccgggccagggtccatacccgtacagcctctctgagccagcacctctcactttggacacgagcgggaagaatctgacggagcagaacagctacagcaacattcctcacgaagggaagcacacgccgctgtatgagcggtcctcgcccatcaacccggcccagagcggcagccccaaccacgtggattccgcctacttccctggctcttctacatcgtcatcttccgacaacgacgagggcagcggaggggcgacaaaccatatcagcgggaacaagattggctgggagaagacgggaagccactcagagcctcaggcacgaggagacccaggagaccaaacaaaggcagaaggctcgtccactgcctcttcaggaagccaactagccgaaggcaagggaagccagatgggcactgtccagccaatcccgtgcctcctgtcgatgcccaccaggaaccacatggacatcaccacacctcccctgccccccgtcgcacctgaggtgctgagagtggccgagcacaggcacaagaaggggctgatgtacccctacatcttccatgtcctgacgaagggtgaaatcaaaattgctgtttctattgaagatgaagccaacaaggacctgcctccggccgctctgctctataggccagttcgtcagtatgtttacggagtcctgtttagtttggcagaaagcagaaagaaaactgagagacttgcttttagaaagaacagacttccaccagaattttcaccagtgatcattaaagaatgggcagcttacaaaggaaagtctcctcaaaccccggaactggttgaagctcttgccttcagggagtggacctgccccaacctgaagaggctgtggttgggtaaggcggtagaggacaagaaccgcaggatgagggccttcctggcctgcatgaggtcggacaccccagccatgctcaaccctgccaacgtgcccactcacctcatggtgctctgctgcgtcttacggtacatggtgcagtggccgggagcacgcatccttcggcgtcaggagctagatgccttcctggctcaggcgctgtcccccaaactctacgagcctgatcagctccaggagctcaagattgagaacctagatccccgaggaattcagctatcagctctcttcatgagtggagtagacatggccttgtttgcaaatgatgcatgcggacagccaatcccctgggaacactgttgtccttggatgtattttgatgggaagctcttccaatccaaactcctcaaagccagccgggaaaagaccccactcattgacctctgtgatggtcaggctgatcaggctgccaaggtagagaagatgcgccagagcgtcctcgaggggctcagcttctccaggcagagccacacgctccctttcccgccgccacctgccctgcccttctaccctgcctctgcgtacccccggcactttgggcctgtcccaccctctcagggcaggggcagaggctttgcaggcgtctgtggctttggaggcccctatggggaaacggtagcaacaggcccttaccgtgccttccgtgtggcggcagcatcgggacactgcggagccttctcaggcagtgacagcagcaggactagcaagtcccagggcggagtccaacctataccttctcagggaggcaaactagaaatagctggcactgtggttggccattgggctgggagcaggcggggccgtgggggccgggggcctttccccctgcaggtggtttctgtcggaggaccagctagagggcgtccaagaggagttatttccaccccagtgattagaacatttggaagaggtggaaggtactatggcagaggttacaaaaaccaggcagcaattcagggcagacctccttatgctgcttcagcagaagaagtggccaaagaacttaagtcaaaatctggggaatcgaagtcctctgctatgtcttcagacgggtccctggctgaaaacggagtgatggccgaggagaagccggctccccagatgaacgggagcacgggtgacgccagggcccccagccactctgaaagtgccttgaataatgactctaaaacgtgcaatacaaatcctcatttaaatgcactaagtacagacagcgcttgccgcagagaagctgctctggaggcagctgtcttaaataaagaagagtaaacttattttttatagagggtgaaggatgctggaagggtaaggatttaggaatatctggagagaaagagagcctgcagttatgtacattttgtcctttccgtaagagaaaaatgaggactttggaaattcagatccctctttgatatcagagatttaaacaacacatttttagttttaaccagttgtagtcaaaatgctacaataaaacaaaaaagagaaagaaaatgaagagcatttgactcccgcacttaaaatgaagtacacataaagtttaaactggttatgacaaaagcctatagttgtgtttcttgaactataaagaaaacaaattttggcagtctttaagtatatatagcttaaaatataatttttagcatttggcaccatatgtatgccattatatttgattttgcattactgtttcacaatgaagctttctttaaggctttgatttttatgattatgaaagaaataaggcacaaccacagtttttctttcttaaatttcatcactgttgatgtggttcttttgtgttaaaaaaaaaaagtgcaactatcaaaactaaaaaattatagagtaatattgccgttctgctgattttaaatatacaatacatcatacatactttacaagcaagttaaatggagataaagttgaaatcatagaagatgcaaatgacctttctgaactatgtggttttgaatcggatgtagaccattagtactactacttgagctaaacttctgcatggttcataatttttaaagtgtgtagttaatatgcatgttatcgtcctttcttccattcttaacagtatgtgcccatttgcaaaacaaaaatgctaataatcagtaatagtcctataaaagatgttaactctgtttagtcattgactgatcttgctctaaccttaaaattttgtgattattgacctctgttgcatttattctaaagccccccaaaaattatctagccgtttcgaatatcaacattaccctggtgtattcactgctgtatgcattattgttctttgttgctgttttatgccttcatattagcaaatatgaaattctgtgaaaaaaaaccctttgatcttaaaaaaaaaaaaaccaccccccccttctgtagcaggaaacaaattgcttgttcttgagaactttcccatcaagaatttagtagaagcaggtatacttctatcattttgatgtttttgttaatgtttccaaacaatgtactttgaaatcagaatcacttcttatcgttttcatatacttctgatgctcttcatcacattagtgatcagaaatgaggtgtaattccccaacccctgcccgcaagagctaagtaggatcttactgtaagttgaagggagttttgccctaactcatggattgtgcaagaatgaactgctgttgggtttgattgactgtcgatggattgtggtgtggtgtatctgaaggctattgaatgcaacttacaatgcttaataaaaatctttattcttttaggtataaaaaaaaaaaaaaaaaaaaaaaaaaaaagaagaaagcagaaaagaagcagaaaaagcaaagaggaaaaagaaaaagaaaaagagcagaaagaatgaaacaggaagaaacagagaaggaaagaaaaggaggcaagcagaagaacaagaacaagaagacacaatgt

SEQ ID NO: 306957 - DNA, 4498 bp, Homo sapiens
catccactgaaaggaaaatccagttcttgagcttcagaacgtgaacggcttaggaaagtcttagggccaagatcttacaagtggacaatcattgggcactgataagatcttagatggtagctccttgttgaatttctggctcctgcattcagattagcctggtactggttgctcaccatccactgttgacacttacgtttgttttctcaggtccgggcccaccagctggtcttgccaccttgcgacgtagtgatcaaagccgttgctgactatgtacgcaacattcaggacacctctgacttggatgccatagctaaagatgttttccagcattcacagtctagaacagatgacaaagttattcgatttaagagagcaattggatattattcagcgactagtaagcctatgtcatttcatccaccacattacttagcagccagacccggtccgtttggaatgcctgggatggtgccgccgcatgttcctcctcagatgctcaacattccgcagacctctctgcaagcaaagcccgtggccccacaggtgcccagcccagggggcgccccgggccagggtccatacccgtacagcctctctgagccagcacctctcactttggacacgagcgggaagaatctgacggagcagaacagctacagcaacattcctcacgaagggaagcacacgccgctgtatgagcggtcctcgcccatcaacccggcccagagcggcagccccaaccacgtggattccgcctacttccctggctcttctacatcgtcatcttccgacaacgacgagggcagcggaggggcgacaaaccatatcagcgggaacaagattggctgggagaagacgggaagccactcagagcctcaggcacgaggagacccaggagaccaaacaaaggcagaaggctcgtccactgcctcttcaggaagccaactagccgaaggcaagggaagccagatgggcactgtccagccaatcccgtgcctcctgtcgatgcccaccaggaaccacatggacatcaccacacctcccctgccccccgtcgcacctgaggtgctgagagtggccgagcacaggcacaagaaggggctgatgtacccctacatcttccatgtcctgacgaagggtgaaatcaaaattgctgtttctattgaagatgaagccaacaaggacctgcctccggccgctctgctctataggccagttcgtcagtatgtttacggagtcctgtttagtttggcagaaagcagaaagaaaactgagagacttgcttttagaaagaacagacttccaccagaattttcaccagtgatcattaaagaatgggcagcttacaaaggaaagtctcctcaaaccccggaactggttgaagctcttgccttcagggagtggacctgccccaacctgaagaggctgtggttgggtaaggcggtagaggacaagaaccgcaggatgagggccttcctggcctgcatgaggtcggacaccccagccatgctcaaccctgccaacgtgcccactcacctcatggtgctctgctgcgtcttacggtacatggtgcagtggccgggagcacgcatccttcggcgtcaggagctagatgccttcctggctcaggcgctgtcccccaaactctacgagcctgatcagctccaggagctcaagattgagaacctagatccccgaggaattcagctatcagctctcttcatgagtggagtagacatggccttgtttgcaaatgatgcatgcggacagccaatcccctgggaacactgttgtccttggatgtattttgatgggaagctcttccaatccaaactcctcaaagccagccgggaaaagaccccactcattgacctctgtgatggtcaggctgatcaggctgccaaggtagagaagatgcgccagagcgtcctcgaggggctcagcttctccaggcagagccacacgctccctttcccgccgccacctgccctgcccttctaccctgcctctgcgtacccccggcactttgggcctgtcccaccctctcagggcaggggcagaggctttgcaggcgtctgtggctttggaggcccctatggggaaacggtagcaacaggcccttaccgtgccttccgtgtggcggcagcatcgggacactgcggagccttctcaggcagtgacagcagcaggactagcaagtcccagggcggagtccaacctataccttctcagggaggcaaactagaaatagctggcactgtggttggccattgggctgggagcaggcggggccgtgggggccgggggcctttccccctgcaggtggtttctgtcggaggaccagctagagggcgtccaagaggagttatttccaccccagtgattagaacatttggaagaggtggaaggtactatggcagaggttacaaaaaccaggcagcaattcagggcagacctccttatgctgcttcagcagaagaagtggccaaagaacttaagtcaaaatctggggaatcgaagtcctctgctatgtcttcagacgggtccctggctgaaaacggagtgatggccgaggagaagccggctccccagatgaacgggagcacgggtgacgccagggcccccagccactctgaaagtgccttgaataatgactctaaaacgtgcaatacaaatcctcatttaaatgcactaagtacagacagcgcttgccgcagagaagctgctctggaggcagctgtcttaaataaagaagagtaaacttattttttatagagggtgaaggatgctggaagggtaaggatttaggaatatctggagagaaagagagcctgcagttatgtacattttgtcctttccgtaagagaaaaatgaggactttggaaattcagatccctctttgatatcagagatttaaacaacacatttttagttttaaccagttgtagtcaaaatgctacaataaaacaaaaaagagaaagaaaatgaagagcatttgactcccgcacttaaaatgaagtacacataaagtttaaactggttatgacaaaagcctatagttgtgtttcttgaactataaagaaaacaaattttggcagtctttaagtatatatagcttaaaatataatttttagcatttggcaccatatgtatgccattatatttgattttgcattactgtttcacaatgaagctttctttaaggctttgatttttatgattatgaaagaaataaggcacaaccacagtttttctttcttaaatttcatcactgttgatgtggttcttttgtgttaaaaaaaaaaagtgcaactatcaaaactaaaaaattatagagtaatattgccgttctgctgattttaaatatacaatacatcatacatactttacaagcaagttaaatggagataaagttgaaatcatagaagatgcaaatgacctttcaaaatcaacacaatgtgttctgaaactttcgtgactaataccatgcatctgtgatcaatgaactatgtggttttgaatcggatgtagaccattagtactactacttgagctaaacttctgcatggttcataatttttaaagtgtgtagttaatatgcatgttatcgtcctttcttccattcttaacagtatgtgcccatttgcaaaacaaaaatgctaataatcagtaatagtcctataaaagatgttaactctgtttagtcattgactgatcttgctctaaccttaaaattttgtgattattgacctctgttgcatttattctaaagccccccaaaaattatctagccgtttcgaatatcaacattaccctggtgtattcactgctgtatgcattattgttctttgttgctgttttatgccttcatattagcaaatatgaaattctgtgaaaaaaaaccctttgatcttaaaaaaaaaaaaaccaccccccccttctgtagcaggaaacaaattgcttgttcttgagaactttcccatcaagaatttagtagaagcaggtatacttctatcattttgatgtttttgttaatgtttccaaacaatgtactttgaaatcagaatcacttcttatcgttttcatatacttctgatgctcttcatcacattagtgatcagaaatgaggtgtaattccccaacccctgcccgcaagagctaagtaggatcttactgtaagttgaagggagttttgccctaactcatggattgtgcaagaatgaactgctgttgggtttgattgactgtcgatggattgtggtgtggtgtatctgaaggctattgaatgcaacttacaatgcttaataaaaatctttattcttttaggtataaaaaaaaaaaaaaaaaaaaaaaaaaaaagaagaaagcagaaaagaagcagaaaaagcaaagaggaaaaagaaaaagaaaaagagcagaaagaatgaaacaggaagaaacagagaaggaaagaaaaggaggcaagcagaagaacaagaacaagaagacacaatgt

SEQ ID NO: 306958 - DNA, 3425 bp, Homo sapiens
gcttggtgcctatgaaaagctggtttataaagaggctgtacggtcggaattccgggatatcgcgaagggtgaaatcaaaattgctgtttctattgaagatgaagccaacaaggacctgcctccggccgctctgctctataggccagttcgtcagtatgtttacggagtcctgtttagtttggcagaaagcagaaagaaaactgagagacttgcttttagaaagaacagacttccaccagaattttcaccagtgatcattaaagaatgggcagcttacaaaggaaagtctcctcaaaccccggaactggttgaagctcttgccttcagggagtggacctgccccaacctgaagaggctgtggttgggtaaggcggtagaggacaagaaccgcaggatgagggccttcctggcctgcatgaggtcggacaccccagccatgctcaaccctgccaacgtgcccactcacctcatggtgctctgctgcgtcttacggtacatggtgcagtggccgggagcacgcatccttcggcgtcaggagctagatgccttcctggctcaggcgctgtcccccaaactctacgagcctgatcagctccaggagctcaagattgagaacctagatccccgaggaattcagctatcagctctcttcatgagtggagtagacatggccttgtttgcaaatgatgcatgcggacagccaatcccctgggaacactgttgtccttggatgtattttgatgggaagctcttccaatccaaactcctcaaagccagccgggaaaagaccccactcattgacctctgtgatggtcaggctgatcaggctgccaaggtagagaagatgcgccagagcgtcctcgaggggctcagcttctccaggcagagccacacgctccctttcccgccgccacctgccctgcccttctaccctgcctctgcgtacccccggcactttgggcctgtcccaccctctcagggcaggggcagaggctttgcaggcgtctgtggctttggaggcccctatggggaaacggtagcaacaggcccttaccgtgccttccgtgtggcggcagcatcgggacactgcggagccttctcaggcagtgacagcagcaggactagcaagtcccagggcggagtccaacctataccttctcagggaggcaaactagaaatagctggcactgtggttggccattgggctgggagcaggcggggccgtgggggccgggggcctttccccctgcaggtggtttctgtcggaggaccagctagagggcgtccaagaggagttatttccaccccagtgattagaacatttggaagaggtggaaggtactatggcagaggttacaaaaaccaggcagcaattcagggcagacctccttatgctgcttcagcagaagaagtggccaaagaacttaagtcaaaatctggggaatcgaagtcctctgctatgtcttcagacgggtccctggctgaaaacggagtgatggccgaggagaagccggctccccagatgaacgggagcacgggtgacgccagggcccccagccactctgaaagtgccttgaataatgactctaaaacgtgcaatacaaatcctcatttaaatgcactaagtacagacagcgcttgccgcagagaagctgctctggaggcagctgtcttaaataaagaagagtaaacttattttttatagagggtgaaggatgctggaagggtaaggatttaggaatatctggagagaaagagagcctgcagttatgtacattttgtcctttccgtaagagaaaaatgaggactttggaaattcagatccctctttgatatcagagatttaaacaacacatttttagttttaaccagttgtagtcaaaatgctacaataaaacaaaaaagagaaagaaaatgaagagcatttgactcccgcacttaaaatgaagtacacataaagtttaaactggttatgacaaaagcctatagttgtgtttcttgaactataaagaaaacaaattttggcagtctttaagtatatatagcttaaaatataatttttagcatttggcaccatatgtatgccattatatttgattttgcattactgtttcacaatgaagctttctttaaggctttgatttttatgattatgaaagaaataaggcacaaccacagtttttctttcttaaatttcatcactgttgatgtggttcttttgtgttaaaaaaaaaaagtgcaactatcaaaactaaaaaattatagagtaatattgccgttctgctgattttaaatatacaatacatcatacatactttacaagcaagttaaatggagataaagttgaaatcatagaagatgcaaatgacctttcaaaatcaacacaatgtgttctgaaactttcgtgactaataccatgcatctgtgatcaatgaactatgtggttttgaatcggatgtagaccattagtactactacttgagctaaacttctgcatggttcataatttttaaagtgtgtagttaatatgcatgttatcgtcctttcttccattcttaacagtatgtgcccatttgcaaaacaaaaatgctaataatcagtaatagtcctataaaagatgttaactctgtttagtcattgactgatcttgctctaaccttaaaattttgtgattattgacctctgttgcatttattctaaagccccccaaaaattatctagccgtttcgaatatcaacattaccctggtgtattcactgctgtatgcattattgttctttgttgctgttttatgccttcatattagcaaatatgaaattctgtgaaaaaaaaccctttgatcttaaaaaaaaaaaaaccaccccccccttctgtagcaggaaacaaattgcttgttcttgagaactttcccatcaagaatttagtagaagcaggtatacttctatcattttgatgtttttgttaatgtttccaaacaatgtactttgaaatcagaatcacttcttatcgttttcatatacttctgatgctcttcatcacattagtgatcagaaatgaggtgtaattccccaacccctgcccgcaagagctaagtaggatcttactgtaagttgaagggagttttgccctaactcatggattgtgcaagaatgaactgctgttgggtttgattgactgtcgatggattgtggtgtggtgtatctgaaggctattgaatgcaacttacaatgcttaataaaaatctttattcttttaggtataaaaaaaaaaaaaaaaaaaaaaaaaaaaagaagaaagcagaaaagaagcagaaaaagcaaagaggaaaaagaaaaagaaaaagagcagaaagaatgaaacaggaagaaacagagaaggaaagaaaaggaggcaagcagaagaacaagaacaagaagacacaatgt

SEQ ID NO: 306959 - DNA, 3184 bp, Homo sapiens
gtgttattttacgaagagattgtggagccctgggctctaaggagaccacacatcattgctcattttgtcacacgtcagccttaagtacagtgttactctacactgcggaacgctttataaacccaacctgaaatacttgagtatgtttataaaatattctcttaaattcaaatgtgttaaatcacataagtatttctgttcaaatgaggccagtgttaggtcaatataaggtaatggtaggactacttagtggtgctgttttgttgaggaatattctgttaactttggagagttttactaagactttgaaagaatttaatactgtagtactcttattccatagaaattactcttttcaatttaaagattgagaacctagatccccgaggaattcagctatcagctctcttcatgagtggagtagacatggccttgtttgcaaatgatgcatgcggacagccaatcccctgggaacactgttgtccttggatgtattttgatgggaagctcttccaatccaaactcctcaaagccagccgggaaaagaccccactcattgacctctgtgatggtcaggctgatcaggctgccaaggtagagaagatgcgccagagcgtcctcgaggggctcagcttctccaggcagagccacacgctccctttcccgccgccacctgccctgcccttctaccctgcctctgcgtacccccggcactttgggcctgtcccaccctctcagggcaggggcagaggctttgcaggcgtctgtggctttggaggcccctatggggaaacggtagcaacaggcccttaccgtgccttccgtgtggcggcagcatcgggacactgcggagccttctcaggcagtgacagcagcaggactagcaagtcccagggcggagtccaacctataccttctcagggaggcaaactagaaatagctggcactgtggttggccattgggctgggagcaggcggggccgtgggggccgggggcctttccccctgcaggtggtttctgtcggaggaccagctagagggcgtccaagaggagttatttccaccccagtgattagaacatttggaagaggtggaaggtactatggcagaggttacaaaaaccaggcagcaattcagggcagacctccttatgctgcttcagcagaagaagtggccaaagaacttaagtcaaaatctggggaatcgaagtcctctgctatgtcttcagacgggtccctggctgaaaacggagtgatggccgaggagaagccggctccccagatgaacgggagcacgggtgacgccagggcccccagccactctgaaagtgccttgaataatgactctaaaacgtgcaatacaaatcctcatttaaatgcactaagtacagacagcgcttgccgcagagaagctgctctggaggcagctgtcttaaataaagaagagtaaacttattttttatagagggtgaaggatgctggaagggtaaggatttaggaatatctggagagaaagagagcctgcagttatgtacattttgtcctttccgtaagagaaaaatgaggactttggaaattcagatccctctttgatatcagagatttaaacaacacatttttagttttaaccagttgtagtcaaaatgctacaataaaacaaaaaagagaaagaaaatgaagagcatttgactcccgcacttaaaatgaagtacacataaagtttaaactggttatgacaaaagcctatagttgtgtttcttgaactataaagaaaacaaattttggcagtctttaagtatatatagcttaaaatataatttttagcatttggcaccatatgtatgccattatatttgattttgcattactgtttcacaatgaagctttctttaaggctttgatttttatgattatgaaagaaataaggcacaaccacagtttttctttcttaaatttcatcactgttgatgtggttcttttgtgttaaaaaaaaaaagtgcaactatcaaaactaaaaaattatagagtaatattgccgttctgctgattttaaatatacaatacatcatacatactttacaagcaagttaaatggagataaagttgaaatcatagaagatgcaaatgacctttcaaaatcaacacaatgtgttctgaaactttcgtgactaataccatgcatctgtgatcaatgaactatgtggttttgaatcggatgtagaccattagtactactacttgagctaaacttctgcatggttcataatttttaaagtgtgtagttaatatgcatgttatcgtcctttcttccattcttaacagtatgtgcccatttgcaaaacaaaaatgctaataatcagtaatagtcctataaaagatgttaactctgtttagtcattgactgatcttgctctaaccttaaaattttgtgattattgacctctgttgcatttattctaaagccccccaaaaattatctagccgtttcgaatatcaacattaccctggtgtattcactgctgtatgcattattgttctttgttgctgttttatgccttcatattagcaaatatgaaattctgtgaaaaaaaaccctttgatcttaaaaaaaaaaaaaccaccccccccttctgtagcaggaaacaaattgcttgttcttgagaactttcccatcaagaatttagtagaagcaggtatacttctatcattttgatgtttttgttaatgtttccaaacaatgtactttgaaatcagaatcacttcttatcgttttcatatacttctgatgctcttcatcacattagtgatcagaaatgaggtgtaattccccaacccctgcccgcaagagctaagtaggatcttactgtaagttgaagggagttttgccctaactcatggattgtgcaagaatgaactgctgttgggtttgattgactgtcgatggattgtggtgtggtgtatctgaaggctattgaatgcaacttacaatgcttaataaaaatctttattcttttaggtataaaaaaaaaaaaaaaaaaaaaaaaaaaaagaagaaagcagaaaagaagcagaaaaagcaaagaggaaaaagaaaaagaaaaagagcagaaagaatgaaacaggaagaaacagagaaggaaagaaaaggaggcaagcagaagaacaagaacaagaagacacaatgt

SEQ ID NO: 306960 - DNA, 2679 bp, Homo sapiens
gtgtgagccactgcacacagcctttaacatcatttataatgtttgcataggatcccatttatagtattatgtaattatttaattaaccattaaataattaacaattattaaataattaaccatacaattttcaattaaccaggtgccttaatatttttaaagtattagttttcaaatcaaatgcattggatatgggagatgtagctcaggggtagagcatttgactgcaaatgcattggatatgaaccaaaaaaataagattgattccttggaataaatcttccctatgatcatacttaacctgtttacgcctagtgttccattattggaacgcaaagcatgtgggagttctttatgtcctactgctcaaggtctgactgcaaaaattcaacaaattgcaacttccggcataaatgggttaattcagtgcttcataaaacgtaagattggatggctttaaaatcatttgatactattttaaatgttgtctgtaacagatttaagtgtttactgttgtcctttttcattcatttaggcgtccaagaggagttatttccaccccagtgattagaacatttggaagaggtggaaggtactatggcagaggttacaaaaaccaggcagcaattcagggcagacctccttatgctgcttcagcagaagaagtggccaaagaacttaagtcaaaatctggggaatcgaagtcctctgctatgtcttcagacgggtccctggctgaaaacggagtgatggccgaggagaagccggctccccagatgaacgggagcacgggtgacgccagggcccccagccactctgaaagtgccttgaataatgactctaaaacgtgcaatacaaatcctcatttaaatgcactaagtacagacagcgcttgccgcagagaagctgctctggaggcagctgtcttaaataaagaagagtaaacttattttttatagagggtgaaggatgctggaagggtaaggatttaggaatatctggagagaaagagagcctgcagttatgtacattttgtcctttccgtaagagaaaaatgaggactttggaaattcagatccctctttgatatcagagatttaaacaacacatttttagttttaaccagttgtagtcaaaatgctacaataaaacaaaaaagagaaagaaaatgaagagcatttgactcccgcacttaaaatgaagtacacataaagtttaaactggttatgacaaaagcctatagttgtgtttcttgaactataaagaaaacaaattttggcagtctttaagtatatatagcttaaaatataatttttagcatttggcaccatatgtatgccattatatttgattttgcattactgtttcacaatgaagctttctttaaggctttgatttttatgattatgaaagaaataaggcacaaccacagtttttctttcttaaatttcatcactgttgatgtggttcttttgtgttaaaaaaaaaaagtgcaactatcaaaactaaaaaattatagagtaatattgccgttctgctgattttaaatatacaatacatcatacatactttacaagcaagttaaatggagataaagttgaaatcatagaagatgcaaatgacctttcaaaatcaacacaatgtgttctgaaactttcgtgactaataccatgcatctgtgatcaatgaactatgtggttttgaatcggatgtagaccattagtactactacttgagctaaacttctgcatggttcataatttttaaagtgtgtagttaatatgcatgttatcgtcctttcttccattcttaacagtatgtgcccatttgcaaaacaaaaatgctaataatcagtaatagtcctataaaagatgttaactctgtttagtcattgactgatcttgctctaaccttaaaattttgtgattattgacctctgttgcatttattctaaagccccccaaaaattatctagccgtttcgaatatcaacattaccctggtgtattcactgctgtatgcattattgttctttgttgctgttttatgccttcatattagcaaatatgaaattctgtgaaaaaaaaccctttgatcttaaaaaaaaaaaaaccaccccccccttctgtagcaggaaacaaattgcttgttcttgagaactttcccatcaagaatttagtagaagcaggtatacttctatcattttgatgtttttgttaatgtttccaaacaatgtactttgaaatcagaatcacttcttatcgttttcatatacttctgatgctcttcatcacattagtgatcagaaatgaggtgtaattccccaacccctgcccgcaagagctaagtaggatcttactgtaagttgaagggagttttgccctaactcatggattgtgcaagaatgaactgctgttgggtttgattgactgtcgatggattgtggtgtggtgtatctgaaggctattgaatgcaacttacaatgcttaataaaaatctttattcttttaggtataaaaaaaaaaaaaaaaaaaaaaaaaaaaagaagaaagcagaaaagaagcagaaaaagcaaagaggaaaaagaaaaagaaaaagagcagaaagaatgaaacaggaagaaacagagaaggaaagaaaaggaggcaagcagaagaacaagaacaagaagacacaatgt

SEQ ID NO: 306961 - DNA, 2207 bp, Homo sapiens
ccgccagcccgcccgcgcgccttttcaccagacgctggtttctgtcggaggaccagctagagggcgtccaagaggagttatttccaccccagtgattagaacatttggaagaggtggaaggtactatggcagaggttacaaaaaccaggcagcaattcagggcagacctccttatgctgcttcagcagaagaagtggccaaagaacttaagtcaaaatctggggaatcgaagtcctctgctatgtcttcagacgggtccctggctgaaaacggagtgatggccgaggagaagccggctccccagatgaacgggagcacgggtgacgccagggcccccagccactctgaaagtgccttgaataatgactctaaaacgtgcaatacaaatcctcatttaaatgcactaagtacagacagcgcttgccgcagagaagctgctctggaggcagctgtcttaaataaagaagagtaaacttattttttatagagggtgaaggatgctggaagggtaaggatttaggaatatctggagagaaagagagcctgcagttatgtacattttgtcctttccgtaagagaaaaatgaggactttggaaattcagatccctctttgatatcagagatttaaacaacacatttttagttttaaccagttgtagtcaaaatgctacaataaaacaaaaaagagaaagaaaatgaagagcatttgactcccgcacttaaaatgaagtacacataaagtttaaactggttatgacaaaagcctatagttgtgtttcttgaactataaagaaaacaaattttggcagtctttaagtatatatagcttaaaatataatttttagcatttggcaccatatgtatgccattatatttgattttgcattactgtttcacaatgaagctttctttaaggctttgatttttatgattatgaaagaaataaggcacaaccacagtttttctttcttaaatttcatcactgttgatgtggttcttttgtgttaaaaaaaaaaagtgcaactatcaaaactaaaaaattatagagtaatattgccgttctgctgattttaaatatacaatacatcatacatactttacaagcaagttaaatggagataaagttgaaatcatagaagatgcaaatgacctttcaaaatcaacacaatgtgttctgaaactttcgtgactaataccatgcatctgtgatcaatgaactatgtggttttgaatcggatgtagaccattagtactactacttgagctaaacttctgcatggttcataatttttaaagtgtgtagttaatatgcatgttatcgtcctttcttccattcttaacagtatgtgcccatttgcaaaacaaaaatgctaataatcagtaatagtcctataaaagatgttaactctgtttagtcattgactgatcttgctctaaccttaaaattttgtgattattgacctctgttgcatttattctaaagccccccaaaaattatctagccgtttcgaatatcaacattaccctggtgtattcactgctgtatgcattattgttctttgttgctgttttatgccttcatattagcaaatatgaaattctgtgaaaaaaaaccctttgatcttaaaaaaaaaaaaaccaccccccccttctgtagcaggaaacaaattgcttgttcttgagaactttcccatcaagaatttagtagaagcaggtatacttctatcattttgatgtttttgttaatgtttccaaacaatgtactttgaaatcagaatcacttcttatcgttttcatatacttctgatgctcttcatcacattagtgatcagaaatgaggtgtaattccccaacccctgcccgcaagagctaagtaggatcttactgtaagttgaagggagttttgccctaactcatggattgtgcaagaatgaactgctgttgggtttgattgactgtcgatggattgtggtgtggtgtatctgaaggctattgaatgcaacttacaatgcttaataaaaatctttattcttttaggtataaaaaaaaaaaaaaaaaaaaaaaaaaaaagaagaaagcagaaaagaagcagaaaaagcaaagaggaaaaagaaaaagaaaaagagcagaaagaatgaaacaggaagaaacagagaaggaaagaaaaggaggcaagcagaagaacaagaacaagaagacacaatgt

SEQ ID NO: 306962 - DNA, 2141 bp, Homo sapiens
ttgacatgggtggagttacatcacgggggaatgatcatatgctccaagttgacggtgcaaccgtaatccccacagggatggtattgggggtgggggcagacctccttatgctgcttcagcagaagaagtggccaaagaacttaagtcaaaatctggggaatcgaagtcctctgctatgtcttcagacgggtccctggctgaaaacggagtgatggccgaggagaagccggctccccagatgaacgggagcacgggtgacgccagggcccccagccactctgaaagtgccttgaataatgactctaaaacgtgcaatacaaatcctcatttaaatgcactaagtacagacagcgcttgccgcagagaagctgctctggaggcagctgtcttaaataaagaagagtaaacttattttttatagagggtgaaggatgctggaagggtaaggatttaggaatatctggagagaaagagagcctgcagttatgtacattttgtcctttccgtaagagaaaaatgaggactttggaaattcagatccctctttgatatcagagatttaaacaacacatttttagttttaaccagttgtagtcaaaatgctacaataaaacaaaaaagagaaagaaaatgaagagcatttgactcccgcacttaaaatgaagtacacataaagtttaaactggttatgacaaaagcctatagttgtgtttcttgaactataaagaaaacaaattttggcagtctttaagtatatatagcttaaaatataatttttagcatttggcaccatatgtatgccattatatttgattttgcattactgtttcacaatgaagctttctttaaggctttgatttttatgattatgaaagaaataaggcacaaccacagtttttctttcttaaatttcatcactgttgatgtggttcttttgtgttaaaaaaaaaaagtgcaactatcaaaactaaaaaattatagagtaatattgccgttctgctgattttaaatatacaatacatcatacatactttacaagcaagttaaatggagataaagttgaaatcatagaagatgcaaatgacctttcaaaatcaacacaatgtgttctgaaactttcgtgactaataccatgcatctgtgatcaatgaactatgtggttttgaatcggatgtagaccattagtactactacttgagctaaacttctgcatggttcataatttttaaagtgtgtagttaatatgcatgttatcgtcctttcttccattcttaacagtatgtgcccatttgcaaaacaaaaatgctaataatcagtaatagtcctataaaagatgttaactctgtttagtcattgactgatcttgctctaaccttaaaattttgtgattattgacctctgttgcatttattctaaagccccccaaaaattatctagccgtttcgaatatcaacattaccctggtgtattcactgctgtatgcattattgttctttgttgctgttttatgccttcatattagcaaatatgaaattctgtgaaaaaaaaccctttgatcttaaaaaaaaaaaaaccaccccccccttctgtagcaggaaacaaattgcttgttcttgagaactttcccatcaagaatttagtagaagcaggtatacttctatcattttgatgtttttgttaatgtttccaaacaatgtactttgaaatcagaatcacttcttatcgttttcatatacttctgatgctcttcatcacattagtgatcagaaatgaggtgtaattccccaacccctgcccgcaagagctaagtaggatcttactgtaagttgaagggagttttgccctaactcatggattgtgcaagaatgaactgctgttgggtttgattgactgtcgatggattgtggtgtggtgtatctgaaggctattgaatgcaacttacaatgcttaataaaaatctttattcttttaggtataaaaaaaaaaaaaaaaaaaaaaaaaaaaagaagaaagcagaaaagaagcagaaaaagcaaagaggaaaaagaaaaagaaaaagagcagaaagaatgaaacaggaagaaacagagaaggaaagaaaaggaggcaagcagaagaacaagaacaagaagacacaatgt

SEQ ID NO: 306963 - DNA, 2230 bp, Homo sapiens
actgactgagacaggtagagcatctaccgcccaaaagtcaaagcaaagacagggttagaaggacccagctgggcattttctgctcttgaatctgcagagagtgtcattaggccaaaattggcatcctctctcttctgtttatcagaaaccaccttctcatttgttgtccttcattttaaacagggcagacctccttatgctgcttcagcagaagaagtggccaaagaacttaagtcaaaatctggggaatcgaagtcctctgctatgtcttcagacgggtccctggctgaaaacggagtgatggccgaggagaagccggctccccagatgaacgggagcacgggtgacgccagggcccccagccactctgaaagtgccttgaataatgactctaaaacgtgcaatacaaatcctcatttaaatgcactaagtacagacagcgcttgccgcagagaagctgctctggaggcagctgtcttaaataaagaagagtaaacttattttttatagagggtgaaggatgctggaagggtaaggatttaggaatatctggagagaaagagagcctgcagttatgtacattttgtcctttccgtaagagaaaaatgaggactttggaaattcagatccctctttgatatcagagatttaaacaacacatttttagttttaaccagttgtagtcaaaatgctacaataaaacaaaaaagagaaagaaaatgaagagcatttgactcccgcacttaaaatgaagtacacataaagtttaaactggttatgacaaaagcctatagttgtgtttcttgaactataaagaaaacaaattttggcagtctttaagtatatatagcttaaaatataatttttagcatttggcaccatatgtatgccattatatttgattttgcattactgtttcacaatgaagctttctttaaggctttgatttttatgattatgaaagaaataaggcacaaccacagtttttctttcttaaatttcatcactgttgatgtggttcttttgtgttaaaaaaaaaaagtgcaactatcaaaactaaaaaattatagagtaatattgccgttctgctgattttaaatatacaatacatcatacatactttacaagcaagttaaatggagataaagttgaaatcatagaagatgcaaatgacctttcaaaatcaacacaatgtgttctgaaactttcgtgactaataccatgcatctgtgatcaatgaactatgtggttttgaatcggatgtagaccattagtactactacttgagctaaacttctgcatggttcataatttttaaagtgtgtagttaatatgcatgttatcgtcctttcttccattcttaacagtatgtgcccatttgcaaaacaaaaatgctaataatcagtaatagtcctataaaagatgttaactctgtttagtcattgactgatcttgctctaaccttaaaattttgtgattattgacctctgttgcatttattctaaagccccccaaaaattatctagccgtttcgaatatcaacattaccctggtgtattcactgctgtatgcattattgttctttgttgctgttttatgccttcatattagcaaatatgaaattctgtgaaaaaaaaccctttgatcttaaaaaaaaaaaaaccaccccccccttctgtagcaggaaacaaattgcttgttcttgagaactttcccatcaagaatttagtagaagcaggtatacttctatcattttgatgtttttgttaatgtttccaaacaatgtactttgaaatcagaatcacttcttatcgttttcatatacttctgatgctcttcatcacattagtgatcagaaatgaggtgtaattccccaacccctgcccgcaagagctaagtaggatcttactgtaagttgaagggagttttgccctaactcatggattgtgcaagaatgaactgctgttgggtttgattgactgtcgatggattgtggtgtggtgtatctgaaggctattgaatgcaacttacaatgcttaataaaaatctttattcttttaggtataaaaaaaaaaaaaaaaaaaaaaaaaaaaagaagaaagcagaaaagaagcagaaaaagcaaagaggaaaaagaaaaagaaaaagagcagaaagaatgaaacaggaagaaacagagaaggaaagaaaaggaggcaagcagaagaacaagaacaagaagacacaatgt

SEQ ID NO: 306964 - DNA, 5931 bp, Homo sapiens
atttgttcgttcttctgttttcctctttttgttcgttctttttgtttcttcttgctgtcgcgtgtctgcttctcgtcctgttcttctcctgcgtctgctcgggcttattttataatccttgtctctcctttgtccctccggttgtgtatactgtcccgctgtttgttctctcccgtggttcccttctttcgagattttggtttctcacaatcctgctcttgtgttttctctctcccccgcttttttttatttgtgtggatattcccctccgttatttgtgtgccgcggtgcttctcctgggtatctctttttgtctactgttctaccttgacccttgtggtgccccctcgtcgtcactactcttgttttctataaacctttttctcggtcccctctttctcgccaaacaattttttttttttttctttttttttttttttttttcacattgtaaaatatagtttacttcaaaagatgatcctgaagatcccatcacagagtgtttaagggatgattataaacttttagcccttaagagagaatatatatactcaactgagtactgtctttcaaagcagtccctgtcagtttgtccattgattccatagcagctctcactgcccaccctgcttgagaagcctcttggagttgcctagagagtctatagcactcatctgaaggccctccatgagaacaactcttctcttccacatagatatttttgcatcagcccaaagctatttggacacaagtttggtgaacacggtaagaaaaaaacaaaccaagcaacaaaaacaaaaagcaggcagtgctgtgttagactgaaagtaaaagataaaaactctaagaacctatgaagcgccagggcagtgctggttgctttcacccatatggtctcctttggtgttctgctggtgcttatgaagcagtatccctactgacaatgaccctagcttaagagggctgagaactgctgaaagtgaagctgtttataaatggtacagtcaggaccgacagacacatgggtgtggtatgactgcaaagtacctgtggaattcagatgggattaccatccccactataaagggcaatatgatctgttgcaggagggtttatagggtacttagttacacaggtcacactgatccccttttcctctttttttctatgcaagtatctatttgtctatatgtctgtctaccttggtaggttgggctccttgaagaagggttatgttttcttcatctccatatccccagtagctggccaatgcccagtatacaccaggggctcagtcgctgtttgtcttattttcttgttgactctactctgacttaggacatatcactttcctctcttgaccttcacattcagatgtgttaataaaagtggataaagaccactctagctttaaaacaccctccaatatagagagaactctgaaaccagaagcagaagctgaggaatggtgaatagagcattttccctcacacgatgggtatcagggtggtttcttgtcctttcaatgcctctgcagaacttgaccctagtttttcaaattggactcaagaatgatcttagtgttggtggttttgtggttttctttgagactttgttattgacagaacagcttctggaaatctttttcaccgggagtatgggggcttctttggccaaaccgtgcgcgtgcaggctccatgtgctgggcagcagctgtccggccacagcctgtcggttgcatcctgctcctctacagaggtttctggcggcgctggccaaggcctgcttcggcggcaacatcgagctcttcgtcttcttcaacggcgcgctcgagaaggcccggctgcacgagtgggtcaagcggcagggcaacgagcgccagacggcacagcagatcgtcagccatgtccagaacaagggcaccccgccgccaaaggtctggttcctgccgcccgtctgcatggcccactgcatccgcctggcgctcatccgcttccacgtcaaggttgcacagagcattgaggatcaccatcaggaagtgattggtttctgcagagagaatggtttccatggcttggttgcgtatgactctgattatgcactgtgcaacatcccctactatttcagtgcccatgccctaaaactgagccggaacgggaaaagtctcaccacaagccaatatctgatgcatgaagttgccaagcaactggacctgaatccaaatcgttttcctatttttgctgctctcttaggaaatcacattctgcctgatgaagatctggcttcctttcattggagtttacttggtccagaacatccactagcctcactaaaggtccgggcccaccagctggtcttgccaccttgcgacgtagtgatcaaagccgttgctgactatgtacgcaacattcaggacacctctgacttggatgccatagctaaagatgttttccagcattcacagtctagaacagatgacaaagttattcgatttaagagagcaattggatattattcagcgactagtaagcctatgtcatttcatccaccacattacttagcagccagacccggtccgtttggaatgcctgggatggtgccgccgcatgttcctcctcagatgctcaacattccgcagacctctctgcaagcaaagcccgtggccccacaggtgcccagcccagggggcgccccgggccagggtccatacccgtacagcctctctgagccagcacctctcactttggacacgagcgggaagaatctgacggagcagaacagctacagcaacattcctcacgaagggaagcacacgccgctgtatgagcggtcctcgcccatcaacccggcccagagcggcagccccaaccacgtggattccgcctacttccctggctcttctacatcgtcatcttccgacaacgacgagggcagcggaggggcgacaaaccatatcagcgggaacaagattggctgggagaagacgggaagccactcagagcctcaggcacgaggagacccaggagaccaaacaaaggcagaaggctcgtccactgcctcttcaggaagccaactagccgaaggcaagggaagccagatgggcactgtccagccaatcccgtgcctcctgtcgatgcccaccaggaaccacatggacatcaccacacctcccctgccccccgtcgcacctgaggtgctgagagtggccgagcacaggcacaagaaggggctgatgtacccctacatcttccatgtcctgacgaagggtgaaatcaaaattgctgtttctattgaagatgaagccaacaaggacctgcctccggccgctctgctctataggccagttcgtcagtatgtttacggagtcctgtttagtttggcagaaagcagaaagaaaactgagagacttgcttttagaaagaacagacttccaccagaattttcaccagtgatcattaaagaatgggcagcttacaaaggaaagtctcctcaaaccccggaactggttgaagctcttgccttcagggagtggacctgccccaacctgaagaggctgtggttgggtaaggcggtagaggacaagaaccgcaggatgagggccttcctggcctgcatgaggtcggacaccccagccatgctcaaccctgccaacgtgcccactcacctcatggtgctctgctgcgtcttacggtacatggtgcagtggccgggagcacgcatccttcggcgtcaggagctagatgccttcctggctcaggcgctgtcccccaaactctacgagcctgatcagctccaggagctcaagattgagaacctagatccccgaggaattcagctatcagctctcttcatgagtggagtagacatggccttgtttgcaaatgatgcatgcggacagccaatcccctgggaacactgttgtccttggatgtattttgatgggaagctcttccaatccaaactcctcaaagccagccgggaaaagaccccactcattgacctctgtgatggtcaggctgatcaggctgccaaggtagagaagatgcgccagagcgtcctcgaggggctcagcttctccaggcagagccacacgctccctttcccgccgccacctgccctgcccttctaccctgcctctgcgtacccccggcactttgggcctgtcccaccctctcagggcaggggcagaggctttgcaggcgtctgtggctttggaggcccctatggggaaacggtagcaacaggcccttaccgtgccttccgtgtggcggcagcatcgggacactgcggagccttctcaggcagtgacagcagcaggactagcaagtcccagggcggagtccaacctataccttctcagggaggcaaactagaaatagctggcactgtggttggccattgggctgggagcaggcggggccgtgggggccgggggcctttccccctgcaggtggtttctgtcggaggaccagctagagggcgtccaagaggagttatttccaccccagtgattagaacatttggaagaggtggaaggtactatggcagaggttacaaaaaccaggcagcaattcagggcagacctccttatgctgcttcagcagaagaagtggccaaagaacttaagtcaaaatctggggaatcgaagtcctctgctatgtcttcagacgggtccctggctgaaaacggagtgatggccgaggagaagccggctccccagatgaacgggagcacgggtgacgccagggcccccagccactctgaaagtgccttgaataatgactctaaaacgtgcaatacaaatcctcatttaaatgcactaagtacagacagcgcttgccgcagagaagctgctctggaggcagctgtcttaaataaagaagagtaaacttattttttatagagggtgaaggatgctggaagggtaaggatttaggaatatctggagagaaagagagcctgcagttatgtacattttgtcctttccgtaagagaaaaatgaggactttggaaattcagatccctctttgatatcagagatttaaacaacacatttttagttttaaccagttgtagtcaaaatgctacaataaaacaaaaaagagaaagaaaatgaagagcatttgactcccgcacttaaaatgaagtacacataaagtttaaactggttatgacaaaagcctatagttgtgtttcttgaactataaagaaaacaaattttggcagtctttaagtatatatagcttaaaatataatttttagcatttggcaccatatgtatgccattatatttgattttgcattactgtttcacaatgaagctttctttaaggctttgatttttatgattatgaaagaaataaggcacaaccacagtttttctttcttaaatttcatcactgttgatgtggttcttttgtgttaaaaaaaaaaagtgcaactatcaaaactaaaaaattatagagtaatattgccgttctgctgattttaaatatacaatacatcatacatactttacaagcaagttaaatggagataaagttgaaatcatagaagatgcaaatgacctttcaaaatcaacacaatgtgttctgaaactttcgtgactaataccatgcatctgtgatcaatgaactatgtggttttgaatcggatgtagaccattagtactactacttgagctaaacttctgcatggttcataatttttaaagtgtgtagttaatatgcatgttatcgtcctttcttccattcttaacagtatgtgcccatttgcaaaacaaaaatgctaataatcagtaatagtcctataaaagatgttaactctgtttagtcattgactgatcttgctctaaccttaaaattttgtgattattgacctctgttgcatttattccgtgccccccttctgtagcagggaccaatgcgtgtt

SEQ ID NO: 306965 - DNA, 4305 bp, Homo sapiens
atttgttcgttcttctgttttcctctttttgttcgttctttttgtttcttcttgctgtcgcgtgtctgcttctcgtcctgttcttctcctgcgtctgctcgggcttattttataatccttgtctctcctttgtccctccggttgtgtatactgtcccgctgtttgttctctcccgtggttcccttctttcgagattttggtttctcacaatcctgctcttgtgttttctctctcccccgcttttttttatttgtgtggatattcccctccgttatttgtgtgccgcggtgcttctcctgggtatctctttttgtctactgttctaccttgacccttgtggtgccccctcgtcgtcactactcttgttttctataaacctttttctcggtcccctctttctcgccaaacaattttttttttttttctttttttttttttttttttcacattgtaaaatatagtttacttcaaaagatgatcctgaagatcccatcacagagtgtttaagggatgattataaacttttagcccttaagagagaatatatatactcaactgagtactgtctttcaaagcagtccctgtcagtttgtccattgattccatagcagctctcactgcccaccctgcttgagaagcctcttggagttgcctagagagtctatagcactcatctgaaggccctccatgagaacaactcttctcttccacatagatatttttgcatcagcccaaagctatttggacacaagtttggtgaacacggtaagaaaaaaacaaaccaagcaacaaaaacaaaaagcaggcagtgctgtgttagactgaaagtaaaagataaaaactctaagaacctatgaagcgccagggcagtgctggttgctttcacccatatggtctcctttggtgttctgctggtgcttatgaagcagtatccctactgacaatgaccctagcttaagagggctgagaactgctgaaagtgaagctgtttataaatggtacagtcaggaccgacagacacatgggtgtggtatgactgcaaagtacctgtggaattcagatgggattaccatccccactataaagggcaatatgatctgttgcaggagggtttatagggtacttagttacacaggtcacactgatccccttttcctctttttttctatgcaagtatctatttgtctatatgtctgtctaccttggtaggttgggctccttgaagaagggttatgttttcttcatctccatatccccagtagctggccaatgcccagtatacaccaggggctcagtcgctgtttgtcttattttcttgttgactctactctgacttaggacatatcactttcctctcttgaccttcacattcagatgtgttaataaaagtggataaagaccactctagctttaaaacaccctccaatatagagagaactctgaaaccagaagcagaagctgaggaatggtgaatagagcattttccctcacacgatgggtatcagggtggtttcttgtcctttcaatgcctctgcagaacttgaccctagtttttcaaattggactcaagaatgatcttagtgttggtggttttgtggttttctttgagactttgttattgacagaacagcttctggaaatctttttcaccgggagtatgggggcttctttggccaaaccgtgcgcgtgcaggctccatgtgctgggcagcagctgtccggccacagcctgtcggttgcatcctgctcctctacagaggtttctggcggcgctggccaaggcctgcttcggcggcaacatcgagctcttcgtcttcttcaacggcgcgctcgagaaggcccggctgcacgagtgggtcaagcggcagggcaacgagcgccagacggcacagcagatcgtcagccatgtccagaacaagggcaccccgccgccaaaggtctggttcctgccgcccgtctgcatggcccactgcatccgcctggcgctcatccgcttccacgtcaaggttgcacagagcattgaggatcaccatcaggaagtgattggtttctgcagagagaatggtttccatggcttggttgcgtatgactctgattatgcactgtgcaacatcccctactatttcagtgcccatgccctaaaactgagccggaacgggaaaagtctcaccacaagccaatatctgatgcatgaagttgccaagcaactggacctgaatccaaatcgttttcctatttttgctgctctcttaggaaatcacattctgcctgatgaagatctggcttcctttcattggagtttacttggtccagaacatccactagcctcactaaaggtccgggcccaccagctggtcttgccaccttgcgacgtagtgatcaaagccgttgctgactatgtacgcaacattcaggacacctctgacttggatgccatagctaaagatgttttccagcattcacagtctagaacagatgacaaagttattcgatttaagagagcaattggatattattcagcgactagtaagcctatgtcatttcatccaccacattacttagcagccagacccggtccgtttggaatgcctgggatggtgccgccgcatgttcctcctcagatgctcaacattccgcagacctctctgcaagcaaagcccgtggccccacaggtgcccagcccagggggcgccccgggccagggtccatacccgtacagcctctctgagccagcacctctcactttggacacgagcgggaagaatctgacggagcagaacagctacagcaacattcctcacgaagggaagcacacgccgctgtatgagcggtcctcgcccatcaacccggcccagagcggcagccccaaccacgtggattccgcctacttccctggctcttctacatcgtcatcttccgacaacgacgagggcagcggaggggcgacaaaccatatcagcgggaacaagattggctgggagaagacgggaagccactcagagcctcaggcacgaggagacccaggagaccaaacaaaggcagaaggctcgtccactgcctcttcaggaagccaactagccgaaggcaagggaagccagatgggcactgtccagccaatcccgtgcctcctgtcgatgcccaccaggaaccacatggacatcaccacacctcccctgccccccgtcgcacctgaggtgctgagagtggccgagcacaggcacaagaaggggctgatgtacccctacatcttccatgtcctgacgaagggtgaaatcaaaattgctgtttctattgaagatgaagccaacaaggacctgcctccggccgctctgctctataggccagttcgtcagtatgtttacggagtcctgtttagtttggcagaaagcagaaagaaaactgagagacttgcttttagaaagaacagacttccaccagaatagtatgtgcccatttgcaaaacaaaaatgctaataatcagtaatagtcctataaaagatgttaactctgtttagtcattgactgatcttgctctaaccttaaaattttgtgattattgacctctgttgcatttattctaaagccccccaaaaattatctagccgtttcgaatatcaacattaccctggtgtattcactgctgtatgcattattgttctttgttgctgttttatgccttcatattagcaaatatgaaattctgtgaaaaaaaaccctttgatcttaaaaaaaaaaaaaccaccccccccttctgtagcaggaaacaaattgcttgttcttgagaactttcccatcaagaatttagtagaagcaggtatacttctatcattttgatgtttttgttaatgtttccaaacaatgtactttgaaatcagaatcacttcttatcgttttcatatacttctgatgctcttcatcacattagtgatcagaaatgaggtgtaattccccaacccctgcccgcaagagctaagtaggatcttactgtaagttgaagggagttttgccctaactcatggattgtgcaagaatgaactgctgttgggtttgattgactgtcgatggattgtggtgtggtgtatctgaaggctattgaatgcaacttacaatgcttaataaaaatctttattcttttaggtataaaaaaaaaaaaaaaaaaaaaaaaaaaaagaagaaagcagaaaagaagcagaaaaagcaaagaggaaaaagaaaaagaaaaagagcagaaagaatgaaacaggaagaaacagagaaggaaagaaaaggaggcaagcagaagaacaagaacaagaagacacaatgt

SEQ ID NO: 306966 - DNA, 5264 bp, Homo sapiens
atttgttcgttcttctgttttcctctttttgttcgttctttttgtttcttcttgctgtcgcgtgtctgcttctcgtcctgttcttctcctgcgtctgctcgggcttattttataatccttgtctctcctttgtccctccggttgtgtatactgtcccgctgtttgttctctcccgtggttcccttctttcgagattttggtttctcacaatcctgctcttgtgttttctctctcccccgcttttttttatttgtgtggatattcccctccgttatttgtgtgccgcggtgcttctcctgggtatctctttttgtctactgttctaccttgacccttgtggtgccccctcgtcgtcactactcttgttttctataaacctttttctcggtcccctctttctcgccaaacaattttttttttttttctttttttttttttttttttcacattgtaaaatatagtttacttcaaaagatgatcctgaagatcccatcacagagtgtttaagggatgattataaacttttagcccttaagagagaatatatatactcaactgagtactgtctttcaaagcagtccctgtcagtttgtccattgattccatagcagctctcactgcccaccctgcttgagaagcctcttggagttgcctagagagtctatagcactcatctgaaggccctccatgagaacaactcttctcttccacatagatatttttgcatcagcccaaagctatttggacacaagtttggtgaacacggtaagaaaaaaacaaaccaagcaacaaaaacaaaaagcaggcagtgctgtgttagactgaaagtaaaagataaaaactctaagaacctatgaagcgccagggcagtgctggttgctttcacccatatggtctcctttggtgttctgctggtgcttatgaagcagtatccctactgacaatgaccctagcttaagagggctgagaactgctgaaagtgaagctgtttataaatggtacagtcaggaccgacagacacatgggtgtggtatgactgcaaagtacctgtggaattcagatgggattaccatccccactataaagggcaatatgatctgttgcaggagggtttatagggtacttagttacacaggtcacactgatccccttttcctctttttttctatgcaagtatctatttgtctatatgtctgtctaccttggtaggttgggctccttgaagaagggttatgttttcttcatctccatatccccagtagctggccaatgcccagtatacaccaggggctcagtcgctgtttgtcttattttcttgttgactctactctgacttaggacatatcactttcctctcttgaccttcacattcagatgtgttaataaaagtggataaagaccactctagctttaaaacaccctccaatatagagagaactctgaaaccagaagcagaagctgaggaatggtgaatagagcattttccctcacacgatgggtatcagggtggtttcttgtcctttcaatgcctctgcagaacttgaccctagtttttcaaattggactcaagaatgatcttagtgttggtggttttgtggttttctttgagactttgttattgacagaacagcttctggaaatctttttcaccgggagtatgggggcttctttggccaaaccgtgcgcgtgcaggctccatgtgctgggcagcagctgtccggccacagcctgtcggttgcatcctgctcctctacagaggtttctggcggcgctggccaaggcctgcttcggcggcaacatcgagctcttcgtcttcttcaacggcgcgctcgagaaggcccggctgcacgagtgggtcaagcggcagggcaacgagcgccagacggcacagcagatcgtcagccatgtccagaacaagggcaccccgccgccaaaggtctggttcctgccgcccgtctgcatggcccactgcatccgcctggcgctcatccgcttccacgtcaaggttgcacagagcattgaggatcaccatcaggaagtgattggtttctgcagagagaatggtttccatggcttggttgcgtatgactctgattatgcactgtgcaacatcccctactatttcagtgcccatgccctaaaactgagccggaacgggaaaagtctcaccacaagccaatatctgatgcatgaagttgccaagcaactggacctgaatccaaatcgttttcctatttttgctgctctcttaggaaatcacattctgcctgatgaagatctggcttcctttcattggagtttacttggtccagaacatccactagcctcactaaaggtccgggcccaccagctggtcttgccaccttgcgacgtagtgatcaaagccgttgctgactatgtacgcaacattcaggacacctctgacttggatgccatagctaaagatgttttccagcattcacagtctagaacagatgacaaagttattcgatttaagagagcaattggatattattcagcgactagtaagcctatgtcatttcatccaccacattacttagcagccagacccggtccgtttggaatgcctgggatggtgccgccgcatgttcctcctcagatgctcaacattccgcagacctctctgcaagcaaagcccgtggccccacaggtgcccagcccagggggcgccccgggccagggtccatacccgtacagcctctctgagccagcacctctcactttggacacgagcgggaagaatctgacggagcagaacagctacagcaacattcctcacgaagggaagcacacgccgctgtatgagcggtcctcgcccatcaacccggcccagagcggcagccccaaccacgtggattccgcctacttccctggctcttctacatcgtcatcttccgacaacgacgagggcagcggaggggcgacaaaccatatcagcgggaacaagattggctgggagaagacgggaagccactcagagcctcaggcacgaggagacccaggagaccaaacaaaggcagaaggctcgtccactgcctcttcaggaagccaactagccgaaggcaagggaagccagatgggcactgtccagccaatcccgtgcctcctgtcgatgcccaccaggaaccacatggacatcaccacacctcccctgccccccgtcgcacctgaggtgctgagagtggccgagcacaggcacaagaaggggctgatgtacccctacatcttccatgtcctgacgaagggtgaaatcaaaattgctgtttctattgaagatgaagccaacaaggacctgcctccggccgctctgctctataggccagttcgtcagtatgtttacggagtcctgtttagtttggcagaaagcagaaagaaaactgagagacttgcttttagaaagaacagacttccaccagaattttcaccagtgatcattaaagaatgggcagcttacaaaggaaagtctcctcaaaccccggaactggttgaagctcttgccttcagggagtggacctgccccaacctgaagaggctgtggttgggtaaggcggtagaggacaagaaccgcaggatgagggccttcctggcctgcatgaggtcggacaccccagccatgctcaaccctgccaacgtgcccactcacctcatggtgctctgctgcgtcttacggtacatggtgcagtggccgggagcacgcatccttcggcgtcaggagctagatgccttcctggctcaggcgctgtcccccaaactctacgagcctgatcagctccaggagctcaagattgagaacctagatccccgaggaattcagctatcagctctcttcatgagtggagtagacatggccttgtttgcaaatgatgcatgcggacagccaatcccctgggaacactgttgtccttggatgtattttgatgggaagctcttccaatccaaactcctcaaagccagccgggaaaagaccccactcattgacctctgtgatggtcaggctgatcaggctgccaaggtagagaagatgcgccagagcgtcctcgaggggctcagcttctccaggcagagccacacgctccctttcccgccgccacctgccctgcccttctaccctgcctctgcgtacccccggcactttgggcctgtcccaccctctcagggcaggggcagaggctttgcaggcgtctgtggctttggaggcccctatggggaaacggtagcaacaggcccttaccgtgccttccgtgtggcggcagcatcgggacactgcggagccttctcaggcagtgacagcagcaggactagcaagtcccagggcggagtccaacctataccttctcagggaggcaaactagaaatagctggcactgtggttggccattgggctgggagcaggcggggccgtgggggccgggggcctttccccctgcaggtggtttctgtcggaggaccagctagagggcgtccaagaggagttatttccaccccagtgattagaacatttggaagaggtggaaggtactatggcagaggttacaaaaaccaggcagcaattcagggcagacctccttatgctgcttcagcagaagaagtggccaaagaacttaagtcaaaatctggggaatcgaagtcctctgctatgtcttcagacgggtccctggctgaaaacggagtgatggccgaggagaagccggctccccagatgaacgggagcacgggtgacgccagggcccccagccactctgaaagtgccttgaataatgactctaaaacgtgcaatacaaatcctcatttaaatgcactaagtacagacagcgcttgccgcagagaagctgctctggaggcagctgtcttaaataaagaagagtaaacttattttttatagagggtgaaggatgctggaagggtaaggatttaggaatatctggagagaaagagagcctgcagttatgtacattttgtcctttccgtaagagaaaaatgaggactttggaaattcagatccctctttgatatcagagatttaaacaacacatttttagttttaaccagttgtagtcaaaatgctacaataaaacaaaaaaaaaaaaaaaaaaaaaaaaaaaaaaaagaagaaagcagaaaagaagcagaaaaagcaaagaggaaaaagaaaaagaaaaagagcagaaagaatgaaacaggaagaaacagagaaggaaagaaaaggaggcaagcagaagaacaagaacaagaagacacaatgt

SEQ ID NO: 306967 - DNA, 3701 bp, Homo sapiens
atttgttcgttcttctgttttcctctttttgttcgttctttttgtttcttcttgctgtcgcgtgtctgcttctcgtcctgttcttctcctgcgtctgctcgggcttattttataatccttgtctctcctttgtccctccggttgtgtatactgtcccgctgtttgttctctcccgtggttcccttctttcgagattttggtttctcacaatcctgctcttgtgttttctctctcccccgcttttttttatttgtgtggatattcccctccgttatttgtgtgccgcggtgcttctcctgggtatctctttttgtctactgttctaccttgacccttgtggtgccccctcgtcgtcactactcttgttttctataaacctttttctcggtcccctctttctcgccaaacaattttttttttttttctttttttttttttttttttcacattgtaaaatatagtttacttcaaaagatgatcctgaagatcccatcacagagtgtttaagggatgattataaacttttagcccttaagagagaatatatatactcaactgagtactgtctttcaaagcagtccctgtcagtttgtccattgattccatagcagctctcactgcccaccctgcttgagaagcctcttggagttgcctagagagtctatagcactcatctgaaggccctccatgagaacaactcttctcttccacatagatatttttgcatcagcccaaagctatttggacacaagtttggtgaacacggtaagaaaaaaacaaaccaagcaacaaaaacaaaaagcaggcagtgctgtgttagactgaaagtaaaagataaaaactctaagaacctatgaagcgccagggcagtgctggttgctttcacccatatggtctcctttggtgttctgctggtgcttatgaagcagtatccctactgacaatgaccctagcttaagagggctgagaactgctgaaagtgaagctgtttataaatggtacagtcaggaccgacagacacatgggtgtggtatgactgcaaagtacctgtggaattcagatgggattaccatccccactataaagggcaatatgatctgttgcaggagggtttatagggtacttagttacacaggtcacactgatccccttttcctctttttttctatgcaagtatctatttgtctatatgtctgtctaccttggtaggttgggctccttgaagaagggttatgttttcttcatctccatatccccagtagctggccaatgcccagtatacaccaggggctcagtcgctgtttgtcttattttcttgttgactctactctgacttaggacatatcactttcctctcttgaccttcacattcagatgtgttaataaaagtggataaagaccactctagctttaaaacaccctccaatatagagagaactctgaaaccagaagcagaagctgaggaatggtgaatagagcattttccctcacacgatgggtatcagggtggtttcttgtcctttcaatgcctctgcagaacttgaccctagtttttcaaattggactcaagaatgatcttagtgttggtggttttgtggttttctttgagactttgttattgacagaacagcttctggaaatctttttcaccgggagtatgggggcttctttggccaaaccgtgcgcgtgcaggctccatgtgctgggcagcagctgtccggccacagcctgtcggttgcatcctgctcctctacagaggtttctggcggcgctggccaaggcctgcttcggcggcaacatcgagctcttcgtcttcttcaacggcgcgctcgagaaggcccggctgcacgagtgggtcaagcggcagggcaacgagcgccagacggcacagcagatcgtcagccatgtccagaacaagggcaccccgccgccaaaggtctggttcctgccgcccgtctgcatggcccactgcatccgcctggcgctcatccgcttccacgtcaaggttgcacagagcattgaggatcaccatcaggaagtgattggtttctgcagagagaatggtttccatggcttggttgcgtatgactctgattatgcactgtgcaacatcccctactatttcagtgcccatgccctaaaactgagccggaacgggaaaagtctcaccacaagccaatatctgatgcatgaagttgccaagcaactggacctgaatccaaatcgttttcctatttttgctgctctcttaggaaatcacattctgcctgatgaagatctggcttcctttcattggagtttacttggtccagaacatccactagcctcactaaaggtccgggcccaccagctggtcttgccaccttgcgacgtagtgatcaaagccgttgctgactatgtacgcaacattcaggacacctctgacttggatgccatagctaaagatgttttccagcattcacagtctagaacagatgacaaagttattcgatttaagagagcaattggatattattcagcgactagtaagcctatgtcatttcatccaccacattacttagcagccagacccggtccgtttggaatgcctgggatggtgccgccgcatgttcctcctcagatgctcaacattccgcagacctctctgcaagcaaagcccgtggccccacaggtgcccagcccagggggcgccccgggccagggtccatacccgtacagcctctctgagccagcacctctcactttggacacgagcgggaagaatctgacggagcagaacagctacagcaacattcctcacgaagggaagcacacgccgctgtatgagcggtcctcgcccatcaacccggcccagagcggcagccccaaccacgtggattccgcctacttccctggctcttctacatcgtcatcttccgacaacgacgagggcagcggaggggcgacaaaccatatcagcgggaacaagattggctgggagaagacgggaagccactcagagcctcaggcacgaggagacccaggagaccaaacaaaggcagaaggctcgtccactgcctcttcaggaagccaactagccgaaggcaagggaagccagatgggcactgtccagccaatcccgtgcctcctgtcgatgcccaccaggaaccacatggacatcaccacacctcccctgccccccgtcgcacctgaggtgctgagagtggccgagcacaggcacaagaaggggctgatgtacccctacatcttccatgtcctgacgaagggtgaaatcaaaattgctgtttctattgaagatgaagccaacaaggacctgcctccggccgctctgctctataggccagttcgtcagtatgtttacggagtcctgtttagtttggcagaaagcagaaagaaaactgagagacttgcttttagaaagaacagacttccaccagaattatgtactgtaacaatccattgtttgttttcctcggtacctcgtaatctcttgtgcattttctaaagccttagaagaatcatgactgagttgaccccgagtgcctctgtgtaaaggaggtgggcccatcatcggggcagtaggccagggtaaaggctcttagaaaaggaggagaagccacagactttcttcctcagtaacattccaataatgatgtttattcagtaaaataataaaacaggtttacactttaaagtgaatg

SEQ ID NO: 306968 - DNA, 3722 bp, Homo sapiens
atttgttcgttcttctgttttcctctttttgttcgttctttttgtttcttcttgctgtcgcgtgtctgcttctcgtcctgttcttctcctgcgtctgctcgggcttattttataatccttgtctctcctttgtccctccggttgtgtatactgtcccgctgtttgttctctcccgtggttcccttctttcgagattttggtttctcacaatcctgctcttgtgttttctctctcccccgcttttttttatttgtgtggatattcccctccgttatttgtgtgccgcggtgcttctcctgggtatctctttttgtctactgttctaccttgacccttgtggtgccccctcgtcgtcactactcttgttttctataaacctttttctcggtcccctctttctcgccaaacaattttttttttttttctttttttttttttttttttcacattgtaaaatatagtttacttcaaaagatgatcctgaagatcccatcacagagtgtttaagggatgattataaacttttagcccttaagagagaatatatatactcaactgagtactgtctttcaaagcagtccctgtcagtttgtccattgattccatagcagctctcactgcccaccctgcttgagaagcctcttggagttgcctagagagtctatagcactcatctgaaggccctccatgagaacaactcttctcttccacatagatatttttgcatcagcccaaagctatttggacacaagtttggtgaacacggtaagaaaaaaacaaaccaagcaacaaaaacaaaaagcaggcagtgctgtgttagactgaaagtaaaagataaaaactctaagaacctatgaagcgccagggcagtgctggttgctttcacccatatggtctcctttggtgttctgctggtgcttatgaagcagtatccctactgacaatgaccctagcttaagagggctgagaactgctgaaagtgaagctgtttataaatggtacagtcaggaccgacagacacatgggtgtggtatgactgcaaagtacctgtggaattcagatgggattaccatccccactataaagggcaatatgatctgttgcaggagggtttatagggtacttagttacacaggtcacactgatccccttttcctctttttttctatgcaagtatctatttgtctatatgtctgtctaccttggtaggttgggctccttgaagaagggttatgttttcttcatctccatatccccagtagctggccaatgcccagtatacaccaggggctcagtcgctgtttgtcttattttcttgttgactctactctgacttaggacatatcactttcctctcttgaccttcacattcagatgtgttaataaaagtggataaagaccactctagctttaaaacaccctccaatatagagagaactctgaaaccagaagcagaagctgaggaatggtgaatagagcattttccctcacacgatgggtatcagggtggtttcttgtcctttcaatgcctctgcagaacttgaccctagtttttcaaattggactcaagaatgatcttagtgttggtggttttgtggttttctttgagactttgttattgacagaacagcttctggaaatctttttcaccgggagtatgggggcttctttggccaaaccgtgcgcgtgcaggctccatgtgctgggcagcagctgtccggccacagcctgtcggttgcatcctgctcctctacagaggtttctggcggcgctggccaaggcctgcttcggcggcaacatcgagctcttcgtcttcttcaacggcgcgctcgagaaggcccggctgcacgagtgggtcaagcggcagggcaacgagcgccagacggcacagcagatcgtcagccatgtccagaacaagggcaccccgccgccaaaggtctggttcctgccgcccgtctgcatggcccactgcatccgcctggcgctcatccgcttccacgtcaaggttgcacagagcattgaggatcaccatcaggaagtgattggtttctgcagagagaatggtttccatggcttggttgcgtatgactctgattatgcactgtgcaacatcccctactatttcagtgcccatgccctaaaactgagccggaacgggaaaagtctcaccacaagccaatatctgatgcatgaagttgccaagcaactggacctgaatccaaatcgttttcctatttttgctgctctcttaggaaatcacattctgcctgatgaagatctggcttcctttcattggagtttacttggtccagaacatccactagcctcactaaaggtccgggcccaccagctggtcttgccaccttgcgacgtagtgatcaaagccgttgctgactatgtacgcaacattcaggacacctctgacttggatgccatagctaaagatgttttccagcattcacagtctagaacagatgacaaagttattcgatttaagagagcaattggatattattcagcgactagtaagcctatgtcatttcatccaccacattacttagcagccagacccggtccgtttggaatgcctgggatggtgccgccgcatgttcctcctcagatgctcaacattccgcagacctctctgcaagcaaagcccgtggccccacaggtgcccagcccagggggcgccccgggccagggtccatacccgtacagcctctctgagccagcacctctcactttggacacgagcgggaagaatctgacggagcagaacagctacagcaacattcctcacgaagggaagcacacgccgctgtatgagcggtcctcgcccatcaacccggcccagagcggcagccccaaccacgtggattccgcctacttccctggctcttctacatcgtcatcttccgacaacgacgagggcagcggaggggcgacaaaccatatcagcgggaacaagattggctgggagaagacgggaagccactcagagcctcaggcacgaggagacccaggagaccaaacaaaggcagaaggctcgtccactgcctcttcaggaagccaactagccgaaggcaagggaagccagatgggcactgtccagccaatcccgtgcctcctgtcgatgcccaccaggaaccacatggacatcaccacacctcccctgccccccgtcgcacctgaggtgctgagagtggccgagcacaggcacaagaaggggctgatgtacccctacatcttccatgtcctgacgaaggttcaacataaattataaaggggtgaaatcaaaattgctgtttctattgaagatgaagccaacaaggacctgcctccggccgctctgctctataggccagttcgtcagtatgtttacggagtcctgtttagtttggcagaaagcagaaagaaaactgagagacttgcttttagaaagaacagacttccaccagaattatgtactgtaacaatccattgtttgttttcctcggtacctcgtaatctcttgtgcattttctaaagccttagaagaatcatgactgagttgaccccgagtgcctctgtgtaaaggaggtgggcccatcatcggggcagtaggccagggtaaaggctcttagaaaaggaggagaagccacagactttcttcctcagtaacattccaataatgatgtttattcagtaaaataataaaacaggtttacactttaaagtgaatg

SEQ ID NO: 306969 - DNA, 5099 bp, Homo sapiens
  misc_feature (4526)..(4526): n is a, c, g, or t
atttgttcgttcttctgttttcctctttttgttcgttctttttgtttcttcttgctgtcgcgtgtctgcttctcgtcctgttcttctcctgcgtctgctcgggcttattttataatccttgtctctcctttgtccctccggttgtgtatactgtcccgctgtttgttctctcccgtggttcccttctttcgagattttggtttctcacaatcctgctcttgtgttttctctctcccccgcttttttttatttgtgtggatattcccctccgttatttgtgtgccgcggtgcttctcctgggtatctctttttgtctactgttctaccttgacccttgtggtgccccctcgtcgtcactactcttgttttctataaacctttttctcggtcccctctttctcgccaaacaattttttttttttttctttttttttttttttttttcacattgtaaaatatagtttacttcaaaagatgatcctgaagatcccatcacagagtgtttaagggatgattataaacttttagcccttaagagagaatatatatactcaactgagtactgtctttcaaagcagtccctgtcagtttgtccattgattccatagcagctctcactgcccaccctgcttgagaagcctcttggagttgcctagagagtctatagcactcatctgaaggccctccatgagaacaactcttctcttccacatagatatttttgcatcagcccaaagctatttggacacaagtttggtgaacacggtaagaaaaaaacaaaccaagcaacaaaaacaaaaagcaggcagtgctgtgttagactgaaagtaaaagataaaaactctaagaacctatgaagcgccagggcagtgctggttgctttcacccatatggtctcctttggtgttctgctggtgcttatgaagcagtatccctactgacaatgaccctagcttaagagggctgagaactgctgaaagtgaagctgtttataaatggtacagtcaggaccgacagacacatgggtgtggtatgactgcaaagtacctgtggaattcagatgggattaccatccccactataaagggcaatatgatctgttgcaggagggtttatagggtacttagttacacaggtcacactgatccccttttcctctttttttctatgcaagtatctatttgtctatatgtctgtctaccttggtaggttgggctccttgaagaagggttatgttttcttcatctccatatccccagtagctggccaatgcccagtatacaccaggggctcagtcgctgtttgtcttattttcttgttgactctactctgacttaggacatatcactttcctctcttgaccttcacattcagatgtgttaataaaagtggataaagaccactctagctttaaaacaccctccaatatagagagaactctgaaaccagaagcagaagctgaggaatggtgaatagagcattttccctcacacgatgggtatcagggtggtttcttgtcctttcaatgcctctgcagaacttgaccctagtttttcaaattggactcaagaatgatcttagtgttggtggttttgtggttttctttgagactttgttattgacagaacagcttctggaaatctttttcaccgggagtatgggggcttctttggccaaaccgtgcgcgtgcaggctccatgtgctgggcagcagctgtccggccacagcctgtcggttgcatcctgctcctctacagaggtttctggcggcgctggccaaggcctgcttcggcggcaacatcgagctcttcgtcttcttcaacggcgcgctcgagaaggcccggctgcacgagtgggtcaagcggcagggcaacgagcgccagacggcacagcagatcgtcagccatgtccagaacaagggcaccccgccgccaaaggtctggttcctgccgcccgtctgcatggcccactgcatccgcctggcgctcatccgcttccacgtcaaggttgcacagagcattgaggatcaccatcaggaagtgattggtttctgcagagagaatggtttccatggcttggttgcgtatgactctgattatgcactgtgcaacatcccctactatttcagtgcccatgccctaaaactgagccggaacgggaaaagtctcaccacaagccaatatctgatgcatgaagttgccaagcaactggacctgaatccaaatcgttttcctatttttgctgctctcttaggaaatcacattctgcctgatgaagatctggcttcctttcattggagtttacttggtccagaacatccactagcctcactaaaggtccgggcccaccagctggtcttgccaccttgcgacgtagtgatcaaagccgttgctgactatgtacgcaacattcaggacacctctgacttggatgccatagctaaagatgttttccagcattcacagtctagaacagatgacaaagttattcgatttaagagagcaattggatattattcagcgactagtaagcctatgtcatttcatccaccacattacttagcagccagacccggtccgtttggaatgcctgggatggtgccgccgcatgttcctcctcagatgctcaacattccgcagacctctctgcaagcaaagcccgtggccccacaggtgcccagcccagggggcgccccgggccagggtccatacccgtacagcctctctgagccagcacctctcactttggacacgagcgggaagaatctgacggagcagaacagctacagcaacattcctcacgaagggaagcacacgccgctgtatgagcggtcctcgcccatcaacccggcccagagcggcagccccaaccacgtggattccgcctacttccctggctcttctacatcgtcatcttccgacaacgacgagggcagcggaggggcgacaaaccatatcagcgggaacaagattggctgggagaagacgggaagccactcagagcctcaggcacgaggagacccaggagaccaaacaaaggcagaaggctcgtccactgcctcttcaggaagccaactagccgaaggcaagggaagccagatgggcactgtccagccaatcccgtgcctcctgtcgatgcccaccaggaaccacatggacatcaccacacctcccctgccccccgtcgcacctgaggtgctgagagtggccgagcacaggcacaagaaggggctgatgtacccctacatcttccatgtcctgacgaaggtattatcaaaggggccctggagtggcttctgttatttgatgagtggccattcctatgggtgttttgtccttttgtccttttttgaaccatttttctgtcttactaatctacttgaaacaaagttcactttcccctttctaaacattgaatgaaagatgaacatttataactgtaaatagttttaaaataactcgtgaaaagtctcacttttttccttcaacttagtatagaatattttatacttctaatgaaataatgcatcacattattttatgacttgtaattttattctttttacttcaatttcagaattttcttaaaccatatttgtgctgtaatgtcaggtttaattctgatgtcagatacaatatctggttcctttatcatttgtgcttagaaaataatgtttccccctttgaatggctcatagtgcttcatgtgttttgacttgttcatgacctcattgagtgcagttttaatagtgctaagaacaaaaaatataatacaggattttgttaacatacgcatagtcagaaaatgaaactatcattttatacagtgtcataatttcactttattagtgtcttaatgtatgcttaaatatatacatatagtgtggcatcaattattttttaatcttggtgtctcaaatgtatctatgtgtatttaaatttcctcagtgatttgtagtctttatgttggcacttttaatcttagccccacaatttaacaagttacctcagttactagattaatcctgcagaactggtttattgctatcatgtattattaacatgaatacctatatgaccatatataaccagacttttctgtctattctctacaacccatctgtggtttgtaaaatggagtcaataaatgcaataatgaactcctgttctcaaatactcctgaggtggacttcaactgttaactgactaatccaaatattgcttacttttattaattaaaggacatggaaaacatgtagccagtactatttgctcagatcctttaatttattttttagttgtaatgcctccaaatctcatctattatttgatatgggtatgcatttatagtatcacttttcagattatggttgtaaggtgaacattttatttttcaggttcaacataaattataaagggtaagtgaaaagtaattgttgtggggaaaacattttgctaagtttaaggaaccaaagttttgggaagacatctttcaaaataaggtgtgaagaaacaacactcattcctngtggggctgtttgaaatgtaaggtccccaggagctacctgttatgtccacactgctggatctgatgcgtggatagtcggttagatctatatgagggttgcaaattgtaccgacatgctttcttatttcttatgaatttcaagggcaaatactgataaaatgaccatggttgagaaaattgtcttttcacattttaaaatgctacttaagttttttcagtttatcctataagctgaatggctctggtattaattgcccaggctaagacatttacagtgagatgcatctttatggtaatgaagagaatttgcaaagcatcatattattgagataaatattccctagatgagagtgttagaacacatgtagctactggattaatgaatatgaaagtatggagggtaaggggaaagaccagtttttaaattaaacttatgtgaatgaaagaaacagcaaatattacaaaattattatttaaagcatatatatcaatgaacttcatagacattgaggtcataaatgcattgttgtgctctgagtataattaaataaaatttgttgcatgaaatcttga

SEQ ID NO: 306970 - DNA, 2262 bp, Homo sapiens
atttgttcgttcttctgttttcctctttttgttcgttctttttgtttcttcttgctgtcgcgtgtctgcttctcgtcctgttcttctcctgcgtctgctcgggcttattttataatccttgtctctcctttgtccctccggttgtgtatactgtcccgctgtttgttctctcccgtggttcccttctttcgagattttggtttctcacaatcctgctcttgtgttttctctctcccccgcttttttttatttgtgtggatattcccctccgttatttgtgtgccgcggtgcttctcctgggtatctctttttgtctactgttctaccttgacccttgtggtgccccctcgtcgtcactactcttgttttctataaacctttttctcggtcccctctttctcgccaaacaattttttttttttttctttttttttttttttttttcacattgtaaaatatagtttacttcaaaagatgatcctgaagatcccatcacagagtgtttaagggatgattataaacttttagcccttaagagagaatatatatactcaactgagtactgtctttcaaagcagtccctgtcagtttgtccattgattccatagcagctctcactgcccaccctgcttgagaagcctcttggagttgcctagagagtctatagcactcatctgaaggccctccatgagaacaactcttctcttccacatagatatttttgcatcagcccaaagctatttggacacaagtttggtgaacacggtaagaaaaaaacaaaccaagcaacaaaaacaaaaagcaggcagtgctgtgttagactgaaagtaaaagataaaaactctaagaacctatgaagcgccagggcagtgctggttgctttcacccatatggtctcctttggtgttctgctggtgcttatgaagcagtatccctactgacaatgaccctagcttaagagggctgagaactgctgaaagtgaagctgtttataaatggtacagtcaggaccgacagacacatgggtgtggtatgactgcaaagtacctgtggaattcagatgggattaccatccccactataaagggcaatatgatctgttgcaggagggtttatagggtacttagttacacaggtcacactgatccccttttcctctttttttctatgcaagtatctatttgtctatatgtctgtctaccttggtaggttgggctccttgaagaagggttatgttttcttcatctccatatccccagtagctggccaatgcccagtatacaccaggggctcagtcgctgtttgtcttattttcttgttgactctactctgacttaggacatatcactttcctctcttgaccttcacattcagatgtgttaataaaagtggataaagaccactctagctttaaaacaccctccaatatagagagaactctgaaaccagaagcagaagctgaggaatggtgaatagagcattttccctcacacgatgggtatcagggtggtttcttgtcctttcaatgcctctgcagaacttgaccctagtttttcaaattggactcaagaatgatcttagtgttggtggttttgtggttttctttgagactttgttattgacagaacagcttctggaaatctttttcaccgggagtatgggggcttctttggccaaaccgtgcgcgtgcaggctccatgtgctgggcagcagctgtccggccacagcctgtcggttgcatcctgctcctctacagaggtttctgccgcggaactgcattctcgcgctccttcctgctctttccaagaagccaggcgcggccggccagcatcccgctctcccggaccccgcagtcagtgtgggcagcaggcccagagtggtgcgagccgacggcggcgttagaaaggcggcgtcccgacgaacagagtgactcggcctcggctccccttcaaagcgccatcttatcgctgcttccctcaggagcaggcgagctcttccccaggacctgcttcgcggcttcccttcgcccgagaaccaccgggcggaggcggcggcctctctggccctgccgggaacagggcgcaggggaggggagcggcggccgaccggcctgaggcgggcgaacggcctctggcctccaggcgctgcctgctccggctcagaagcctcccggatcccgtcccggcccaactccgggcctccgcctccgccgccgcctccgggagccccgagccgcgtcccgccggcgccgcctcttccgcc

SEQ ID NO: 306971 - DNA, 2383 bp, Homo sapiens
atttgttcgttcttctgttttcctctttttgttcgttctttttgtttcttcttgctgtcgcgtgtctgcttctcgtcctgttcttctcctgcgtctgctcgggcttattttataatccttgtctctcctttgtccctccggttgtgtatactgtcccgctgtttgttctctcccgtggttcccttctttcgagattttggtttctcacaatcctgctcttgtgttttctctctcccccgcttttttttatttgtgtggatattcccctccgttatttgtgtgccgcggtgcttctcctgggtatctctttttgtctactgttctaccttgacccttgtggtgccccctcgtcgtcactactcttgttttctataaacctttttctcggtcccctctttctcgccaaacaattttttttttttttctttttttttttttttttttcacattgtaaaatatagtttacttcaaaagatgatcctgaagatcccatcacagagtgtttaagggatgattataaacttttagcccttaagagagaatatatatactcaactgagtactgtctttcaaagcagtccctgtcagtttgtccattgattccatagcagctctcactgcccaccctgcttgagaagcctcttggagttgcctagagagtctatagcactcatctgaaggccctccatgagaacaactcttctcttccacatagatatttttgcatcagcccaaagctatttggacacaagtttggtgaacacggtaagaaaaaaacaaaccaagcaacaaaaacaaaaagcaggcagtgctgtgttagactgaaagtaaaagataaaaactctaagaacctatgaagcgccagggcagtgctggttgctttcacccatatggtctcctttggtgttctgctggtgcttatgaagcagtatccctactgacaatgaccctagcttaagagggctgagaactgctgaaagtgaagctgtttataaatggtacagtcaggaccgacagacacatgggtgtggtatgactgcaaagtacctgtggaattcagatgggattaccatccccactataaagggcaatatgatctgttgcaggagggtttatagggtacttagttacacaggtcacactgatccccttttcctctttttttctatgcaagtatctatttgtctatatgtctgtctaccttggtaggttgggctccttgaagaagggttatgttttcttcatctccatatccccagtagctggccaatgcccagtatacaccaggggctcagtcgctgtttgtcttattttcttgttgactctactctgacttaggacatatcactttcctctcttgaccttcacattcagatgtgttaataaaagtggataaagaccactctagctttaaaacaccctccaatatagagagaactctgaaaccagaagcagaagctgaggaatggtgaatagagcattttccctcacacgatgggtatcagggtggtttcttgtcctttcaatgcctctgcagaacttgaccctagtttttcaaattggactcaagaatgatcttagtgttggtggttttgtggttttctttgagactttgttattgacagaacagcttctggaaatctgtaatcccagctactccagaggctgaggcaggagatcacttgaacctgggagagggaggttgcagtgagctgagaacacatcattgtactccagcctgggcaacagagcaagactccatctttttcaccgggagtatgggggcttctttggccaaaccgtgcgcgtgcaggctccatgtgctgggcagcagctgtccggccacagcctgtcggttgcatcctgctcctctacagaggtttctgccgcggaactgcattctcgcgctccttcctgctctttccaagaagccaggcgcggccggccagcatcccgctctcccggaccccgcagtcagtgtgggcagcaggcccagagtggtgcgagccgacggcggcgttagaaaggcggcgtcccgacgaacagagtgactcggcctcggctccccttcaaagcgccatcttatcgctgcttccctcaggagcaggcgagctcttccccaggacctgcttcgcggcttcccttcgcccgagaaccaccgggcggaggcggcggcctctctggccctgccgggaacagggcgcaggggaggggagcggcggccgaccggcctgaggcgggcgaacggcctctggcctccaggcgctgcctgctccggctcagaagcctcccggatcccgtcccggcccaactccgggcctccgcctccgccgccgcctccgggagccccgagccgcgtcccgccggcgccgcctcttccgcc

SEQ ID NO: 306972 - DNA, 2405 bp, Homo sapiens
atttgttcgttcttctgttttcctctttttgttcgttctttttgtttcttcttgctgtcgcgtgtctgcttctcgtcctgttcttctcctgcgtctgctcgggcttattttataatccttgtctctcctttgtccctccggttgtgtatactgtcccgctgtttgttctctcccgtggttcccttctttcgagattttggtttctcacaatcctgctcttgtgttttctctctcccccgcttttttttatttgtgtggatattcccctccgttatttgtgtgccgcggtgcttctcctgggtatctctttttgtctactgttctaccttgacccttgtggtgccccctcgtcgtcactactcttgttttctataaacctttttctcggtcccctctttctcgccaaacaattttttttttttttctttttttttttttttttttcacattgtaaaatatagtttacttcaaaagatgatcctgaagatcccatcacagagtgtttaagggatgattataaacttttagcccttaagagagaatatatatactcaactgagtactgtctttcaaagcagtccctgtcagtttgtccattgattccatagcagctctcactgcccaccctgcttgagaagcctcttggagttgcctagagagtctatagcactcatctgaaggccctccatgagaacaactcttctcttccacatagatatttttgcatcagcccaaagctatttggacacaagtttggtgaacacggtaagaaaaaaacaaaccaagcaacaaaaacaaaaagcaggcagtgctgtgttagactgaaagtaaaagataaaaactctaagaacctatgaagcgccagggcagtgctggttgctttcacccatatggtctcctttggtgttctgctggtgcttatgaagcagtatccctactgacaatgaccctagcttaagagggctgagaactgctgaaagtgaagctgtttataaatggtacagtcaggaccgacagacacatgggtgtggtatgactgcaaagtacctgtggaattcagatgggattaccatccccactataaagggcaatatgatctgttgcaggagggtttatagggtacttagttacacaggtcacactgatccccttttcctctttttttctatgcaagtatctatttgtctatatgtctgtctaccttggtaggttgggctccttgaagaagggttatgttttcttcatctccatatccccagtagctggccaatgcccagtatacaccaggggctcagtcgctgtttgtcttattttcttgttgactctactctgacttaggacatatcactttcctctcttgaccttcacattcagatgtgttaataaaagtggataaagaccactctagctttaaaacaccctccaatatagagagaactctgaaaccagaagcagaagctgaggaatggtgaatagagcattttccctcacacgatgggtatcagggtggtttcttgtcctttcaatgcctctgcagaacttgaccctagtttttcaaattggactcaagaatgatcttagtgttggtggttttgtggttttctttgagactttgttattgacagaacagcttctggaaatctttttcaccgggagtatgggggcttctttggccaaaccgtgcgcgtgcaggctccatgtgctgggcagcagctgtccggccacagcctgtcggttgcatcctgctcctctacagaggtttctgtgctctcaagacagtctcttccgtgacgagcaggcgcttagggctacctgtaccttcagacattatggtgtgtttggccatgtcatttgtcataggtgtaaaaaccacaaccgagagcccgaagctgctgggatgagcacctgccgcggaactgcattctcgcgctccttcctgctctttccaagaagccaggcgcggccggccagcatcccgctctcccggaccccgcagtcagtgtgggcagcaggcccagagtggtgcgagccgacggcggcgttagaaaggcggcgtcccgacgaacagagtgactcggcctcggctccccttcaaagcgccatcttatcgctgcttccctcaggagcaggcgagctcttccccaggacctgcttcgcggcttcccttcgcccgagaaccaccgggcggaggcggcggcctctctggccctgccgggaacagggcgcaggggaggggagcggcggccgaccggcctgaggcgggcgaacggcctctggcctccaggcgctgcctgctccggctcagaagcctcccggatcccgtcccggcccaactccgggcctccgcctccgccgccgcctccgggagccccgagccgcgtcccgccggcgccgcctcttccgcc

SEQ ID NO: 306973 - DNA, 2608 bp, Homo sapiens
atttgttcgttcttctgttttcctctttttgttcgttctttttgtttcttcttgctgtcgcgtgtctgcttctcgtcctgttcttctcctgcgtctgctcgggcttattttataatccttgtctctcctttgtccctccggttgtgtatactgtcccgctgtttgttctctcccgtggttcccttctttcgagattttggtttctcacaatcctgctcttgtgttttctctctcccccgcttttttttatttgtgtggatattcccctccgttatttgtgtgccgcggtgcttctcctgggtatctctttttgtctactgttctaccttgacccttgtggtgccccctcgtcgtcactactcttgttttctataaacctttttctcggtcccctctttctcgccaaacaattttttttttttttctttttttttttttttttttcacattgtaaaatatagtttacttcaaaagatgatcctgaagatcccatcacagagtgtttaagggatgattataaacttttagcccttaagagagaatatatatactcaactgagtactgtctttcaaagcagtccctgtcagtttgtccattgattccatagcagctctcactgcccaccctgcttgagaagcctcttggagttgcctagagagtctatagcactcatctgaaggccctccatgagaacaactcttctcttccacatagatatttttgcatcagcccaaagctatttggacacaagtttggtgaacacggtaagaaaaaaacaaaccaagcaacaaaaacaaaaagcaggcagtgctgtgttagactgaaagtaaaagataaaaactctaagaacctatgaagcgccagggcagtgctggttgctttcacccatatggtctcctttggtgttctgctggtgcttatgaagcagtatccctactgacaatgaccctagcttaagagggctgagaactgctgaaagtgaagctgtttataaatggtacagtcaggaccgacagacacatgggtgtggtatgactgcaaagtacctgtggaattcagatgggattaccatccccactataaagggcaatatgatctgttgcaggagggtttatagggtacttagttacacaggtcacactgatccccttttcctctttttttctatgcaagtatctatttgtctatatgtctgtctaccttggtaggttgggctccttgaagaagggttatgttttcttcatctccatatccccagtagctggccaatgcccagtatacaccaggggctcagtcgctgtttgtcttattttcttgttgactctactctgacttaggacatatcactttcctctcttgaccttcacattcagatgtgttaataaaagtggataaagaccactctagctttaaaacaccctccaatatagagagaactctgaaaccagaagcagaagctgaggaatggtgaatagagcattttccctcacacgatgggtatcagggtggtttcttgtcctttcaatgcctctgcagaacttgaccctagtttttcaaattggactcaagaatgatcttagtgttggtggttttgtggttttctttgagactttgttattgacagaacagcttctggaaatctttttcaccgggagtatgggggcttctttggccaaaccgtgcgcgtgcaggctccatgtgctgggcagcagctgtccggccacagcctgtcggttgcatcctgctcctctacagaggtttagtatcaacctcattttagaagcagttacgacagagctttggaacagaatttacgtaaacgacctccttccagaagatgctactaaagcaacaagattcaaatccctctccctcagaagagctgggagatccactgcaaaggcgcacgtttcagtctagccattgcgcagtggtaacgcaggctttcccacgctgcaacagacctgtgctctcaagacagtctcttccgtgacgagcaggcgcttagggctacctgtaccttcagacattatggtgtgtttggccatgtcatttgtcataggtgtaaaaaccacaaccgagagcccgaagctgctgggatgagcacctgccgcggaactgcattctcgcgctccttcctgctctttccaagaagccaggcgcggccggccagcatcccgctctcccggaccccgcagtcagtgtgggcagcaggcccagagtggtgcgagccgacggcggcgttagaaaggcggcgtcccgacgaacagagtgactcggcctcggctccccttcaaagcgccatcttatcgctgcttccctcaggagcaggcgagctcttccccaggacctgcttcgcggcttcccttcgcccgagaaccaccgggcggaggcggcggcctctctggccctgccgggaacagggcgcaggggaggggagcggcggccgaccggcctgaggcgggcgaacggcctctggcctccaggcgctgcctgctccggctcagaagcctcccggatcccgtcccggcccaactccgggcctccgcctccgccgccgcctccgggagccccgagccgcgtcccgccggcgccgcctcttccgcc

SEQ ID NO: 306974 - DNA, 2160 bp, Homo sapiens
atttgttcgttcttctgttttcctctttttgttcgttctttttgtttcttcttgctgtcgcgtgtctgcttctcgtcctgttcttctcctgcgtctgctcgggcttattttataatccttgtctctcctttgtccctccggttgtgtatactgtcccgctgtttgttctctcccgtggttcccttctttcgagattttggtttctcacaatcctgctcttgtgttttctctctcccccgcttttttttatttgtgtggatattcccctccgttatttgtgtgccgcggtgcttctcctgggtatctctttttgtctactgttctaccttgacccttgtggtgccccctcgtcgtcactactcttgttttctataaacctttttctcggtcccctctttctcgccaaacaattttttttttttttctttttttttttttttttttcacattgtaaaatatagtttacttcaaaagatgatcctgaagatcccatcacagagtgtttaagggatgattataaacttttagcccttaagagagaatatatatactcaactgagtactgtctttcaaagcagtccctgtcagtttgtccattgattccatagcagctctcactgcccaccctgcttgagaagcctcttggagttgcctagagagtctatagcactcatctgaaggccctccatgagaacaactcttctcttccacatagatatttttgcatcagcccaaagctatttggacacaagtttggtgaacacggtaagaaaaaaacaaaccaagcaacaaaaacaaaaagcaggcagtgctgtgttagactgaaagtaaaagataaaaactctaagaacctatgaagcgccagggcagtgctggttgctttcacccatatggtctcctttggtgttctgctggtgcttatgaagcagtatccctactgacaatgaccctagcttaagagggctgagaactgctgaaagtgaagctgtttataaatggtacagtcaggaccgacagacacatgggtgtggtatgactgcaaagtacctgtggaattcagatgggattaccatccccactataaagggcaatatgatctgttgcaggagggtttatagggtacttagttacacaggtcacactgatccccttttcctctttttttctatgcaagtatctatttgtctatatgtctgtctaccttggtaggttgggctccttgaagaagggttatgttttcttcatctccatatccccagtagctggccaatgcccagtatacaccaggggctcagtcgctgtttgtcttattttcttgttgactctactctgacttaggacatatcactttcctctcttgaccttcacattcagatgtgttaataaaagtggataaagaccactctagctttaaaacaccctccaatatagagagaactctgaaaccagaagcagaagctgaggaatggtgaatagagcattttccctcacacgatgggtatcagggtggtttcttgtcctttcaatgcctctgcagaacttgaccctagtttttcaaattggactcaagaatgatcttagtgttggtggttttgtggttttctttgagactttgttattgacagaacagcttctggaaatctttttcaccgggagtatgggggcttctttggccaaaccgtgcgcgtgcaggctccatgtgctgggcagcagctgtccggccacagcctgtcggttgcatcctgctcctctacagaggtttctggcggcgctggccaaggcctgcttcggcggcaacatcgagctcttcgtcttcttcaacggcgcgctcgagaaggcccggctgcacgagtgggtcaagcggcagggcaacgagcgccagacggcacagcagatcgtcagccatgtccagaacaagggcaccccgccgccaaaggtctggttcctgccgcccgtctgcatggcccactgcatccgcctggcgctcatccgcttccacgtcaaggttgcacagagcattgaggatcaccatcaggaagtgattggtttctgcagagagaatggtttccatggcttggttgcgtatgactctgattatgcactgtgcaacatcccctactatttcagtgcccaccccccgcgtagctcatatagtcctgg

SEQ ID NO: 306975 - DNA, 2386 bp, Homo sapiens
atttgttcgttcttctgttttcctctttttgttcgttctttttgtttcttcttgctgtcgcgtgtctgcttctcgtcctgttcttctcctgcgtctgctcgggcttattttataatccttgtctctcctttgtccctccggttgtgtatactgtcccgctgtttgttctctcccgtggttcccttctttcgagattttggtttctcacaatcctgctcttgtgttttctctctcccccgcttttttttatttgtgtggatattcccctccgttatttgtgtgccgcggtgcttctcctgggtatctctttttgtctactgttctaccttgacccttgtggtgccccctcgtcgtcactactcttgttttctataaacctttttctcggtcccctctttctcgccaaacaattttttttttttttctttttttttttttttttttcacattgtaaaatatagtttacttcaaaagatgatcctgaagatcccatcacagagtgtttaagggatgattataaacttttagcccttaagagagaatatatatactcaactgagtactgtctttcaaagcagtccctgtcagtttgtccattgattccatagcagctctcactgcccaccctgcttgagaagcctcttggagttgcctagagagtctatagcactcatctgaaggccctccatgagaacaactcttctcttccacatagatatttttgcatcagcccaaagctatttggacacaagtttggtgaacacggtaagaaaaaaacaaaccaagcaacaaaaacaaaaagcaggcagtgctgtgttagactgaaagtaaaagataaaaactctaagaacctatgaagcgccagggcagtgctggttgctttcacccatatggtctcctttggtgttctgctggtgcttatgaagcagtatccctactgacaatgaccctagcttaagagggctgagaactgctgaaagtgaagctgtttataaatggtacagtcaggaccgacagacacatgggtgtggtatgactgcaaagtacctgtggaattcagatgggattaccatccccactataaagggcaatatgatctgttgcaggagggtttatagggtacttagttacacaggtcacactgatccccttttcctctttttttctatgcaagtatctatttgtctatatgtctgtctaccttggtaggttgggctccttgaagaagggttatgttttcttcatctccatatccccagtagctggccaatgcccagtatacaccaggggctcagtcgctgtttgtcttattttcttgttgactctactctgacttaggacatatcactttcctctcttgaccttcacattcagatgtgttaataaaagtggataaagaccactctagctttaaaacaccctccaatatagagagaactctgaaaccagaagcagaagctgaggaatggtgaatagagcattttccctcacacgatgggtatcagggtggtttcttgtcctttcaatgcctctgcagaacttgaccctagtttttcaaattggactcaagaatgatcttagtgttggtggttttgtggttttctttgagactttgttattgacagaacagcttctggaaatctttttcaccgggagtatgggggcttctttggccaaaccgtgcgcgtgcaggctccatgtgctgggcagcagctgtccggccacagcctgtcggttgcatcctgctcctctacagaggtttctggcggcgctggccaaggcctgcttcggcggcaacatcgagctcttcgtcttcttcaacggcgcgctcgagaaggcccggctgcacgagtgggtcaagcggcagggcaacgagcgccagacggcacagcagatcgtcagccatgtccagaacaagggcaccccgccgccaaaggtctggttcctgccgcccgtctgcatggcccactgcatccgcctggcgctcatccgcttccacgtcaaggttgcacagagcattgaggatcaccatcaggaagtgattggtttctgcagagagaatggtttccatggcttggttgcgtatgactctgattatgcactgtgcaacatcccctactatttcagtgcccatgccctaaaactgagccggaacgggaaaagtctcaccacaagccaatatctgatgcatgaagttgccaagcaactggacctgaatccaaatcgttttcctatttttgctgctctcttaggtaggtggagcagtgtgaaaatattttataagggagtgaccatatgataagcacattgattcttccttagcattccttgcttcgtattattttttggcatagctaatgtgctacttttgttcttaagtgtttgt

SEQ ID NO: 306976 - DNA, 2548 bp, Homo sapiens
atttgttcgttcttctgttttcctctttttgttcgttctttttgtttcttcttgctgtcgcgtgtctgcttctcgtcctgttcttctcctgcgtctgctcgggcttattttataatccttgtctctcctttgtccctccggttgtgtatactgtcccgctgtttgttctctcccgtggttcccttctttcgagattttggtttctcacaatcctgctcttgtgttttctctctcccccgcttttttttatttgtgtggatattcccctccgttatttgtgtgccgcggtgcttctcctgggtatctctttttgtctactgttctaccttgacccttgtggtgccccctcgtcgtcactactcttgttttctataaacctttttctcggtcccctctttctcgccaaacaattttttttttttttctttttttttttttttttttcacattgtaaaatatagtttacttcaaaagatgatcctgaagatcccatcacagagtgtttaagggatgattataaacttttagcccttaagagagaatatatatactcaactgagtactgtctttcaaagcagtccctgtcagtttgtccattgattccatagcagctctcactgcccaccctgcttgagaagcctcttggagttgcctagagagtctatagcactcatctgaaggccctccatgagaacaactcttctcttccacatagatatttttgcatcagcccaaagctatttggacacaagtttggtgaacacggtaagaaaaaaacaaaccaagcaacaaaaacaaaaagcaggcagtgctgtgttagactgaaagtaaaagataaaaactctaagaacctatgaagcgccagggcagtgctggttgctttcacccatatggtctcctttggtgttctgctggtgcttatgaagcagtatccctactgacaatgaccctagcttaagagggctgagaactgctgaaagtgaagctgtttataaatggtacagtcaggaccgacagacacatgggtgtggtatgactgcaaagtacctgtggaattcagatgggattaccatccccactataaagggcaatatgatctgttgcaggagggtttatagggtacttagttacacaggtcacactgatccccttttcctctttttttctatgcaagtatctatttgtctatatgtctgtctaccttggtaggttgggctccttgaagaagggttatgttttcttcatctccatatccccagtagctggccaatgcccagtatacaccaggggctcagtcgctgtttgtcttattttcttgttgactctactctgacttaggacatatcactttcctctcttgaccttcacattcagatgtgttaataaaagtggataaagaccactctagctttaaaacaccctccaatatagagagaactctgaaaccagaagcagaagctgaggaatggtgaatagagcattttccctcacacgatgggtatcagggtggtttcttgtcctttcaatgcctctgcagaacttgaccctagtttttcaaattggactcaagaatgatcttagtgttggtggttttgtggttttctttgagactttgttattgacagaacagcttctggaaatctttttcaccgggagtatgggggcttctttggccaaaccgtgcgcgtgcaggctccatgtgctgggcagcagctgtccggccacagcctgtcggttgcatcctgctcctctacagaggtttcttcaactttgacaaaatactcccttttctaatttagcctgttctttcccagcaacaggttcatcttggaagcaggcaggatacagagtaatagagggggtttcgccagagcccttgggggctgcaaatatcagtgctgctgccgccgcccttgccaatgttgttagcccggtgacagcgagacgtgtctaagggccagtgccctggcctctacttcagaacgcagtgccctgtccgtgttcctcttagtacagggtgtttagagaatctttctatggctttttgtgttagatttcaaagacccgtgcactttgacaggatgggattttgtcagttctgtgacttcacgtccgtgtgaaagaggtctttaaggcagttcggttttgtagatcccatgcgaaaggagtcgctcaaaatcagggggcgaactacgcgggcgtgaactcgcaggatttatttttcgggtgcacagtaagtattcagtgaccttcagcggtgccctgacgggtgggtaatcagagctctatatcaccggcctcctctggccctttggcagagggcttcgcagctggcactgggccagaggagaacttcaggacccagcagtgactgtgaagataagcacatccatgatcctggacttcacgttctgattgcttgcttttttcattggttttcttgaaaacaattttgggggcctttttgttgtcttagctcttgacactcggtcttccatcttgtcatttgacatttccttgaaactgctggagctgaaagtttgtgaaa

SEQ ID NO: 306977 - DNA, 2526 bp, Homo sapiens
atttgttcgttcttctgttttcctctttttgttcgttctttttgtttcttcttgctgtcgcgtgtctgcttctcgtcctgttcttctcctgcgtctgctcgggcttattttataatccttgtctctcctttgtccctccggttgtgtatactgtcccgctgtttgttctctcccgtggttcccttctttcgagattttggtttctcacaatcctgctcttgtgttttctctctcccccgcttttttttatttgtgtggatattcccctccgttatttgtgtgccgcggtgcttctcctgggtatctctttttgtctactgttctaccttgacccttgtggtgccccctcgtcgtcactactcttgttttctataaacctttttctcggtcccctctttctcgccaaacaattttttttttttttctttttttttttttttttttcacattgtaaaatatagtttacttcaaaagatgatcctgaagatcccatcacagagtgtttaagggatgattataaacttttagcccttaagagagaatatatatactcaactgagtactgtctttcaaagcagtccctgtcagtttgtccattgattccatagcagctctcactgcccaccctgcttgagaagcctcttggagttgcctagagagtctatagcactcatctgaaggccctccatgagaacaactcttctcttccacatagatatttttgcatcagcccaaagctatttggacacaagtttggtgaacacggtaagaaaaaaacaaaccaagcaacaaaaacaaaaagcaggcagtgctgtgttagactgaaagtaaaagataaaaactctaagaacctatgaagcgccagggcagtgctggttgctttcacccatatggtctcctttggtgttctgctggtgcttatgaagcagtatccctactgacaatgaccctagcttaagagggctgagaactgctgaaagtgaagctgtttataaatggtacagtcaggaccgacagacacatgggtgtggtatgactgcaaagtacctgtggaattcagatgggattaccatccccactataaagggcaatatgatctgttgcaggagggtttatagggtacttagttacacaggtcacactgatccccttttcctctttttttctatgcaagtatctatttgtctatatgtctgtctaccttggtaggttgggctccttgaagaagggttatgttttcttcatctccatatccccagtagctggccaatgcccagtatacaccaggggctcagtcgctgtttgtcttattttcttgttgactctactctgacttaggacatatcactttcctctcttgaccttcacattcagatgtgttaataaaagtggataaagaccactctagctttaaaacaccctccaatatagagagaactctgaaaccagaagcagaagctgaggaatggtgaatagagcattttccctcacacgatgggtatcagggtggtttcttgtcctttcaatgcctctgcagaacttgaccctagtttttcaaattggactcaagaatgatcttagtgttggtggttttgtggttttctttgagactttgttattgacagaacagcttctggaaatctgtaatcccagctactccagaggctgaggcaggagatcacttgaacctgggagagggaggttgcagtgagctgagaacacatcattgtactccagcctgggcaacagagcaagactccatctttttcaccgggagtatgggggcttctttggccaaaccgtgcgcgtgcaggctccatgtgctgggcagcagctgtccggccacagcctgtcggttgcatcctgctcctctacagaggtttctgtgctctcaagacagtctcttccgtgacgagcaggcgcttagggctacctgtaccttcagacattatggtgtgtttggccatgtcatttgtcataggtgtaaaaaccacaaccgagagcccgaagctgctgggatgagcacctgccgcggaactgcattctcgcgctccttcctgctctttccaagaagccaggcgcggccggccagcatcccgctctcccggaccccgcagtcagtgtgggcagcaggcccagagtggtgcgagccgacggcggcgttagaaaggcggcgtcccgacgaacagagtgactcggcctcggctccccttcaaagcgccatcttatcgctgcttccctcaggagcaggcgagctcttccccaggacctgcttcgcggcttcccttcgcccgagaaccaccgggcggaggcggcggcctctctggccctgccgggaacagggcgcaggggaggggagcggcggccgaccggcctgaggcgggcgaacggcctctggcctccaggcgctgcctgctccggctcagaagcctcccggatcccgtcccggcccaactccgggcctccgcctccgccgccgcctccgggagccccgagccgcgtcccgccggcgccgcctcttccgcc

SEQ ID NO: 306978 - DNA, 2056 bp, Homo sapiens
atttgttcgttcttctgttttcctctttttgttcgttctttttgtttcttcttgctgtcgcgtgtctgcttctcgtcctgttcttctcctgcgtctgctcgggcttattttataatccttgtctctcctttgtccctccggttgtgtatactgtcccgctgtttgttctctcccgtggttcccttctttcgagattttggtttctcacaatcctgctcttgtgttttctctctcccccgcttttttttatttgtgtggatattcccctccgttatttgtgtgccgcggtgcttctcctgggtatctctttttgtctactgttctaccttgacccttgtggtgccccctcgtcgtcactactcttgttttctataaacctttttctcggtcccctctttctcgccaaacaattttttttttttttctttttttttttttttttttcacattgtaaaatatagtttacttcaaaagatgatcctgaagatcccatcacagagtgtttaagggatgattataaacttttagcccttaagagagaatatatatactcaactgagtactgtctttcaaagcagtccctgtcagtttgtccattgattccatagcagctctcactgcccaccctgcttgagaagcctcttggagttgcctagagagtctatagcactcatctgaaggccctccatgagaacaactcttctcttccacatagatatttttgcatcagcccaaagctatttggacacaagtttggtgaacacggtaagaaaaaaacaaaccaagcaacaaaaacaaaaagcaggcagtgctgtgttagactgaaagtaaaagataaaaactctaagaacctatgaagcgccagggcagtgctggttgctttcacccatatggtctcctttggtgttctgctggtgcttatgaagcagtatccctactgacaatgaccctagcttaagagggctgagaactgctgaaagtgaagctgtttataaatggtacagtcaggaccgacagacacatgggtgtggtatgactgcaaagtacctgtggaattcagatgggattaccatccccactataaagggcaatatgatctgttgcaggagggtttatagggtacttagttacacaggtcacactgatccccttttcctctttttttctatgcaagtatctatttgtctatatgtctgtctaccttggtaggttgggctccttgaagaagggttatgttttcttcatctccatatccccagtagctggccaatgcccagtatacaccaggggctcagtcgctgtttgtcttattttcttgttgactctactctgacttaggacatatcactttcctctcttgaccttcacattcagatgtgttaataaaagtggataaagaccactctagctttaaaacaccctccaatatagagagaactctgaaaccagaagcagaagctgaggaatggtgaatagagcattttccctcacacgatgggtatcagggtggtttcttgtcctttcaatgcctctgcagaacttgaccctagtttttcaaattggactcaagaatgatcttagtgttggtggttttgtggttttctttgagactttgttattgacagaacagcttctggaaatctgtaatcccagctactccagaggctgaggcaggagatcacttgaacctgggagagggaggttgcagtgagctgagaacacatcattgtactccagcctgggcaacagagcaagactccatctttttcaccgggagtatgggggcttctttggccaaaccgtgcgcgtgcaggctccatgtgctgggcagcagctgtccggccacagcctgtcggttgcatcctgctcctctacagaggtttctgccgcggaactgcattctcgcgctccttcctgctctttccaagaagccaggcgctgcctgctccggctcagaagcctcccggatcccgtcccggcccaactccgggcctccgcctccgccgccgcctccgggagccccgagccgcgtcccgccggcgccgcctcttccgcc

SEQ ID NO: 306979 - DNA, 2669 bp, Homo sapiens
atttgttcgttcttctgttttcctctttttgttcgttctttttgtttcttcttgctgtcgcgtgtctgcttctcgtcctgttcttctcctgcgtctgctcgggcttattttataatccttgtctctcctttgtccctccggttgtgtatactgtcccgctgtttgttctctcccgtggttcccttctttcgagattttggtttctcacaatcctgctcttgtgttttctctctcccccgcttttttttatttgtgtggatattcccctccgttatttgtgtgccgcggtgcttctcctgggtatctctttttgtctactgttctaccttgacccttgtggtgccccctcgtcgtcactactcttgttttctataaacctttttctcggtcccctctttctcgccaaacaattttttttttttttctttttttttttttttttttcacattgtaaaatatagtttacttcaaaagatgatcctgaagatcccatcacagagtgtttaagggatgattataaacttttagcccttaagagagaatatatatactcaactgagtactgtctttcaaagcagtccctgtcagtttgtccattgattccatagcagctctcactgcccaccctgcttgagaagcctcttggagttgcctagagagtctatagcactcatctgaaggccctccatgagaacaactcttctcttccacatagatatttttgcatcagcccaaagctatttggacacaagtttggtgaacacggtaagaaaaaaacaaaccaagcaacaaaaacaaaaagcaggcagtgctgtgttagactgaaagtaaaagataaaaactctaagaacctatgaagcgccagggcagtgctggttgctttcacccatatggtctcctttggtgttctgctggtgcttatgaagcagtatccctactgacaatgaccctagcttaagagggctgagaactgctgaaagtgaagctgtttataaatggtacagtcaggaccgacagacacatgggtgtggtatgactgcaaagtacctgtggaattcagatgggattaccatccccactataaagggcaatatgatctgttgcaggagggtttatagggtacttagttacacaggtcacactgatccccttttcctctttttttctatgcaagtatctatttgtctatatgtctgtctaccttggtaggttgggctccttgaagaagggttatgttttcttcatctccatatccccagtagctggccaatgcccagtatacaccaggggctcagtcgctgtttgtcttattttcttgttgactctactctgacttaggacatatcactttcctctcttgaccttcacattcagatgtgttaataaaagtggataaagaccactctagctttaaaacaccctccaatatagagagaactctgaaaccagaagcagaagctgaggaatggtgaatagagcattttccctcacacgatgggtatcagggtggtttcttgtcctttcaatgcctctgcagaacttgaccctagtttttcaaattggactcaagaatgatcttagtgttggtggttttgtggttttctttgagactttgttattgacagaacagcttctggaaatctgtaatcccagctactccagaggctgaggcaggagatcacttgaacctgggagagggaggttgcagtgagctgagaacacatcattgtactccagcctgggcaacagagcaagactccatctttttcaccgggagtatgggggcttctttggccaaaccgtgcgcgtgcaggctccatgtgctgggcagcagctgtccggccacagcctgtcggttgcatcctgctcctctacagaggtttcttcaactttgacaaaatactcccttttctaatttagcctgttctttcccagcaacaggttcatcttggaagcaggcaggatacagagtaatagagggggtttcgccagagcccttgggggctgcaaatatcagtgctgctgccgccgcccttgccaatgttgttagcccggtgacagcgagacgtgtctaagggccagtgccctggcctctacttcagaacgcagtgccctgtccgtgttcctcttagtacagggtgtttagagaatctttctatggctttttgtgttagatttcaaagacccgtgcactttgacaggatgggattttgtcagttctgtgacttcacgtccgtgtgaaagaggtctttaaggcagttcggttttgtagatcccatgcgaaaggagtcgctcaaaatcagggggcgaactacgcgggcgtgaactcgcaggatttatttttcgggtgcacagtaagtattcagtgaccttcagcggtgccctgacgggtgggtaatcagagctctatatcaccggcctcctctggccctttggcagagggcttcgcagctggcactgggccagaggagaacttcaggacccagcagtgactgtgaagataagcacatccatgatcctggacttcacgttctgattgcttgcttttttcattggttttcttgaaaacaattttgggggcctttttgttgtcttagctcttgacactcggtcttccatcttgtcatttgacatttccttgaaactgctggagctgaaagtttgtgaaa

SEQ ID NO: 306980 - DNA, 2042 bp, Homo sapiens
atttgttcgttcttctgttttcctctttttgttcgttctttttgtttcttcttgctgtcgcgtgtctgcttctcgtcctgttcttctcctgcgtctgctcgggcttattttataatccttgtctctcctttgtccctccggttgtgtatactgtcccgctgtttgttctctcccgtggttcccttctttcgagattttggtttctcacaatcctgctcttgtgttttctctctcccccgcttttttttatttgtgtggatattcccctccgttatttgtgtgccgcggtgcttctcctgggtatctctttttgtctactgttctaccttgacccttgtggtgccccctcgtcgtcactactcttgttttctataaacctttttctcggtcccctctttctcgccaaacaattttttttttttttctttttttttttttttttttcacattgtaaaatatagtttacttcaaaagatgatcctgaagatcccatcacagagtgtttaagggatgattataaacttttagcccttaagagagaatatatatactcaactgagtactgtctttcaaagcagtccctgtcagtttgtccattgattccatagcagctctcactgcccaccctgcttgagaagcctcttggagttgcctagagagtctatagcactcatctgaaggccctccatgagaacaactcttctcttccacatagatatttttgcatcagcccaaagctatttggacacaagtttggtgaacacggtaagaaaaaaacaaaccaagcaacaaaaacaaaaagcaggcagtgctgtgttagactgaaagtaaaagataaaaactctaagaacctatgaagcgccagggcagtgctggttgctttcacccatatggtctcctttggtgttctgctggtgcttatgaagcagtatccctactgacaatgaccctagcttaagagggctgagaactgctgaaagtgaagctgtttataaatggtacagtcaggaccgacagacacatgggtgtggtatgactgcaaagtacctgtggaattcagatgggattaccatccccactataaagggcaatatgatctgttgcaggagggtttatagggtacttagttacacaggtcacactgatccccttttcctctttttttctatgcaagtatctatttgtctatatgtctgtctaccttggtaggttgggctccttgaagaagggttatgttttcttcatctccatatccccagtagctggccaatgcccagtatacaccaggggctcagtcgctgtttgtcttattttcttgttgactctactctgacttaggacatatcactttcctctcttgaccttcacattcagatgtgttaataaaagtggataaagaccactctagctttaaaacaccctccaatatagagagaactctgaaaccagaagcagaagctgaggaatggtgaatagagcattttccctcacacgatgggtatcagggtggtttcttgtcctttcaatgcctctgcagaacttgaccctagtttttcaaattggactcaagaatgatcttagtgttggtggttttgtggttttctttgagactttgttattgacagaacagcttctggaaatcccagctactccagaggctgagattacaggtgcccgccacatagcccggctaattttttgtatttttagtagatacggggtttcaccatgttagccaggatggtctcaatctcttcacctcgtgatctgcccgcctcggcctcccaaagtgctgcgattacaggcgtgagccactgcgcccggcccttttttttttttttaaactaatatttatcaaggaggcaccagctgccaggcagtgaagagcttccaaacagcaactcattggctgcccagaagcaccctgtggcgcagagtcctttcttaggccacctttgggcccagaaaactaaagtgacttgccaagtccacacagccagtatgtgctaagccctctgacttgagagaccgagagcgtcact

SEQ ID NO: 306981 - DNA, 1675 bp, Homo sapiens
atttgttcgttcttctgttttcctctttttgttcgttctttttgtttcttcttgctgtcgcgtgtctgcttctcgtcctgttcttctcctgcgtctgctcgggcttattttataatccttgtctctcctttgtccctccggttgtgtatactgtcccgctgtttgttctctcccgtggttcccttctttcgagattttggtttctcacaatcctgctcttgtgttttctctctcccccgcttttttttatttgtgtggatattcccctccgttatttgtgtgccgcggtgcttctcctgggtatctctttttgtctactgttctaccttgacccttgtggtgccccctcgtcgtcactactcttgttttctataaacctttttctcggtcccctctttctcgccaaacaattttttttttttttctttttttttttttttttttcacattgtaaaatatagtttacttcaaaagatgatcctgaagatcccatcacagagtgtttaagggatgattataaacttttagcccttaagagagaatatatatactcaactgagtactgtctttcaaagcagtccctgtcagtttgtccattgattccatagcagctctcactgcccaccctgcttgagaagcctcttggagttgcctagagagtctatagcactcatctgaaggccctccatgagaacaactcttctcttccacatagatatttttgcatcagcccaaagctatttggacacaagtttggtgaacacggtaagaaaaaaacaaaccaagcaacaaaaacaaaaagcaggcagtgctgtgttagactgaaagtaaaagataaaaactctaagaacctatgaagcgccagggcagtgctggttgctttcacccatatggtctcctttggtgttctgctggtgcttatgaagcagtatccctactgacaatgaccctagcttaagagggctgagaactgctgaaagtgaagctgtttataaatggtacagtcaggaccgacagacacatgggtgtggtatgactgcaaagtacctgtggaattcagatgggattaccatccccactataaagggcaatatgatctgttgcaggagggtttatagggtacttagttacacaggtcacactgatccccttttcctctttttttctatgcaagtatctatttgtctatatgtctgtctaccttggtaggttgggctccttgaagaagggttatgttttcttcatctccatatccccagtagctggccaatgcccagtatacaccaggggctcagtcgctgtttgtcttattttcttgttgactctactctgacttaggacatatcactttcctctcttgaccttcacattcagatgtgttaataaaagtggataaagaccactctagctttaaaacaccctccaatatagagagaactctgaaaccagaagcagaagctgaggaatggtgaatagagcattttccctcacacgatgggtatcagggtggtttcttgtcctttcaatgcctctgcagaacttgaccctagtttttcaaattggactcaagaatgatcttagtgttggtggttttgtggttttctttgagactttgttattgacagaacagcttctggaaatctgatgtatcgttagggatcctctagatcacccc

SEQ ID NO: 306982 - DNA, 568 bp, Homo sapiens
ttctgatttcaaagtacatgttggaaacattaacaaaaacatcaaaatgatagaagtatacctgcttctactaaattcttgatgggaaagttctcaagaacaagcaattgtttccaaacaatgtactttgaaatcagaatcacttcttatcgttttcatatacttctgatgctcttcatcacattagtgatcagaaatgaggtgtaattccccaacccctgcccgcaagagctaagtaggatcttactgtaagttgaagggagttttgccctaactcatggattgtgcaagaatgaactgctgttgggtttgattgactgtcgatggattgtggtgtggtgtatctgaaggctattgaatgcaacttacaatgcttaataaaaatctttattcttttaggtataaaaaaaaaaaaaaaaaaaaaaaaaaaaagaagaaagcagaaaagaagcagaaaaagcaaagaggaaaaagaaaaagaaaaagagcagaaagaatgaaacaggaagaaacagagaaggaaagaaaaggaggcaagcagaagaacaagaacaagaagacacaatgt

SEQ ID NO: 306983 - DNA, 534 bp, Homo sapiens
acttctgatgctcttcatcacattagtgatcagaaatgaggtgtaattccccaacccctgcccgcaagagctaagtaggatcttactgtaagttgaagggagttttgccctaactcatggattgtgcaagaatgaactgctgttgggtttgattgactgtcgatggattgtggtgtggtgtatctgaaggctattgaatgcaacttacaatgcttaataaaaatctttattcttttaggtataaagtatggcgtggcttttaaattcacttgtaaaagctaattttatagaggtttaattcaaatcgaaacaactactgaaaagatcagaaaaccaaagttgaaaaatattttaccttttcaaagtaattccaggtttccggcttagagggacattaatatatgattaatttgtttgatagctcagtttcaagcaaccaaggggataaaaaaattctgtttgataaagcagacttacagaagaggtttttttaagccctgaggaagcaataaatttgactccaccacgttttaa

SEQ ID NO: 306984 - DNA, 364 bp, Homo sapiens
  misc_feature (23)..(23): n is a, c, g, or t
  misc_feature (32)..(32): n is a, c, g, or t
gaggcagtgcacggtgctgctgnggcgctctngaggatcccgtatctctaacattatgtcagtcattcatctgcatgtgaacatcacccacgaaattatagagttcagcttcatctagcatttgttatagtacataagaatatatagtgcagtattctaatgttacattagatctcaaataatcatggctgcagtcaagaggatagcacacaatatggtactttaaattatttcccattgaaaagcaaaaattaatgactaacagatattaaagttaaatttctgaatagaaagaacccaaggcttgtcattttaatttttattgttaatgttagagatacgggttacggggctcgaatccgta

SEQ ID NO: 306985 - DNA, 519 bp, Homo sapiens
ctgtatctaatttaaaacttaaaaaccaaaaaaatttttcccaaaatacagttagtacttgtaaggaggccatgagtaggcgatgcatataatttagtgctggaaaaataattccatatatgctttaattgaaaggatattgagcttatgacccttgcatataaaagacaacattataaactccattacatcttctgtatctctaacattatgtcagtcattcatctgcatgtgaacatcacccacgaaattatagagttcagcttcatctagcatttgttatagtacataagaatatatagtgcagtattctaatgttacattagatctcaaataatcatggctgcagtcaagaggatagcacacaatatggtactttaaattatttcccattgaaaagcaaaaattaatgactaacagatattaaagttaaatttctgaatagaaagaacccaaggcttgtcattttaatttttattgttaatgttagagatacgggttacggggctcgaatccgta

SEQ ID NO: 306986 - DNA, 6320 bp, Homo sapiens
  misc_feature (6308)..(6310): n is a, c, g, or t
  misc_feature (6312)..(6320): n is a, c, g, or t
cattgtttgaatttgaaaacggtaacatcgcagtgctgctcgcgggtctggctagtcaggcgaagtttgcagaatggaatctaattttaatcaagagggagtacctcgaccatcttatgtttttagtgctgacccaattgcaaggccttcagaaataaatttcgatggcattaagcttgatctgtctcatgaattttccttagttgctccaaatactgaggcaaacagtttcgaatctaaagattatctccaggtttgtcttcgaataagaccatttacacagtcagaaaaagaacttgagtctgagggctgtgtgcatattctggattcacagactgttgtgctgaaagagcctcaatgcatccttggtcggttaagtgaaaaaagctcagggcagatggcacagaaattcagtttttccaaggtttttggcccagcaactacacagaaggaattctttcagggttgcattatgcaaccagtaaaagacctcttgaaaggacagagtcgtctgatttttacttacgggctaaccaattcaggaaaaacatatacatttcaagggacagaagaaaatattggcattctgcctcgaactttgaatgtattatttgatagtcttcaagaaagactgtatacaaagatgaaccttaaaccacatagatccagagaatacttaaggttatcatcagaacaagagaaagaagaaattgctagcaaaagtgcattgcttcggcaaattaaagaggttactgtgcataatgatagtgatgatactctttatggaagtttaactaactctttgaatatctcagagtttgaagaatccataaaagattatgaacaagccaacttgaatatggctaatagtataaaattttctgtgtgggtttctttctttgaaatttacaatgaatatatttatgacttatttgttcctgtatcatctaaattccaaaagagaaagatgctgcgcctttcccaagacgtaaagggctattcttttataaaagatctacaatggattcaagtatctgattccaaagaagcctatagacttttaaaactaggaataaagcaccagagtgttgccttcacaaaattgaataatgcttccagtagaagtcacagcatattcactgttaaaatattacagattgaagattctgaaatgtctcgtgtaattcgagtcagtgaattatctttatgtgatcttgctggttcagaacgaactatgaagacacagaatgaaggtgaaaggttaagagagactgggaatatcaacacttctttattgactctgggaaagtgtattaacgtcttgaagaatagtgaaaagtcaaagtttcaacagcatgtgcctttccgggaaagtaaactgactcactattttcaaagtttttttaatggtaaagggaaaatttgtatgattgtcaatatcagccaatgttatttagcctatgatgaaacactcaatgtattgaagttctccgccattgcacaaaaagtttgtgtcccagacactttaaattcctctcaagagaaattatttggacctgtcaaatcttctcaagatgtatcactagacagtaattcaaacagtaaaatattaaatgtaaaaagagccaccatttcatgggaaaatagtctagaagatttgatggaagacgaggatttggttgaggagctagaaaacgctgaagaaactcaaaatgtggaaactaaacttcttgatgaagatctagataaaacattagaggaaaataaggctttcattagccacgaggagaaaagaaaactgttggacttaatagaagacttgaaaaaaaaactgataaatgaaaaaaaggaaaaattaaccttggaatttaaaattcgagaagaagttacacaggagtttactcagtattgggctcaacgggaagctgactttaaggagactctgcttcaagaacgagagatattagaagaaaatgctgaacgtcgtttggctatcttcaaggatttggttggtaaatgtgacactcgagaagaagcagcgaaagacatttgtgccacaaaagttgaaactgaagaagctactgcttgtttagaactaaagtttaatcaaattaaagctgaattagctaaaaccaaaggagaattaatcaaaaccaaagaagagttaaaaaagagagaaaatgaatcagattcattgattcaagagcttgagacatctaataagaaaataattacacagaatcaaagaattaaagaattgataaatataattgatcaaaaagaagatactatcaacgaatttcagaacctaaagtctcatatggaaaacacatttaaatgcaatgacaaggctgatacatcttctttaataataaacaataaattgatttgtaatgaaacagttgaagtacctaaggacagcaaatctaaaatctgttcagaaagaaaaagagtaaatgaaaatgaacttcagcaagatgaaccaccagcaaagaaagggtctatccatgttagttcagctatcactgaagaccaaaagaaaagtgaagaagtgcgaccgaacattgcagaaattgaagacatcagagttttacaagaaaataatgaaggactgagagcatttttactcactattgagaatgaacttaaaaatgaaaaggaagaaaaagcagaattaaataaacagattgttcattttcagcaggaactttctctttctgaaaaaaagaatttaactttaagtaaagaggtccaacaaattcagtcaaattatgatattgcaattgctgaattacatgtgcagaaaagtaaaaatcaagaacaggaggaaaagatcatgaaattgtcaaatgagatagaaactgctacaagaagcattacaaataatgtttcacaaataaaattaatgcacacgaaaatagacgaactacgtactcttgattcagtttctcagatttcaaacatagatttgctcaatctcagggatctgtcaaatggttctgaggaggataatttgccaaatacacagttagaccttttaggtaatgattatttggtaagtaagcaagttaaagaatatcgaattcaagaacccaatagggaaaattctttccactctagtattgaagctatttgggaagaatgtaaagagattgtgaaggcctcttccaaaaaaagtcatcagattgaggaactggaacaacaaattgaaaaattgcaggcagaagtaaaaggctataaggatgaaaacaatagactaaaggagaaggagcataaaaaccaagatgacctactaaaagaaaaagaaactcttatacagcagctgaaagaagaattgcaagaaaaaaatgttactcttgatgttcaaatacagcatgtagttgaaggaaagagagcgctttcagaacttacacaaggtgttacttgctataaggcaaaaataaaggaacttgaaacaattttagagactcagaaagttgaacgtagtcattcagccaagttagaacaagacattttggaaaaggaatctatcatcttaaagctagaaagaaatttgaaggaatttcaagaacatcttcaggattctgtcaaaaacaccaaagatttaaatgtaaaggaactcaagctgaaagaagaaatcacacagttaacaaataatttgcaagatatgaaacatttacttcaattaaaagaagaagaagaagaaaccaacaggcaagaaacagaaaaattgaaagaggaactctctgcaagctctgctcgtacccagaatctgaaagcagatcttcagaggaaggaagaagattatgctgacctgaaagagaaactgactgatgccaaaaagcagattaagcaagtacagaaagaggtatctgtaatgcgtgatgaggataaattactgaggattaaaattaatgaactggagaaaaagaaaaaccagtgttctcaggaattagatatgaaacagcgaaccattcagcaactcaaggagcagttaaataatcagaaagtggaagaagctatacaacagtatgagagagcatgcaaagatctaaatgttaaagagaaaataattgaagacatgcgaatgacactagaagaacaggaacaaactcaggtagaacaggatcaagtgcttgaggctaaattagaggaagttgaaaggctggccacagaattggaaaaatggaaggaaaaatgcaatgatttggaaaccaaaaacaatcaaaggtcaaataaagaacatgagaacaacacagatgtgcttggaaagctcactaatcttcaagatgagttacaggagtctgaacagaaatataatgctgatagaaagaaatggttagaagaaaaaatgatgcttatcactcaagcgaaagaagcagagaatatacgaaataaagagatgaaaaaatatgctgaggacagggagcgtttttttaagcaacagaatgaaatggaaatactgacagcccagctgacagagaaagatagtgaccttcaaaagtggcgagaagaacgagatcaactggttgcagctttagaaatacagctaaaagcactgatatccagtaatgtacagaaagataatgaaattgaacaactaaaaaggatcatatcagagacttctaaaatagaaacacaaatcatggatatcaagcccaaacgtattagttcagcagatcctgacaaacttcaaactgaacctctatcgacaagttttgaaatttccagaaataaaatagaggatggatctgtagtccttgactcttgtgaagtgtcaacagaaaatgatcaaagcactcgatttccaaaacctgagttagagattcaatttacacctttacagccaaacaaaatggcagtgaaacaccctggttgtaccacaccagtgacagttaagattcccaaggctcggaagaggaagagtaatgaaatggaggaggacttggtgaaatgtgaaaataagaagaatgctacacccagaactaatttgaaatttcctatttcagatgatagaaattcttctgtcaaaaaggaacaaaaggttgccatacgtccatcatctaagaaaacatattctttacggagtcaggcatccataattggtgtaaacctggccactaagaaaaaagaaggaacactacagaaatttggagacttcttacaacattctccctcaattcttcaatcaaaagcaaagaagataattgaaacaatgagctcttcaaagctctcaaatgtagaagcaagtaaagaaaatgtgtctcaaccaaaacgagccaaacggaaattatacacaagtgaaatttcatctcctattgatatatcaggccaagtgattttaatggaccagaaaatgaaggagagtgatcaccagattatcaaacgacgacttcgaacaaaaacagccaaataaatcacttatggaaatgtttaatataaattttatagtcatagtcattggaacttgcatcctgtattgtaaatataaatgtatatattatgcattaaatcactctgcatatagattgctgttttatacatagtataattttaattcaataaatgagtcaaaatttgtatatttttataaggcttttttataatagcttctttcaaactgtatttccctattatctcagacattggatcagtgaagatcctaggaaagaggctgttattctcatttattttgctatacaggatgtaataggtcaggtatttggtttacttatatttaacaatgtcttatgaattttttttactttatctgttatacaactgattttacatatctgtttggattatagctaggatttggagaataagtgtgtacagatcacaaaacatgtatatacattatttagaaaagatctcaagtctttaattagaatgtctcacttattttgtaaacattttgtgggtacatagtacatgtatatatttacggggtatgtgagatgttttgacacaggcatgcaatgtgaaatacgtgtatcatggagaatgaggtatccatcccctcaagcatttttcctttgaattacagataatccaattacattctttagatcatttaaaaatatacaagtaagttattattgattatagtcactctattgtgctatcagatagtagatcattctttttatcttatttgtttttgtacccattaaccatccccacctccccctgcaaccgtcagtacccttaccagccactggtaaccattcttctactctgtatgcccatgaggtcaattgattttatttttagatcccataaataaatgagaacatgcagtcttnnncnnnnnnnnn

SEQ ID NO: 306987 - DNA, 6440 bp, Homo sapiens
  misc_feature (6428)..(6430): n is a, c, g, or t
  misc_feature (6432)..(6440): n is a, c, g, or t
cattgtttgaatttgaaaacggtaacatcgcagtgctgctcgcgggtctggctagtcaggcgaagtttgcagaatggaatctaattttaatcaagagggagtacctcgaccatcttatgtttttagtgctgacccaattgcaaggccttcagaaataaatttcgatggcattaagcttgatctgtctcatgaattttccttagttgctccaaatactgaggcaaacagtttcgaatctaaagattatctccaggtttgtcttcgaataagaccatttacacagtcagaaaaagaacttgagtctgagggctgtgtgcatattctggattcacagactgttgtgctgaaagagcctcaatgcatccttggtcggttaagtgaaaaaagctcagggcagatggcacagaaattcagtttttccaaggtttttggcccagcaactacacagaaggaattctttcagggttgcattatgcaaccagtaaaagacctcttgaaaggacagagtcgtctgatttttacttacgggctaaccaattcaggaaaaacatatacatttcaagggacagaagaaaatattggcattctgcctcgaactttgaatgtattatttgatagtcttcaagaaagactgtatacaaagatgaaccttaaaccacatagatccagagaatacttaaggttatcatcagaacaagagaaagaagaaattgctagcaaaagtgcattgcttcggcaaattaaagaggttactgtgcataatgatagtgatgatactctttatggaagtttaactaactctttgaatatctcagagtttgaagaatccataaaagattatgaacaagccaacttgaatatggctaatagtataaaattttctgtgtgggtttctttctttgaaatttacaatgaatatatttatgacttatttgttcctgtatcatctaaattccaaaagagaaagatgctgcgcctttcccaagacgtaaagggctattcttttataaaagatctacaatggattcaagtatctgattccaaagaagcctatagacttttaaaactaggaataaagcaccagagtgttgccttcacaaaattgaataatgcttccagtagaagtcacagcatattcactgttaaaatattacagattgaagattctgaaatgtctcgtgtaattcgagtcagtgaattatctttatgtgatcttgctggttcagaacgaactatgaagacacagaatgaaggtgaaaggttaagagagactgggaatatcaacacttctttattgactctgggaaagtgtattaacgtcttgaagaatagtgaaaagtcaaagtttcaacagcatgtgcctttccgggaaagtaaactgactcactattttcaaagtttttttaatggtaaagggaaaatttgtatgattgtcaatatcagccaatgttatttagcctatgatgaaacactcaatgtattgaagttctccgccattgcacaaaaagtttgtgtcccagacactttaaattcctctcaagagaaattatttggacctgtcaaatcttctcaagatgtatcactagacagtaattcaaacagtaaaatattaaatgtaaaaagagccaccatttcatgggaaaatagtctagaagatttgatggaagacgaggatttggttgaggagctagaaaacgctgaagaaactcaaaatgtggaaactaaacttcttgatgaagatctagataaaacattagaggaaaataaggctttcattagccacgaggagaaaagaaaactgttggacttaatagaagacttgaaaaaaaaactgataaatgaaaaaaaggaaaaattaaccttggaatttaaaattcgagaagaagttacacaggagtttactcagtattgggctcaacgggaagctgactttaaggagactctgcttcaagaacgagagatattagaagaaaatgctgaacgtcgtttggctatcttcaaggatttggttggtaaatgtgacactcgagaagaagcagcgaaagacatttgtgccacaaaagttgaaactgaagaaacacataattatgtaggatttgaagatattattgattctcttcaagataatgttgctgatattaagaaacaggctgaaattgctcacttatatattgcatctcttcctgacccccaggaagctactgcttgtttagaactaaagtttaatcaaattaaagctgaattagctaaaaccaaaggagaattaatcaaaaccaaagaagagttaaaaaagagagaaaatgaatcagattcattgattcaagagcttgagacatctaataagaaaataattacacagaatcaaagaattaaagaattgataaatataattgatcaaaaagaagatactatcaacgaatttcagaacctaaagtctcatatggaaaacacatttaaatgcaatgacaaggctgatacatcttctttaataataaacaataaattgatttgtaatgaaacagttgaagtacctaaggacagcaaatctaaaatctgttcagaaagaaaaagagtaaatgaaaatgaacttcagcaagatgaaccaccagcaaagaaagggtctatccatgttagttcagctatcactgaagaccaaaagaaaagtgaagaagtgcgaccgaacattgcagaaattgaagacatcagagttttacaagaaaataatgaaggactgagagcatttttactcactattgagaatgaacttaaaaatgaaaaggaagaaaaagcagaattaaataaacagattgttcattttcagcaggaactttctctttctgaaaaaaagaatttaactttaagtaaagaggtccaacaaattcagtcaaattatgatattgcaattgctgaattacatgtgcagaaaagtaaaaatcaagaacaggaggaaaagatcatgaaattgtcaaatgagatagaaactgctacaagaagcattacaaataatgtttcacaaataaaattaatgcacacgaaaatagacgaactacgtactcttgattcagtttctcagatttcaaacatagatttgctcaatctcagggatctgtcaaatggttctgaggaggataatttgccaaatacacagttagaccttttaggtaatgattatttggtaagtaagcaagttaaagaatatcgaattcaagaacccaatagggaaaattctttccactctagtattgaagctatttgggaagaatgtaaagagattgtgaaggcctcttccaaaaaaagtcatcagattgaggaactggaacaacaaattgaaaaattgcaggcagaagtaaaaggctataaggatgaaaacaatagactaaaggagaaggagcataaaaaccaagatgacctactaaaagaaaaagaaactcttatacagcagctgaaagaagaattgcaagaaaaaaatgttactcttgatgttcaaatacagcatgtagttgaaggaaagagagcgctttcagaacttacacaaggtgttacttgctataaggcaaaaataaaggaacttgaaacaattttagagactcagaaagttgaacgtagtcattcagccaagttagaacaagacattttggaaaaggaatctatcatcttaaagctagaaagaaatttgaaggaatttcaagaacatcttcaggattctgtcaaaaacaccaaagatttaaatgtaaaggaactcaagctgaaagaagaaatcacacagttaacaaataatttgcaagatatgaaacatttacttcaattaaaagaagaagaagaagaaaccaacaggcaagaaacagaaaaattgaaagaggaactctctgcaagctctgctcgtacccagaatctgaaagcagatcttcagaggaaggaagaagattatgctgacctgaaagagaaactgactgatgccaaaaagcagattaagcaagtacagaaagaggtatctgtaatgcgtgatgaggataaattactgaggattaaaattaatgaactggagaaaaagaaaaaccagtgttctcaggaattagatatgaaacagcgaaccattcagcaactcaaggagcagttaaataatcagaaagtggaagaagctatacaacagtatgagagagcatgcaaagatctaaatgttaaagagaaaataattgaagacatgcgaatgacactagaagaacaggaacaaactcaggtagaacaggatcaagtgcttgaggctaaattagaggaagttgaaaggctggccacagaattggaaaaatggaaggaaaaatgcaatgatttggaaaccaaaaacaatcaaaggtcaaataaagaacatgagaacaacacagatgtgcttggaaagctcactaatcttcaagatgagttacaggagtctgaacagaaatataatgctgatagaaagaaatggttagaagaaaaaatgatgcttatcactcaagcgaaagaagcagagaatatacgaaataaagagatgaaaaaatatgctgaggacagggagcgtttttttaagcaacagaatgaaatggaaatactgacagcccagctgacagagaaagatagtgaccttcaaaagtggcgagaagaacgagatcaactggttgcagctttagaaatacagctaaaagcactgatatccagtaatgtacagaaagataatgaaattgaacaactaaaaaggatcatatcagagacttctaaaatagaaacacaaatcatggatatcaagcccaaacgtattagttcagcagatcctgacaaacttcaaactgaacctctatcgacaagttttgaaatttccagaaataaaatagaggatggatctgtagtccttgactcttgtgaagtgtcaacagaaaatgatcaaagcactcgatttccaaaacctgagttagagattcaatttacacctttacagccaaacaaaatggcagtgaaacaccctggttgtaccacaccagtgacagttaagattcccaaggctcggaagaggaagagtaatgaaatggaggaggacttggtgaaatgtgaaaataagaagaatgctacacccagaactaatttgaaatttcctatttcagatgatagaaattcttctgtcaaaaaggaacaaaaggttgccatacgtccatcatctaagaaaacatattctttacggagtcaggcatccataattggtgtaaacctggccactaagaaaaaagaaggaacactacagaaatttggagacttcttacaacattctccctcaattcttcaatcaaaagcaaagaagataattgaaacaatgagctcttcaaagctctcaaatgtagaagcaagtaaagaaaatgtgtctcaaccaaaacgagccaaacggaaattatacacaagtgaaatttcatctcctattgatatatcaggccaagtgattttaatggaccagaaaatgaaggagagtgatcaccagattatcaaacgacgacttcgaacaaaaacagccaaataaatcacttatggaaatgtttaatataaattttatagtcatagtcattggaacttgcatcctgtattgtaaatataaatgtatatattatgcattaaatcactctgcatatagattgctgttttatacatagtataattttaattcaataaatgagtcaaaatttgtatatttttataaggcttttttataatagcttctttcaaactgtatttccctattatctcagacattggatcagtgaagatcctaggaaagaggctgttattctcatttattttgctatacaggatgtaataggtcaggtatttggtttacttatatttaacaatgtcttatgaattttttttactttatctgttatacaactgattttacatatctgtttggattatagctaggatttggagaataagtgtgtacagatcacaaaacatgtatatacattatttagaaaagatctcaagtctttaattagaatgtctcacttattttgtaaacattttgtgggtacatagtacatgtatatatttacggggtatgtgagatgttttgacacaggcatgcaatgtgaaatacgtgtatcatggagaatgaggtatccatcccctcaagcatttttcctttgaattacagataatccaattacattctttagatcatttaaaaatatacaagtaagttattattgattatagtcactctattgtgctatcagatagtagatcattctttttatcttatttgtttttgtacccattaaccatccccacctccccctgcaaccgtcagtacccttaccagccactggtaaccattcttctactctgtatgcccatgaggtcaattgattttatttttagatcccataaataaatgagaacatgcagtcttnnncnnnnnnnnn

SEQ ID NO: 306988 - DNA, 4929 bp, Homo sapiens
  misc_feature (4917)..(4919): n is a, c, g, or t
  misc_feature (4921)..(4929): n is a, c, g, or t
tagcatttaccagagatctgatccttatgcttcccacctgtgaaatatggatgataccaagctcacagaaagttgtggattaaatgaagcaaatatggaactccccagagtagttcttgatagataataaatgcactaattaactttacttattttcttagtatagctaaacagtgagacgagttaccaaaggtctatttctaaaatgtggaaaggccaacctgatttttcagttaacaaatctttgcaaacatataattttcagtgagaacattatcactattaaaaaggacacagaattacaattgactaaatgtaaagttttattttttgaacagttggacggtatttctcttgggatatatttattcttttataagaattttatcatttacatgtaatagaaactgttggacttaatagaagacttgaaaaaaaaactgataaatgaaaaaaaggaaaaattaaccttggaatttaaaattcgagaagaagttacacaggagtttactcagtattgggctcaacgggaagctgactttaaggagactctgcttcaagaacgagagatattagaagaaaatgctgaacgtcgtttggctatcttcaaggatttggttggtaaatgtgacactcgagaagaagcagcgaaagacatttgtgccacaaaagttgaaactgaagaagctactgcttgtttagaactaaagtttaatcaaattaaagctgaattagctaaaaccaaaggagaattaatcaaaaccaaagaagagttaaaaaagagagaaaatgaatcagattcattgattcaagagcttgagacatctaataagaaaataattacacagaatcaaagaattaaagaattgataaatataattgatcaaaaagaagatactatcaacgaatttcagaacctaaagtctcatatggaaaacacatttaaatgcaatgacaaggctgatacatcttctttaataataaacaataaattgatttgtaatgaaacagttgaagtacctaaggacagcaaatctaaaatctgttcagaaagaaaaagagtaaatgaaaatgaacttcagcaagatgaaccaccagcaaagaaagggtctatccatgttagttcagctatcactgaagaccaaaagaaaagtgaagaagtgcgaccgaacattgcagaaattgaagacatcagagttttacaagaaaataatgaaggactgagagcatttttactcactattgagaatgaacttaaaaatgaaaaggaagaaaaagcagaattaaataaacagattgttcattttcagcaggaactttctctttctgaaaaaaagaatttaactttaagtaaagaggtccaacaaattcagtcaaattatgatattgcaattgctgaattacatgtgcagaaaagtaaaaatcaagaacaggaggaaaagatcatgaaattgtcaaatgagatagaaactgctacaagaagcattacaaataatgtttcacaaataaaattaatgcacacgaaaatagacgaactacgtactcttgattcagtttctcagatttcaaacatagatttgctcaatctcagggatctgtcaaatggttctgaggaggataatttgccaaatacacagttagaccttttaggtaatgattatttggtaagtaagcaagttaaagaatatcgaattcaagaacccaatagggaaaattctttccactctagtattgaagctatttgggaagaatgtaaagagattgtgaaggcctcttccaaaaaaagtcatcagattgaggaactggaacaacaaattgaaaaattgcaggcagaagtaaaaggctataaggatgaaaacaatagactaaaggagaaggagcataaaaaccaagatgacctactaaaagaaaaagaaactcttatacagcagctgaaagaagaattgcaagaaaaaaatgttactcttgatgttcaaatacagcatgtagttgaaggaaagagagcgctttcagaacttacacaaggtgttacttgctataaggcaaaaataaaggaacttgaaacaattttagagactcagaaagttgaacgtagtcattcagccaagttagaacaagacattttggaaaaggaatctatcatcttaaagctagaaagaaatttgaaggaatttcaagaacatcttcaggattctgtcaaaaacaccaaagatttaaatgtaaaggaactcaagctgaaagaagaaatcacacagttaacaaataatttgcaagatatgaaacatttacttcaattaaaagaagaagaagaagaaaccaacaggcaagaaacagaaaaattgaaagaggaactctctgcaagctctgctcgtacccagaatctgaaagcagatcttcagaggaaggaagaagattatgctgacctgaaagagaaactgactgatgccaaaaagcagattaagcaagtacagaaagaggtatctgtaatgcgtgatgaggataaattactgaggattaaaattaatgaactggagaaaaagaaaaaccagtgttctcaggaattagatatgaaacagcgaaccattcagcaactcaaggagcagttaaataatcagaaagtggaagaagctatacaacagtatgagagagcatgcaaagatctaaatgttaaagagaaaataattgaagacatgcgaatgacactagaagaacaggaacaaactcaggtagaacaggatcaagtgcttgaggctaaattagaggaagttgaaaggctggccacagaattggaaaaatggaaggaaaaatgcaatgatttggaaaccaaaaacaatcaaaggtcaaataaagaacatgagaacaacacagatgtgcttggaaagctcactaatcttcaagatgagttacaggagtctgaacagaaatataatgctgatagaaagaaatggttagaagaaaaaatgatgcttatcactcaagcgaaagaagcagagaatatacgaaataaagagatgaaaaaatatgctgaggacagggagcgtttttttaagcaacagaatgaaatggaaatactgacagcccagctgacagagaaagatagtgaccttcaaaagtggcgagaagaacgagatcaactggttgcagctttagaaatacagctaaaagcactgatatccagtaatgtacagaaagataatgaaattgaacaactaaaaaggatcatatcagagacttctaaaatagaaacacaaatcatggatatcaagcccaaacgtattagttcagcagatcctgacaaacttcaaactgaacctctatcgacaagttttgaaatttccagaaataaaatagaggatggatctgtagtccttgactcttgtgaagtgtcaacagaaaatgatcaaagcactcgatttccaaaacctgagttagagattcaatttacacctttacagccaaacaaaatggcagtgaaacaccctggttgtaccacaccagtgacagttaagattcccaaggctcggaagaggaagagtaatgaaatggaggaggacttggtgaaatgtgaaaataagaagaatgctacacccagaactaatttgaaatttcctatttcagatgatagaaattcttctgtcaaaaaggaacaaaaggttgccatacgtccatcatctaagaaaacatattctttacggagtcaggcatccataattggtgtaaacctggccactaagaaaaaagaaggaacactacagaaatttggagacttcttacaacattctccctcaattcttcaatcaaaagcaaagaagataattgaaacaatgagctcttcaaagctctcaaatgtagaagcaagtaaagaaaatgtgtctcaaccaaaacgagccaaacggaaattatacacaagtgaaatttcatctcctattgatatatcaggccaagtgattttaatggaccagaaaatgaaggagagtgatcaccagattatcaaacgacgacttcgaacaaaaacagccaaataaatcacttatggaaatgtttaatataaattttatagtcatagtcattggaacttgcatcctgtattgtaaatataaatgtatatattatgcattaaatcactctgcatatagattgctgttttatacatagtataattttaattcaataaatgagtcaaaatttgtatatttttataaggcttttttataatagcttctttcaaactgtatttccctattatctcagacattggatcagtgaagatcctaggaaagaggctgttattctcatttattttgctatacaggatgtaataggtcaggtatttggtttacttatatttaacaatgtcttatgaattttttttactttatctgttatacaactgattttacatatctgtttggattatagctaggatttggagaataagtgtgtacagatcacaaaacatgtatatacattatttagaaaagatctcaagtctttaattagaatgtctcacttattttgtaaacattttgtgggtacatagtacatgtatatatttacggggtatgtgagatgttttgacacaggcatgcaatgtgaaatacgtgtatcatggagaatgaggtatccatcccctcaagcatttttcctttgaattacagataatccaattacattctttagatcatttaaaaatatacaagtaagttattattgattatagtcactctattgtgctatcagatagtagatcattctttttatcttatttgtttttgtacccattaaccatccccacctccccctgcaaccgtcagtacccttaccagccactggtaaccattcttctactctgtatgcccatgaggtcaattgattttatttttagatcccataaataaatgagaacatgcagtcttnnncnnnnnnnnn

SEQ ID NO: 306989 - DNA, 2303 bp, Homo sapiens
cattgtttgaatttgaaaacggtaacatcgcagtgctgctcgcgggtctggctagtcaggcgaagtttgcagaatggaatctaattttaatcaagagggagtacctcgaccatcttatgtttttagtgctgacccaattgcaaggccttcagaaataaatttcgatggcattaagcttgatctgtctcatgaattttccttagttgctccaaatactgaggcaaacagtttcgaatctaaagattatctccaggtttgtcttcgaataagaccatttacacagtcagaaaaagaacttgagtctgagggctgtgtgcatattctggattcacagactgttgtgctgaaagagcctcaatgcatccttggtcggttaagtgaaaaaagctcagggcagatggcacagaaattcagtttttccaaggtttttggcccagcaactacacagaaggaattctttcagggttgcattatgcaaccagtaaaagacctcttgaaaggacagagtcgtctgatttttacttacgggctaaccaattcaggaaaaacatatacatttcaagggacagaagaaaatattggcattctgcctcgaactttgaatgtattatttgatagtcttcaagaaagactgtatacaaagatgaaccttaaaccacatagatccagagaatacttaaggttatcatcagaacaagagaaagaagaaattgctagcaaaagtgcattgcttcggcaaattaaagaggttactgtgcataatgatagtgatgatactctttatggaagtttaactaactctttgaatatctcagagtttgaagaatccataaaagattatgaacaagccaacttgaatatggctaatagtataaaattttctgtgtgggtttctttctttgaaatttacaatgaatatatttatgacttatttgttcctgtatcatctaaattccaaaagagaaagatgctgcgcctttcccaagacgtaaagggctattcttttataaaagatctacaatggattcaagtatctgattccaaagaagcctatagacttttaaaactaggaataaagcaccagagtgttgccttcacaaaattgaataatgcttccagtagaagtcacagcatattcactgttaaaatattacagattgaagattctgaaatgtctcgtgtaattcgagtcagtgaattatctttatgtgatcttgctggttcagaacgaactatgaagacacagaatgaaggtgaaaggttaagagagactgggaatatcaacacttctttattgactctgggaaagtgtattaacgtcttgaagaatagtgaaaagtcaaagtttcaacagcatgtgcctttccgggaaagtaaactgactcactattttcaaagtttttttaatggtaaagggaaaatttgtatgattgtcaatatcagccaatgttatttagcctatgatgaaacactcaatgtattgaagttctccgccattgcacaaaaagtttgtgtcccagacactttaaattcctctcaagagaaattatttggacctgtcaaatcttctcaagatgtatcactagacagtaattcaaacagtaaaatattaaatgtaaaaagagccaccatttcatgggaaaatagtctagaagatttgatggaagacgaggatttggttgaggagctagaaaacgctgaagaaactcaaaatgtggaaactaaacttcttgatgaagatctagataaaacattagaggaaaataaggctttcattagccacgaggagaaaagaaaactgttggacttaatagaagacttgaaaaaaaaactgataaatgaaaaaaaggaaaaattaaccttggaatttaaaattcgagaagaagttacacaggagtttactcagtattgggctcaacgggaagctgactttaaggagactctgcttcaagaacgagagatattagaagaaaatgctgaacgtcgtttggctatcttcaaggatttggttggtaaatgtgacactcgagaagaagcagcgaaagacatttgtgccacaaaagttgaaactgaagaaacacataattatgtaggatttgaagatattattgattctcttcaagataatgttgctgatattaagaaacaggctgaaattgctcacttatatattgcatctcttcctgacccccaggaagctactgcttgtttagaactaaagtttaatcaaattaaagctgaattagctaaaaccaaaggagaattaatcaaaaccaaagaagagttaaaaaagagagaaaatg

SEQ ID NO: 306990 - DNA, 837 bp, Homo sapiens
tagcatttaccagagatctgatccttatgcttcccacctgtgaaatatggatgataccaagctcacagaaagttgtggattaaatgaagcaaatatggaactccccagagtagttcttgatagataataaatgcactaattaactttacttattttcttagtatagctaaacagtgagacgagttaccaaaggtctatttctaaaatgtggaaaggccaacctgatttttcagttaacaaatctttgcaaacatataattttcagtgagaacattatcactattaaaaaggacacagaattacaattgactaaatgtaaagttttattttttgaacagttggacggtatttctcttgggatatatttattcttttataagaattttatcatttacatgtaatagaaactgttggacttaatagaagacttgaaaaaaaaactgataaatgaaaaaaaggaaaaattaaccttggaatttaaaattcgagaagaagttacacaggagtttactcagtattgggctcaacgggaagctgactttaaggagactctgcttcaagaacgagagatattagaagaaaatgctgaacgtcgtttggctatcttcaaggatttggttggtaaatgtgacactcgagaagaagcagcgaaagacatttgtgccacaaaagttgaaactgaagtatgttaattgaagtatttaaaaatatccagtgaggttttggtaccagggtttagtgtaccacatcaatgatgagaaacaccaagatagtttagaattaaaacaatgctttgtgtgtagctttattataattaggcatgtttttttagaagtg

SEQ ID NO: 306991 - DNA, 319 bp, Homo sapiens
ttttttaaaaactgtctaaattagatggtaccacatgtaaagggtgaaccctactgttaatattaggcatgtggtttttgctatttttaggaaacacataattatgtaggatttgaagatattattgattctcttcaagataatgttgctgatattaagaaacaggctgaaattgctcacttatatattgcatctcttcctgacccccaggaagctactgcttgtttagaactaaagtttaatcaaattaaagctgaattagctaaaaccaaaggagaattaatcaaaaccaaagaagagttaaaaaagagagaaaatg

SEQ ID NO: 306992 - DNA, 6342 bp, Homo sapiens
  misc_feature (6330)..(6332): n is a, c, g, or t
  misc_feature (6334)..(6342): n is a, c, g, or t
cattgtttgaatttgaaaacggtaacatcgcagtgctgctcgcgggtctggctagtcaggcgaagtttgcagaatggaatctaattttaatcaagagggagtacctcgaccatcttatgtttttagtgctgacccaattgcaaggccttcagaaataaatttcgatggcattaagcttgatctgtctcatgaattttccttagttgctccaaatactgaggcaaacagtttcgaatctaaagattatctccaggtttgtcttcgaataagaccatttacacagtcagaaaaagaacttgagtctgagggctgtgtgcatattctggattcacagactgttgtgctgaaagagcctcaatgcatccttggtcggttaagtgaaaaaagctcagggcagatggcacagaaattcagtttttccaaggtttttggcccagcaactacacagaaggaattctttcagggttgcattatgcaaccagtaaaagacctcttgaaaggacagagtcgtctgatttttacttacgggctaaccaattcaggaaaaacatatacatttcaagggacagaagaaaatattggcattctgcctcgaactttgaatgtattatttgatagtcttcaagaaagactgtatacaaagatgaaccttaaaccacatagatccagagaatacttaaggttatcatcagaacaagagaaagaagaaattgctagcaaaagtgcattgcttcggcaaattaaagaggttactgtgcataatgatagtgatgatactctttatggaagtttaactaactctttgaatatctcagagtttgaagaatccataaaagattatgaacaagccaacttgaatatggctaatagtataaaattttctgtgtgggtttctttctttgaaatttacaatgaatatatttatgacttatttgttcctgtatcatctaaattccaaaagagaaagatgctgcgcctttcccaagacgtaaagggctattcttttataaaagatctacaatggattcaagtatctgattccaaagaagcctatagacttttaaaactaggaataaagcaccagagtgttgccttcacaaaattgaataatgcttccagtagaagtcacagcatattcactgttaaaatattacagattgaagattctgaaatgtctcgtgtaattcgagtcagtgaattatctttatgtgatcttgctggttcagaacgaactatgaagacacagaatgaaggtgaaaggttaagagagactgggaatatcaacacttctttattgactctgggaaagtgtattaacgtcttgaagaatagtgaaaagtcaaagtttcaacagcatgtgcctttccgggaaagtaaactgactcactattttcaaagtttttttaatggtttgtgtcccagacactttaaattcctctcaagagaaattatttggacctgtcaaatcttctcaagatgtatcactagacagtaattcaaacagtaaaatattaaatgtaaaaagagccaccatttcatgggaaaatagtctagaagatttgatggaagacgaggatttggttgaggagctagaaaacgctgaagaaactcaaaatgtggaaactaaacttcttgatgaagatctagataaaacattagaggaaaataaggctttcattagccacgaggagaaaagaaaactgttggacttaatagaagacttgaaaaaaaaactgataaatgaaaaaaaggaaaaattaaccttggaatttaaaattcgagaagaagttacacaggagtttactcagtattgggctcaacgggaagctgactttaaggagactctgcttcaagaacgagagatattagaagaaaatgctgaacgtcgtttggctatcttcaaggatttggttggtaaatgtgacactcgagaagaagcagcgaaagacatttgtgccacaaaagttgaaactgaagaaacacataattatgtaggatttgaagatattattgattctcttcaagataatgttgctgatattaagaaacaggctgaaattgctcacttatatattgcatctcttcctgacccccaggaagctactgcttgtttagaactaaagtttaatcaaattaaagctgaattagctaaaaccaaaggagaattaatcaaaaccaaagaagagttaaaaaagagagaaaatgaatcagattcattgattcaagagcttgagacatctaataagaaaataattacacagaatcaaagaattaaagaattgataaatataattgatcaaaaagaagatactatcaacgaatttcagaacctaaagtctcatatggaaaacacatttaaatgcaatgacaaggctgatacatcttctttaataataaacaataaattgatttgtaatgaaacagttgaagtacctaaggacagcaaatctaaaatctgttcagaaagaaaaagagtaaatgaaaatgaacttcagcaagatgaaccaccagcaaagaaagggtctatccatgttagttcagctatcactgaagaccaaaagaaaagtgaagaagtgcgaccgaacattgcagaaattgaagacatcagagttttacaagaaaataatgaaggactgagagcatttttactcactattgagaatgaacttaaaaatgaaaaggaagaaaaagcagaattaaataaacagattgttcattttcagcaggaactttctctttctgaaaaaaagaatttaactttaagtaaagaggtccaacaaattcagtcaaattatgatattgcaattgctgaattacatgtgcagaaaagtaaaaatcaagaacaggaggaaaagatcatgaaattgtcaaatgagatagaaactgctacaagaagcattacaaataatgtttcacaaataaaattaatgcacacgaaaatagacgaactacgtactcttgattcagtttctcagatttcaaacatagatttgctcaatctcagggatctgtcaaatggttctgaggaggataatttgccaaatacacagttagaccttttaggtaatgattatttggtaagtaagcaagttaaagaatatcgaattcaagaacccaatagggaaaattctttccactctagtattgaagctatttgggaagaatgtaaagagattgtgaaggcctcttccaaaaaaagtcatcagattgaggaactggaacaacaaattgaaaaattgcaggcagaagtaaaaggctataaggatgaaaacaatagactaaaggagaaggagcataaaaaccaagatgacctactaaaagaaaaagaaactcttatacagcagctgaaagaagaattgcaagaaaaaaatgttactcttgatgttcaaatacagcatgtagttgaaggaaagagagcgctttcagaacttacacaaggtgttacttgctataaggcaaaaataaaggaacttgaaacaattttagagactcagaaagttgaacgtagtcattcagccaagttagaacaagacattttggaaaaggaatctatcatcttaaagctagaaagaaatttgaaggaatttcaagaacatcttcaggattctgtcaaaaacaccaaagatttaaatgtaaaggaactcaagctgaaagaagaaatcacacagttaacaaataatttgcaagatatgaaacatttacttcaattaaaagaagaagaagaagaaaccaacaggcaagaaacagaaaaattgaaagaggaactctctgcaagctctgctcgtacccagaatctgaaagcagatcttcagaggaaggaagaagattatgctgacctgaaagagaaactgactgatgccaaaaagcagattaagcaagtacagaaagaggtatctgtaatgcgtgatgaggataaattactgaggattaaaattaatgaactggagaaaaagaaaaaccagtgttctcaggaattagatatgaaacagcgaaccattcagcaactcaaggagcagttaaataatcagaaagtggaagaagctatacaacagtatgagagagcatgcaaagatctaaatgttaaagagaaaataattgaagacatgcgaatgacactagaagaacaggaacaaactcaggtagaacaggatcaagtgcttgaggctaaattagaggaagttgaaaggctggccacagaattggaaaaatggaaggaaaaatgcaatgatttggaaaccaaaaacaatcaaaggtcaaataaagaacatgagaacaacacagatgtgcttggaaagctcactaatcttcaagatgagttacaggagtctgaacagaaatataatgctgatagaaagaaatggttagaagaaaaaatgatgcttatcactcaagcgaaagaagcagagaatatacgaaataaagagatgaaaaaatatgctgaggacagggagcgtttttttaagcaacagaatgaaatggaaatactgacagcccagctgacagagaaagatagtgaccttcaaaagtggcgagaagaacgagatcaactggttgcagctttagaaatacagctaaaagcactgatatccagtaatgtacagaaagataatgaaattgaacaactaaaaaggatcatatcagagacttctaaaatagaaacacaaatcatggatatcaagcccaaacgtattagttcagcagatcctgacaaacttcaaactgaacctctatcgacaagttttgaaatttccagaaataaaatagaggatggatctgtagtccttgactcttgtgaagtgtcaacagaaaatgatcaaagcactcgatttccaaaacctgagttagagattcaatttacacctttacagccaaacaaaatggcagtgaaacaccctggttgtaccacaccagtgacagttaagattcccaaggctcggaagaggaagagtaatgaaatggaggaggacttggtgaaatgtgaaaataagaagaatgctacacccagaactaatttgaaatttcctatttcagatgatagaaattcttctgtcaaaaaggaacaaaaggttgccatacgtccatcatctaagaaaacatattctttacggagtcaggcatccataattggtgtaaacctggccactaagaaaaaagaaggaacactacagaaatttggagacttcttacaacattctccctcaattcttcaatcaaaagcaaagaagataattgaaacaatgagctcttcaaagctctcaaatgtagaagcaagtaaagaaaatgtgtctcaaccaaaacgagccaaacggaaattatacacaagtgaaatttcatctcctattgatatatcaggccaagtgattttaatggaccagaaaatgaaggagagtgatcaccagattatcaaacgacgacttcgaacaaaaacagccaaataaatcacttatggaaatgtttaatataaattttatagtcatagtcattggaacttgcatcctgtattgtaaatataaatgtatatattatgcattaaatcactctgcatatagattgctgttttatacatagtataattttaattcaataaatgagtcaaaatttgtatatttttataaggcttttttataatagcttctttcaaactgtatttccctattatctcagacattggatcagtgaagatcctaggaaagaggctgttattctcatttattttgctatacaggatgtaataggtcaggtatttggtttacttatatttaacaatgtcttatgaattttttttactttatctgttatacaactgattttacatatctgtttggattatagctaggatttggagaataagtgtgtacagatcacaaaacatgtatatacattatttagaaaagatctcaagtctttaattagaatgtctcacttattttgtaaacattttgtgggtacatagtacatgtatatatttacggggtatgtgagatgttttgacacaggcatgcaatgtgaaatacgtgtatcatggagaatgaggtatccatcccctcaagcatttttcctttgaattacagataatccaattacattctttagatcatttaaaaatatacaagtaagttattattgattatagtcactctattgtgctatcagatagtagatcattctttttatcttatttgtttttgtacccattaaccatccccacctccccctgcaaccgtcagtacccttaccagccactggtaaccattcttctactctgtatgcccatgaggtcaattgattttatttttagatcccataaataaatgagaacatgcagtcttnnncnnnnnnnnn
